United States Patent Application Publication US 2018/0305689 A1 - sequence listing, part 40

SEQ ID NO: 582634 - RNA, 19 nt, Artificial Sequence
  Description of Artificial Sequence: Synthetic oligonucleotide
  Antisense strand to SEQ ID NO: 582633
aguaucacaggaaagaaag

SEQ ID NO: 582635 - RNA, 19 nt, Artificial Sequence
  Description of Artificial Sequence: Synthetic oligonucleotide
  Sense strand starting at position 3082 of SEQ ID NO: 318699
gauacuuugagguaggugu

SEQ ID NO: 582636 - RNA, 19 nt, Artificial Sequence
  Description of Artificial Sequence: Synthetic oligonucleotide
  Antisense strand to SEQ ID NO: 582635
acaccuaccucaaaguauc

SEQ ID NO: 582637 - RNA, 19 nt, Artificial Sequence
  Description of Artificial Sequence: Synthetic oligonucleotide
  Sense strand starting at position 3100 of SEQ ID NO: 318699
uguuauggauuugggagaa

SEQ ID NO: 582638 - RNA, 19 nt, Artificial Sequence
  Description of Artificial Sequence: Synthetic oligonucleotide
  Antisense strand to SEQ ID NO: 582637
uucucccaaauccauaaca

SEQ ID NO: 582639 - RNA, 19 nt, Artificial Sequence
  Description of Artificial Sequence: Synthetic oligonucleotide
  Sense strand starting at position 3195 of SEQ ID NO: 318699
gagacacaauguuucuuga

SEQ ID NO: 582640 - RNA, 19 nt, Artificial Sequence
  Description of Artificial Sequence: Synthetic oligonucleotide
  Antisense strand to SEQ ID NO: 582639
ucaagaaacauugugucuc

SEQ ID NO: 582641 - RNA, 19 nt, Artificial Sequence
  Description of Artificial Sequence: Synthetic oligonucleotide
  Sense strand starting at position 3197 of SEQ ID NO: 318699
gacacaauguuucuugaga

SEQ ID NO: 582642 - RNA, 19 nt, Artificial Sequence
  Description of Artificial Sequence: Synthetic oligonucleotide
  Antisense strand to SEQ ID NO: 582641
ucucaagaaacauuguguc

SEQ ID NO: 582643 - RNA, 19 nt, Artificial Sequence
  Description of Artificial Sequence: Synthetic oligonucleotide
  Sense strand starting at position 3198 of SEQ ID NO: 318699
acacaauguuucuugagaa

SEQ ID NO: 582644 - RNA, 19 nt, Artificial Sequence
  Description of Artificial Sequence: Synthetic oligonucleotide
  Antisense strand to SEQ ID NO: 582643
uucucaagaaacauugugu

SEQ ID NO: 582645 - RNA, 19 nt, Artificial Sequence
  Description of Artificial Sequence: Synthetic oligonucleotide
  Sense strand starting at position 3569 of SEQ ID NO: 318699
gcuagcaugauugagugaa

SEQ ID NO: 582646 - RNA, 19 nt, Artificial Sequence
  Description of Artificial Sequence: Synthetic oligonucleotide
  Antisense strand to SEQ ID NO: 582645
uucacucaaucaugcuagc

SEQ ID NO: 582647 - RNA, 19 nt, Artificial Sequence
  Description of Artificial Sequence: Synthetic oligonucleotide
  Sense strand starting at position 3571 of SEQ ID NO: 318699
uagcaugauugagugaaug

SEQ ID NO: 582648 - RNA, 19 nt, Artificial Sequence
  Description of Artificial Sequence: Synthetic oligonucleotide
  Antisense strand to SEQ ID NO: 582647
cauucacucaaucaugcua

SEQ ID NO: 582649 - RNA, 19 nt, Artificial Sequence
  Description of Artificial Sequence: Synthetic oligonucleotide
  Sense strand starting at position 3617 of SEQ ID NO: 318699
ccucuuacaucuguguacu

SEQ ID NO: 582650 - RNA, 19 nt, Artificial Sequence
  Description of Artificial Sequence: Synthetic oligonucleotide
  Antisense strand to SEQ ID NO: 582649
aguacacagauguaagagg

SEQ ID NO: 582651 - RNA, 19 nt, Artificial Sequence
  Description of Artificial Sequence: Synthetic oligonucleotide
  Sense strand starting at position 3619 of SEQ ID NO: 318699
ucuuacaucuguguacuga

SEQ ID NO: 582652 - RNA, 19 nt, Artificial Sequence
  Description of Artificial Sequence: Synthetic oligonucleotide
  Antisense strand to SEQ ID NO: 582651
ucaguacacagauguaaga

SEQ ID NO: 582653 - RNA, 19 nt, Artificial Sequence
  Description of Artificial Sequence: Synthetic oligonucleotide
  Sense strand starting at position 3627 of SEQ ID NO: 318699
cuguguacugagugggaau

SEQ ID NO: 582654 - RNA, 19 nt, Artificial Sequence
  Description of Artificial Sequence: Synthetic oligonucleotide
  Antisense strand to SEQ ID NO: 582653
auucccacucaguacacag

SEQ ID NO: 582655 - RNA, 19 nt, Artificial Sequence
  Description of Artificial Sequence: Synthetic oligonucleotide
  Sense strand starting at position 3628 of SEQ ID NO: 318699
uguguacugagugggaauu

SEQ ID NO: 582656 - RNA, 19 nt, Artificial Sequence
  Description of Artificial Sequence: Synthetic oligonucleotide
  Antisense strand to SEQ ID NO: 582655
aauucccacucaguacaca

SEQ ID NO: 582657 - RNA, 19 nt, Artificial Sequence
  Description of Artificial Sequence: Synthetic oligonucleotide
  Sense strand starting at position 3680 of SEQ ID NO: 318699
gcuggacuggucgaaugaa

SEQ ID NO: 582658 - RNA, 19 nt, Artificial Sequence
  Description of Artificial Sequence: Synthetic oligonucleotide
  Antisense strand to SEQ ID NO: 582657
uucauucgaccaguccagc

SEQ ID NO: 582659 - RNA, 19 nt, Artificial Sequence
  Description of Artificial Sequence: Synthetic oligonucleotide
  Sense strand starting at position 3731 of SEQ ID NO: 318699
cacggucuuccagaagaac

SEQ ID NO: 582660 - RNA, 19 nt, Artificial Sequence
  Description of Artificial Sequence: Synthetic oligonucleotide
  Antisense strand to SEQ ID NO: 582659
guucuucuggaagaccgug

SEQ ID NO: 582661 - RNA, 19 nt, Artificial Sequence
  Description of Artificial Sequence: Synthetic oligonucleotide
  Sense strand starting at position 3793 of SEQ ID NO: 318699
agggaaucauguuuguggu

SEQ ID NO: 582662 - RNA, 19 nt, Artificial Sequence
  Description of Artificial Sequence: Synthetic oligonucleotide
  Antisense strand to SEQ ID NO: 582661
accacaaacaugauucccu

SEQ ID NO: 582663 - RNA, 19 nt, Artificial Sequence
  Description of Artificial Sequence: Synthetic oligonucleotide
  Sense strand starting at position 3794 of SEQ ID NO: 318699
gggaaucauguuugugguc

SEQ ID NO: 582664 - RNA, 19 nt, Artificial Sequence
  Description of Artificial Sequence: Synthetic oligonucleotide
  Antisense strand to SEQ ID NO: 582663
gaccacaaacaugauuccc

SEQ ID NO: 582665 - RNA, 19 nt, Artificial Sequence
  Description of Artificial Sequence: Synthetic oligonucleotide
  Sense strand starting at position 3795 of SEQ ID NO: 318699
ggaaucauguuuguggucu

SEQ ID NO: 582666 - RNA, 19 nt, Artificial Sequence
  Description of Artificial Sequence: Synthetic oligonucleotide
  Antisense strand to SEQ ID NO: 582665
agaccacaaacaugauucc

SEQ ID NO: 582667 - RNA, 19 nt, Artificial Sequence
  Description of Artificial Sequence: Synthetic oligonucleotide
  Sense strand starting at position 3799 of SEQ ID NO: 318699
ucauguuuguggucucauc

SEQ ID NO: 582668 - RNA, 19 nt, Artificial Sequence
  Description of Artificial Sequence: Synthetic oligonucleotide
  Antisense strand to SEQ ID NO: 582667
gaugagaccacaaacauga

SEQ ID NO: 582669 - RNA, 19 nt, Artificial Sequence
  Description of Artificial Sequence: Synthetic oligonucleotide
  Sense strand starting at position 3843 of SEQ ID NO: 318699
gagugagccucgccuccaa

SEQ ID NO: 582670 - RNA, 19 nt, Artificial Sequence
  Description of Artificial Sequence: Synthetic oligonucleotide
  Antisense strand to SEQ ID NO: 582669
uuggaggcgaggcucacuc

SEQ ID NO: 582671 - RNA, 19 nt, Artificial Sequence
  Description of Artificial Sequence: Synthetic oligonucleotide
  Sense strand starting at position 166 of SEQ ID NO: 318700
acgucagauuaacuuugau

SEQ ID NO: 582672 - RNA, 19 nt, Artificial Sequence
  Description of Artificial Sequence: Synthetic oligonucleotide
  Antisense strand to SEQ ID NO: 582671
aucaaaguuaaucugacgu

SEQ ID NO: 582673 - RNA, 19 nt, Artificial Sequence
  Description of Artificial Sequence: Synthetic oligonucleotide
  Sense strand starting at position 169 of SEQ ID NO: 318700
ucagauuaacuuugauguu

SEQ ID NO: 582674 - RNA, 19 nt, Artificial Sequence
  Description of Artificial Sequence: Synthetic oligonucleotide
  Antisense strand to SEQ ID NO: 582673
aacaucaaaguuaaucuga

SEQ ID NO: 582675 - RNA, 19 nt, Artificial Sequence
  Description of Artificial Sequence: Synthetic oligonucleotide
  Sense strand starting at position 243 of SEQ ID NO: 318700
uguguuucucuauagauaa

SEQ ID NO: 582676 - RNA, 19 nt, Artificial Sequence
  Description of Artificial Sequence: Synthetic oligonucleotide
  Antisense strand to SEQ ID NO: 582675
uuaucuauagagaaacaca

SEQ ID NO: 582677 - RNA, 19 nt, Artificial Sequence
  Description of Artificial Sequence: Synthetic oligonucleotide
  Sense strand starting at position 270 of SEQ ID NO: 318700
cuggcaaugccguucuuua

SEQ ID NO: 582678 - RNA, 19 nt, Artificial Sequence
  Description of Artificial Sequence: Synthetic oligonucleotide
  Antisense strand to SEQ ID NO: 582677
uaaagaacggcauugccag

SEQ ID NO: 582679 - RNA, 19 nt, Artificial Sequence
  Description of Artificial Sequence: Synthetic oligonucleotide
  Sense strand starting at position 483 of SEQ ID NO: 318700
ggcaguuaugucuacagac

SEQ ID NO: 582680 - RNA, 19 nt, Artificial Sequence
  Description of Artificial Sequence: Synthetic oligonucleotide
  Antisense strand to SEQ ID NO: 582679
gucuguagacauaacugcc

SEQ ID NO: 582681 - RNA, 19 nt, Artificial Sequence
  Description of Artificial Sequence: Synthetic oligonucleotide
  Sense strand starting at position 519 of SEQ ID NO: 318700
agccaagcucgauaaauug

SEQ ID NO: 582682 - RNA, 19 nt, Artificial Sequence
  Description of Artificial Sequence: Synthetic oligonucleotide
  Antisense strand to SEQ ID NO: 582681
caauuuaucgagcuuggcu

SEQ ID NO: 582683 - RNA, 19 nt, Artificial Sequence
  Description of Artificial Sequence: Synthetic oligonucleotide
  Sense strand starting at position 644 of SEQ ID NO: 318700
uauccuuagguggagagua

SEQ ID NO: 582684 - RNA, 19 nt, Artificial Sequence
  Description of Artificial Sequence: Synthetic oligonucleotide
  Antisense strand to SEQ ID NO: 582683
uacucuccaccuaaggaua

SEQ ID NO: 582685 - RNA, 19 nt, Artificial Sequence
  Description of Artificial Sequence: Synthetic oligonucleotide
  Sense strand starting at position 654 of SEQ ID NO: 318700
uggagaguacuguaucuuu

SEQ ID NO: 582686 - RNA, 19 nt, Artificial Sequence
  Description of Artificial Sequence: Synthetic oligonucleotide
  Antisense strand to SEQ ID NO: 582685
aaagauacaguacucucca

SEQ ID NO: 582687 - RNA, 19 nt, Artificial Sequence
  Description of Artificial Sequence: Synthetic oligonucleotide
  Sense strand starting at position 748 of SEQ ID NO: 318700
cugcaaucugaagauccau

SEQ ID NO: 582688 - RNA, 19 nt, Artificial Sequence
  Description of Artificial Sequence: Synthetic oligonucleotide
  Antisense strand to SEQ ID NO: 582687
auggaucuucagauugcag

SEQ ID NO: 582689 - RNA, 19 nt, Artificial Sequence
  Description of Artificial Sequence: Synthetic oligonucleotide
  Sense strand starting at position 884 of SEQ ID NO: 318700
ugcccuagugaacaaugua

SEQ ID NO: 582690 - RNA, 19 nt, Artificial Sequence
  Description of Artificial Sequence: Synthetic oligonucleotide
  Antisense strand to SEQ ID NO: 582689
uacauuguucacuagggca

SEQ ID NO: 582691 - RNA, 19 nt, Artificial Sequence
  Description of Artificial Sequence: Synthetic oligonucleotide
  Sense strand starting at position 887 of SEQ ID NO: 318700
ccuagugaacaauguaaac

SEQ ID NO: 582692 - RNA, 19 nt, Artificial Sequence
  Description of Artificial Sequence: Synthetic oligonucleotide
  Antisense strand to SEQ ID NO: 582691
guuuacauuguucacuagg

SEQ ID NO: 582693 - RNA, 19 nt, Artificial Sequence
  Description of Artificial Sequence: Synthetic oligonucleotide
  Sense strand starting at position 961 of SEQ ID NO: 318700
gucucauaggccgaauaca

SEQ ID NO: 582694 - RNA, 19 nt, Artificial Sequence
  Description of Artificial Sequence: Synthetic oligonucleotide
  Antisense strand to SEQ ID NO: 582693
uguauucggccuaugagac

SEQ ID NO: 582695 - RNA, 19 nt, Artificial Sequence
  Description of Artificial Sequence: Synthetic oligonucleotide
  Sense strand starting at position 1255 of SEQ ID NO: 318700
guaguagaaccucaccuaa

SEQ ID NO: 582696 - RNA, 19 nt, Artificial Sequence
  Description of Artificial Sequence: Synthetic oligonucleotide
  Antisense strand to SEQ ID NO: 582695
uuaggugagguucuacuac

SEQ ID NO: 582697 - RNA, 19 nt, Artificial Sequence
  Description of Artificial Sequence: Synthetic oligonucleotide
  Sense strand starting at position 1318 of SEQ ID NO: 318700
aaaguugccuugucauuug

SEQ ID NO: 582698 - RNA, 19 nt, Artificial Sequence
  Description of Artificial Sequence: Synthetic oligonucleotide
  Antisense strand to SEQ ID NO: 582697
caaaugacaaggcaacuuu

SEQ ID NO: 582699 - RNA, 19 nt, Artificial Sequence
  Description of Artificial Sequence: Synthetic oligonucleotide
  Sense strand starting at position 1344 of SEQ ID NO: 318700
aguugaucucuuuaaagua

SEQ ID NO: 582700 - RNA, 19 nt, Artificial Sequence
  Description of Artificial Sequence: Synthetic oligonucleotide
  Antisense strand to SEQ ID NO: 582699
uacuuuaaagagaucaacu

SEQ ID NO: 582701 - RNA, 19 nt, Artificial Sequence
  Description of Artificial Sequence: Synthetic oligonucleotide
  Sense strand starting at position 1400 of SEQ ID NO: 318700
ucccauugguuaccacaga

SEQ ID NO: 582702 - RNA, 19 nt, Artificial Sequence
  Description of Artificial Sequence: Synthetic oligonucleotide
  Antisense strand to SEQ ID NO: 582701
ucugugguaaccaauggga

SEQ ID NO: 582703 - RNA, 19 nt, Artificial Sequence
  Description of Artificial Sequence: Synthetic oligonucleotide
  Sense strand starting at position 1414 of SEQ ID NO: 318700
acagaaaguucuuuccuga

SEQ ID NO: 582704 - RNA, 19 nt, Artificial Sequence
  Description of Artificial Sequence: Synthetic oligonucleotide
  Antisense strand to SEQ ID NO: 582703
ucaggaaagaacuuucugu

SEQ ID NO: 582705 - RNA, 19 nt, Artificial Sequence
  Description of Artificial Sequence: Synthetic oligonucleotide
  Sense strand starting at position 1684 of SEQ ID NO: 318700
ggauaaugccgagaacccu

SEQ ID NO: 582706 - RNA, 19 nt, Artificial Sequence
  Description of Artificial Sequence: Synthetic oligonucleotide
  Antisense strand to SEQ ID NO: 582705
aggguucucggcauuaucc

SEQ ID NO: 582707 - RNA, 19 nt, Artificial Sequence
  Description of Artificial Sequence: Synthetic oligonucleotide
  Sense strand starting at position 1782 of SEQ ID NO: 318700
guaaguagcagggaacuuu

SEQ ID NO: 582708 - RNA, 19 nt, Artificial Sequence
  Description of Artificial Sequence: Synthetic oligonucleotide
  Antisense strand to SEQ ID NO: 582707
aaaguucccugcuacuuac

SEQ ID NO: 582709 - RNA, 19 nt, Artificial Sequence
  Description of Artificial Sequence: Synthetic oligonucleotide
  Sense strand starting at position 2396 of SEQ ID NO: 318700
uccuacuuuguuuaggaaa

SEQ ID NO: 582710 - RNA, 19 nt, Artificial Sequence
  Description of Artificial Sequence: Synthetic oligonucleotide
  Antisense strand to SEQ ID NO: 582709
uuuccuaaacaaaguagga

SEQ ID NO: 582711 - RNA, 19 nt, Artificial Sequence
  Description of Artificial Sequence: Synthetic oligonucleotide
  Sense strand starting at position 2480 of SEQ ID NO: 318700
aagcauuagcgcuucucga

SEQ ID NO: 582712 - RNA, 19 nt, Artificial Sequence
  Description of Artificial Sequence: Synthetic oligonucleotide
  Antisense strand to SEQ ID NO: 582711
ucgagaagcgcuaaugcuu

SEQ ID NO: 582713 - RNA, 19 nt, Artificial Sequence
  Description of Artificial Sequence: Synthetic oligonucleotide
  Sense strand starting at position 2550 of SEQ ID NO: 318700
ugguguuauuguuugauuu

SEQ ID NO: 582714 - RNA, 19 nt, Artificial Sequence
  Description of Artificial Sequence: Synthetic oligonucleotide
  Antisense strand to SEQ ID NO: 582713
aaaucaaacaauaacacca

SEQ ID NO: 582715 - RNA, 19 nt, Artificial Sequence
  Description of Artificial Sequence: Synthetic oligonucleotide
  Sense strand starting at position 2704 of SEQ ID NO: 318700
aagaguucucugcaaaggu

SEQ ID NO: 582716 - RNA, 19 nt, Artificial Sequence
  Description of Artificial Sequence: Synthetic oligonucleotide
  Antisense strand to SEQ ID NO: 582715
accuuugcagagaacucuu

SEQ ID NO: 582717 - RNA, 19 nt, Artificial Sequence
  Description of Artificial Sequence: Synthetic oligonucleotide
  Sense strand starting at position 2731 of SEQ ID NO: 318700
cuucuaggagcuuaaugua

SEQ ID NO: 582718 - RNA, 19 nt, Artificial Sequence
  Description of Artificial Sequence: Synthetic oligonucleotide
  Antisense strand to SEQ ID NO: 582717
uacauuaagcuccuagaag

SEQ ID NO: 582719 - RNA, 19 nt, Artificial Sequence
  Description of Artificial Sequence: Synthetic oligonucleotide
  Sense strand starting at position 2886 of SEQ ID NO: 318700
uugagucuccauggugaaa

SEQ ID NO: 582720 - RNA, 19 nt, Artificial Sequence
  Description of Artificial Sequence: Synthetic oligonucleotide
  Antisense strand to SEQ ID NO: 582719
uuucaccauggagacucaa

SEQ ID NO: 582721 - RNA, 19 nt, Artificial Sequence
  Description of Artificial Sequence: Synthetic oligonucleotide
  Sense strand starting at position 2934 of SEQ ID NO: 318700
ugcagaaucccauauagca

SEQ ID NO: 582722 - RNA, 19 nt, Artificial Sequence
  Description of Artificial Sequence: Synthetic oligonucleotide
  Antisense strand to SEQ ID NO: 582721
ugcuauaugggauucugca

SEQ ID NO: 582723 - RNA, 19 nt, Artificial Sequence
  Description of Artificial Sequence: Synthetic oligonucleotide
  Sense strand starting at position 3103 of SEQ ID NO: 318700
uuauuaucucacugucaga

SEQ ID NO: 582724 - RNA, 19 nt, Artificial Sequence
  Description of Artificial Sequence: Synthetic oligonucleotide
  Antisense strand to SEQ ID NO: 582723
ucugacagugagauaauaa

SEQ ID NO: 582725 - RNA, 19 nt, Artificial Sequence
  Description of Artificial Sequence: Synthetic oligonucleotide
  Sense strand starting at position 3141 of SEQ ID NO: 318700
auauacugugcuuaagauc

SEQ ID NO: 582726 - RNA, 19 nt, Artificial Sequence
  Description of Artificial Sequence: Synthetic oligonucleotide
  Antisense strand to SEQ ID NO: 582725
gaucuuaagcacaguauau

SEQ ID NO: 582727 - RNA, 19 nt, Artificial Sequence
  Description of Artificial Sequence: Synthetic oligonucleotide
  Sense strand starting at position 3147 of SEQ ID NO: 318700
ugugcuuaagaucaacagu

SEQ ID NO: 582728 - RNA, 19 nt, Artificial Sequence
  Description of Artificial Sequence: Synthetic oligonucleotide
  Antisense strand to SEQ ID NO: 582727
acuguugaucuuaagcaca

SEQ ID NO: 582729 - RNA, 19 nt, Artificial Sequence
  Description of Artificial Sequence: Synthetic oligonucleotide
  Sense strand starting at position 3150 of SEQ ID NO: 318700
gcuuaagaucaacaguaua

SEQ ID NO: 582730 - RNA, 19 nt, Artificial Sequence
  Description of Artificial Sequence: Synthetic oligonucleotide
  Antisense strand to SEQ ID NO: 582729
uauacuguugaucuuaagc

SEQ ID NO: 582731 - RNA, 19 nt, Artificial Sequence
  Description of Artificial Sequence: Synthetic oligonucleotide
  Sense strand starting at position 3259 of SEQ ID NO: 318700
aguuuauaagcauggaaau

SEQ ID NO: 582732 - RNA, 19 nt, Artificial Sequence
  Description of Artificial Sequence: Synthetic oligonucleotide
  Antisense strand to SEQ ID NO: 582731
auuuccaugcuuauaaacu

SEQ ID NO: 582733 - RNA, 19 nt, Artificial Sequence
  Description of Artificial Sequence: Synthetic oligonucleotide
  Sense strand starting at position 3260 of SEQ ID NO: 318700
guuuauaagcauggaaaua

SEQ ID NO: 582734 - RNA, 19 nt, Artificial Sequence
  Description of Artificial Sequence: Synthetic oligonucleotide
  Antisense strand to SEQ ID NO: 582733
uauuuccaugcuuauaaac

SEQ ID NO: 582735 - RNA, 19 nt, Artificial Sequence
  Description of Artificial Sequence: Synthetic oligonucleotide
  Sense strand starting at position 3290 of SEQ ID NO: 318700
gcaacuucugaauagaugu

SEQ ID NO: 582736 - RNA, 19 nt, Artificial Sequence
  Description of Artificial Sequence: Synthetic oligonucleotide
  Antisense strand to SEQ ID NO: 582735
acaucuauucagaaguugc

SEQ ID NO: 582737 - RNA, 19 nt, Artificial Sequence
  Description of Artificial Sequence: Synthetic oligonucleotide
  Sense strand starting at position 3297 of SEQ ID NO: 318700
cugaauagauguuuacaag

SEQ ID NO: 582738 - RNA, 19 nt, Artificial Sequence
  Description of Artificial Sequence: Synthetic oligonucleotide
  Antisense strand to SEQ ID NO: 582737
cuuguaaacaucuauucag

SEQ ID NO: 582739 - RNA, 19 nt, Artificial Sequence
  Description of Artificial Sequence: Synthetic oligonucleotide
  Sense strand starting at position 3350 of SEQ ID NO: 318700
ucggaucacaccuaguaga

SEQ ID NO: 582740 - RNA, 19 nt, Artificial Sequence
  Description of Artificial Sequence: Synthetic oligonucleotide
  Antisense strand to SEQ ID NO: 582739
ucuacuaggugugauccga

SEQ ID NO: 582741 - RNA, 19 nt, Artificial Sequence
  Description of Artificial Sequence: Synthetic oligonucleotide
  Sense strand starting at position 3358 of SEQ ID NO: 318700
caccuaguagauuguaaag

SEQ ID NO: 582742 - RNA, 19 nt, Artificial Sequence
  Description of Artificial Sequence: Synthetic oligonucleotide
  Antisense strand to SEQ ID NO: 582741
cuuuacaaucuacuaggug

SEQ ID NO: 582743 - RNA, 19 nt, Artificial Sequence
  Description of Artificial Sequence: Synthetic oligonucleotide
  Sense strand starting at position 3369 of SEQ ID NO: 318700
uuguaaagccaguacucaa

SEQ ID NO: 582744 - RNA, 19 nt, Artificial Sequence
  Description of Artificial Sequence: Synthetic oligonucleotide
  Antisense strand to SEQ ID NO: 582743
uugaguacuggcuuuacaa

SEQ ID NO: 582745 - RNA, 19 nt, Artificial Sequence
  Description of Artificial Sequence: Synthetic oligonucleotide
  Sense strand starting at position 3422 of SEQ ID NO: 318700
ugcuguuaucgauagaaac

SEQ ID NO: 582746 - RNA, 19 nt, Artificial Sequence
  Description of Artificial Sequence: Synthetic oligonucleotide
  Antisense strand to SEQ ID NO: 582745
guuucuaucgauaacagca

SEQ ID NO: 582747 - RNA, 19 nt, Artificial Sequence
  Description of Artificial Sequence: Synthetic oligonucleotide
  Sense strand starting at position 3467 of SEQ ID NO: 318700
cuuagugauuuguuucuua

SEQ ID NO: 582748 - RNA, 19 nt, Artificial Sequence
  Description of Artificial Sequence: Synthetic oligonucleotide
  Antisense strand to SEQ ID NO: 582747
uaagaaacaaaucacuaag

SEQ ID NO: 582749 - RNA, 19 nt, Artificial Sequence
  Description of Artificial Sequence: Synthetic oligonucleotide
  Sense strand starting at position 3688 of SEQ ID NO: 318700
gagguaacccaaugguaau

SEQ ID NO: 582750 - RNA, 19 nt, Artificial Sequence
  Description of Artificial Sequence: Synthetic oligonucleotide
  Antisense strand to SEQ ID NO: 582749
auuaccauuggguuaccuc

SEQ ID NO: 582751 - RNA, 19 nt, Artificial Sequence
  Description of Artificial Sequence: Synthetic oligonucleotide
  Sense strand starting at position 188 of SEQ ID NO: 318701
guggaacagucuuuaugag

SEQ ID NO: 582752 - RNA, 19 nt, Artificial Sequence
  Description of Artificial Sequence: Synthetic oligonucleotide
  Antisense strand to SEQ ID NO: 582751
cucauaaagacuguuccac

SEQ ID NO: 582753 - RNA, 19 nt, Artificial Sequence
  Description of Artificial Sequence: Synthetic oligonucleotide
  Sense strand starting at position 242 of SEQ ID NO: 318701
acacaugaauugucugaag

SEQ ID NO: 582754 - RNA, 19 nt, Artificial Sequence
  Description of Artificial Sequence: Synthetic oligonucleotide
  Antisense strand to SEQ ID NO: 582753
cuucagacaauucaugugu

SEQ ID NO: 582755 - RNA, 19 nt, Artificial Sequence
  Description of Artificial Sequence: Synthetic oligonucleotide
  Sense strand starting at position 244 of SEQ ID NO: 318701
acaugaauugucugaaguu

SEQ ID NO: 582756 - RNA, 19 nt, Artificial Sequence
  Description of Artificial Sequence: Synthetic oligonucleotide
  Antisense strand to SEQ ID NO: 582755
aacuucagacaauucaugu

SEQ ID NO: 582757 - RNA, 19 nt, Artificial Sequence
  Description of Artificial Sequence: Synthetic oligonucleotide
  Sense strand starting at position 299 of SEQ ID NO: 318701
auguauuuaugggaaagag

SEQ ID NO: 582758 - RNA, 19 nt, Artificial Sequence
  Description of Artificial Sequence: Synthetic oligonucleotide
  Antisense strand to SEQ ID NO: 582757
cucuuucccauaaauacau

SEQ ID NO: 582759 - RNA, 19 nt, Artificial Sequence
  Description of Artificial Sequence: Synthetic oligonucleotide
  Sense strand starting at position 392 of SEQ ID NO: 318701
uccuuuauuugacaggaag

SEQ ID NO: 582760 - RNA, 19 nt, Artificial Sequence
  Description of Artificial Sequence: Synthetic oligonucleotide
  Antisense strand to SEQ ID NO: 582759
cuuccugucaaauaaagga

SEQ ID NO: 582761 - RNA, 19 nt, Artificial Sequence
  Description of Artificial Sequence: Synthetic oligonucleotide
  Sense strand starting at position 409 of SEQ ID NO: 318701
agcugauaagauuaucucu

SEQ ID NO: 582762 - RNA, 19 nt, Artificial Sequence
  Description of Artificial Sequence: Synthetic oligonucleotide
  Antisense strand to SEQ ID NO: 582761
agagauaaucuuaucagcu

SEQ ID NO: 582763 - RNA, 19 nt, Artificial Sequence
  Description of Artificial Sequence: Synthetic oligonucleotide
  Sense strand starting at position 414 of SEQ ID NO: 318701
auaagauuaucucuagggu

SEQ ID NO: 582764 - RNA, 19 nt, Artificial Sequence
  Description of Artificial Sequence: Synthetic oligonucleotide
  Antisense strand to SEQ ID NO: 582763
acccuagagauaaucuuau

SEQ ID NO: 582765 - RNA, 19 nt, Artificial Sequence
  Description of Artificial Sequence: Synthetic oligonucleotide
  Sense strand starting at position 675 of SEQ ID NO: 318701
auucguaauaaggagcuua

SEQ ID NO: 582766 - RNA, 19 nt, Artificial Sequence
  Description of Artificial Sequence: Synthetic oligonucleotide
  Antisense strand to SEQ ID NO: 582765
uaagcuccuuauuacgaau

SEQ ID NO: 582767 - RNA, 19 nt, Artificial Sequence
  Description of Artificial Sequence: Synthetic oligonucleotide
  Sense strand starting at position 912 of SEQ ID NO: 318701
accugaagaguuugcagaa

SEQ ID NO: 582768 - RNA, 19 nt, Artificial Sequence
  Description of Artificial Sequence: Synthetic oligonucleotide
  Antisense strand to SEQ ID NO: 582767
uucugcaaacucuucaggu

SEQ ID NO: 582769 - RNA, 19 nt, Artificial Sequence
  Description of Artificial Sequence: Synthetic oligonucleotide
  Sense strand starting at position 976 of SEQ ID NO: 318701
ugucacauaucucucuaga

SEQ ID NO: 582770 - RNA, 19 nt, Artificial Sequence
  Description of Artificial Sequence: Synthetic oligonucleotide
  Antisense strand to SEQ ID NO: 582769
ucuagagagauaugugaca

SEQ ID NO: 582771 - RNA, 19 nt, Artificial Sequence
  Description of Artificial Sequence: Synthetic oligonucleotide
  Sense strand starting at position 1091 of SEQ ID NO: 318701
ugcaauguagacuaaauua

SEQ ID NO: 582772 - RNA, 19 nt, Artificial Sequence
  Description of Artificial Sequence: Synthetic oligonucleotide
  Antisense strand to SEQ ID NO: 582771
uaauuuagucuacauugca

SEQ ID NO: 582773 - RNA, 19 nt, Artificial Sequence
  Description of Artificial Sequence: Synthetic oligonucleotide
  Sense strand starting at position 1689 of SEQ ID NO: 318701
agggcaagggcuugaauga

SEQ ID NO: 582774 - RNA, 19 nt, Artificial Sequence
  Description of Artificial Sequence: Synthetic oligonucleotide
  Antisense strand to SEQ ID NO: 582773
ucauucaagcccuugcccu

SEQ ID NO: 582775 - RNA, 19 nt, Artificial Sequence
  Description of Artificial Sequence: Synthetic oligonucleotide
  Sense strand starting at position 2017 of SEQ ID NO: 318701
ggagcuugcgcaguaucua

SEQ ID NO: 582776 - RNA, 19 nt, Artificial Sequence
  Description of Artificial Sequence: Synthetic oligonucleotide
  Antisense strand to SEQ ID NO: 582775
uagauacugcgcaagcucc

SEQ ID NO: 582777 - RNA, 19 nt, Artificial Sequence
  Description of Artificial Sequence: Synthetic oligonucleotide
  Sense strand starting at position 2124 of SEQ ID NO: 318701
ugcugcuuacucguaggua

SEQ ID NO: 582778 - RNA, 19 nt, Artificial Sequence
  Description of Artificial Sequence: Synthetic oligonucleotide
  Antisense strand to SEQ ID NO: 582777
uaccuacgaguaagcagca

SEQ ID NO: 582779 - RNA, 19 nt, Artificial Sequence
  Description of Artificial Sequence: Synthetic oligonucleotide
  Sense strand starting at position 2152 of SEQ ID NO: 318701
guuucucagaccuagguga

SEQ ID NO: 582780 - RNA, 19 nt, Artificial Sequence
  Description of Artificial Sequence: Synthetic oligonucleotide
  Antisense strand to SEQ ID NO: 582779
ucaccuaggucugagaaac

SEQ ID NO: 582781 - RNA, 19 nt, Artificial Sequence
  Description of Artificial Sequence: Synthetic oligonucleotide
  Sense strand starting at position 2324 of SEQ ID NO: 318701
augagaugguuacccuauu

SEQ ID NO: 582782 - RNA, 19 nt, Artificial Sequence
  Description of Artificial Sequence: Synthetic oligonucleotide
  Antisense strand to SEQ ID NO: 582781
aauaggguaaccaucucau

SEQ ID NO: 582783 - RNA, 19 nt, Artificial Sequence
  Description of Artificial Sequence: Synthetic oligonucleotide
  Sense strand starting at position 2407 of SEQ ID NO: 318701
guaaauauaagcuagguga

SEQ ID NO: 582784 - RNA, 19 nt, Artificial Sequence
  Description of Artificial Sequence: Synthetic oligonucleotide
  Antisense strand to SEQ ID NO: 582783
ucaccuagcuuauauuuac

SEQ ID NO: 582785 - RNA, 19 nt, Artificial Sequence
  Description of Artificial Sequence: Synthetic oligonucleotide
  Sense strand starting at position 2409 of SEQ ID NO: 318701
aaauauaagcuaggugaca

SEQ ID NO: 582786 - RNA, 19 nt, Artificial Sequence
  Description of Artificial Sequence: Synthetic oligonucleotide
  Antisense strand to SEQ ID NO: 582785
ugucaccuagcuuauauuu

SEQ ID NO: 582787 - RNA, 19 nt, Artificial Sequence
  Description of Artificial Sequence: Synthetic oligonucleotide
  Sense strand starting at position 2410 of SEQ ID NO: 318701
aauauaagcuaggugacau

SEQ ID NO: 582788 - RNA, 19 nt, Artificial Sequence
  Description of Artificial Sequence: Synthetic oligonucleotide
  Antisense strand to SEQ ID NO: 582787
augucaccuagcuuauauu

SEQ ID NO: 582789 - RNA, 19 nt, Artificial Sequence
  Description of Artificial Sequence: Synthetic oligonucleotide
  Sense strand starting at position 2556 of SEQ ID NO: 318701
cuguaaagccacuauaaga

SEQ ID NO: 582790 - RNA, 19 nt, Artificial Sequence
  Description of Artificial Sequence: Synthetic oligonucleotide
  Antisense strand to SEQ ID NO: 582789
ucuuauaguggcuuuacag

SEQ ID NO: 582791 - RNA, 19 nt, Artificial Sequence
  Description of Artificial Sequence: Synthetic oligonucleotide
  Sense strand starting at position 2563 of SEQ ID NO: 318701
gccacuauaagaggguuau

SEQ ID NO: 582792 - RNA, 19 nt, Artificial Sequence
  Description of Artificial Sequence: Synthetic oligonucleotide
  Antisense strand to SEQ ID NO: 582791
auaacccucuuauaguggc

SEQ ID NO: 582793 - RNA, 19 nt, Artificial Sequence
  Description of Artificial Sequence: Synthetic oligonucleotide
  Sense strand starting at position 2564 of SEQ ID NO: 318701
ccacuauaagaggguuauc

SEQ ID NO: 582794 - RNA, 19 nt, Artificial Sequence
  Description of Artificial Sequence: Synthetic oligonucleotide
  Antisense strand to SEQ ID NO: 582793
gauaacccucuuauagugg

SEQ ID NO: 582795 - RNA, 19 nt, Artificial Sequence
  Description of Artificial Sequence: Synthetic oligonucleotide
  Sense strand starting at position 2677 of SEQ ID NO: 318701
gagaacaaugugugcaaga

SEQ ID NO: 582796 - RNA, 19 nt, Artificial Sequence
  Description of Artificial Sequence: Synthetic oligonucleotide
  Antisense strand to SEQ ID NO: 582795
ucuugcacacauuguucuc

SEQ ID NO: 582797 - RNA, 19 nt, Artificial Sequence
  Description of Artificial Sequence: Synthetic oligonucleotide
  Sense strand starting at position 2678 of SEQ ID NO: 318701
agaacaaugugugcaagau

SEQ ID NO: 582798 - RNA, 19 nt, Artificial Sequence
  Description of Artificial Sequence: Synthetic oligonucleotide
  Antisense strand to SEQ ID NO: 582797
aucuugcacacauuguucu

SEQ ID NO: 582799 - RNA, 19 nt, Artificial Sequence
  Description of Artificial Sequence: Synthetic oligonucleotide
  Sense strand starting at position 2679 of SEQ ID NO: 318701
gaacaaugugugcaagauc

SEQ ID NO: 582800 - RNA, 19 nt, Artificial Sequence
  Description of Artificial Sequence: Synthetic oligonucleotide
  Antisense strand to SEQ ID NO: 582799
gaucuugcacacauuguuc

SEQ ID NO: 582801 - RNA, 19 nt, Artificial Sequence
  Description of Artificial Sequence: Synthetic oligonucleotide
  Sense strand starting at position 2700 of SEQ ID NO: 318701
ggaagcauggucugaggaa

SEQ ID NO: 582802 - RNA, 19 nt, Artificial Sequence
  Description of Artificial Sequence: Synthetic oligonucleotide
  Antisense strand to SEQ ID NO: 582801
uuccucagaccaugcuucc

SEQ ID NO: 582803 - RNA, 19 nt, Artificial Sequence
  Description of Artificial Sequence: Synthetic oligonucleotide
  Sense strand starting at position 3025 of SEQ ID NO: 318701
ggaguugaggcuggaauaa

SEQ ID NO: 582804 - RNA, 19 nt, Artificial Sequence
  Description of Artificial Sequence: Synthetic oligonucleotide
  Antisense strand to SEQ ID NO: 582803
uuauuccagccucaacucc

SEQ ID NO: 582805 - RNA, 19 nt, Artificial Sequence
  Description of Artificial Sequence: Synthetic oligonucleotide
  Sense strand starting at position 3057 of SEQ ID NO: 318701
ggaaauauccugugggauu

SEQ ID NO: 582806 - RNA, 19 nt, Artificial Sequence
  Description of Artificial Sequence: Synthetic oligonucleotide
  Antisense strand to SEQ ID NO: 582805
aaucccacaggauauuucc

SEQ ID NO: 582807 - RNA, 19 nt, Artificial Sequence
  Description of Artificial Sequence: Synthetic oligonucleotide
  Sense strand starting at position 3069 of SEQ ID NO: 318701
ugggauuuguguguugguu

SEQ ID NO: 582808 - RNA, 19 nt, Artificial Sequence
  Description of Artificial Sequence: Synthetic oligonucleotide
  Antisense strand to SEQ ID NO: 582807
aaccaacacacaaauccca

SEQ ID NO: 582809 - RNA, 19 nt, Artificial Sequence
  Description of Artificial Sequence: Synthetic oligonucleotide
  Sense strand starting at position 3073 of SEQ ID NO: 318701
auuuguguguugguucuaa

SEQ ID NO: 582810 - RNA, 19 nt, Artificial Sequence
  Description of Artificial Sequence: Synthetic oligonucleotide
  Antisense strand to SEQ ID NO: 582809
uuagaaccaacacacaaau

SEQ ID NO: 582811 - RNA, 19 nt, Artificial Sequence
  Description of Artificial Sequence: Synthetic oligonucleotide
  Sense strand starting at position 3104 of SEQ ID NO: 318701
uugugaacugaugagugau

SEQ ID NO: 582812 - RNA, 19 nt, Artificial Sequence
  Description of Artificial Sequence: Synthetic oligonucleotide
  Antisense strand to SEQ ID NO: 582811
aucacucaucaguucacaa

SEQ ID NO: 582813 - RNA, 19 nt, Artificial Sequence
  Description of Artificial Sequence: Synthetic oligonucleotide
  Sense strand starting at position 3107 of SEQ ID NO: 318701
ugaacugaugagugauguu

SEQ ID NO: 582814 - RNA, 19 nt, Artificial Sequence
  Description of Artificial Sequence: Synthetic oligonucleotide
  Antisense strand to SEQ ID NO: 582813
aacaucacucaucaguuca

SEQ ID NO: 582815 - RNA, 19 nt, Artificial Sequence
  Description of Artificial Sequence: Synthetic oligonucleotide
  Sense strand starting at position 3218 of SEQ ID NO: 318701
agaugcuauuaacuaauga

SEQ ID NO: 582816 - RNA, 19 nt, Artificial Sequence
  Description of Artificial Sequence: Synthetic oligonucleotide
  Antisense strand to SEQ ID NO: 582815
ucauuaguuaauagcaucu

SEQ ID NO: 582817 - RNA, 19 nt, Artificial Sequence
  Description of Artificial Sequence: Synthetic oligonucleotide
  Sense strand starting at position 3488 of SEQ ID NO: 318701
cuaggauuguacucuagag

SEQ ID NO: 582818 - RNA, 19 nt, Artificial Sequence
  Description of Artificial Sequence: Synthetic oligonucleotide
  Antisense strand to SEQ ID NO: 582817
cucuagaguacaauccuag

SEQ ID NO: 582819 - RNA, 19 nt, Artificial Sequence
  Description of Artificial Sequence: Synthetic oligonucleotide
  Sense strand starting at position 3596 of SEQ ID NO: 318701
ugagauaaaugugacauuu

SEQ ID NO: 582820 - RNA, 19 nt, Artificial Sequence
  Description of Artificial Sequence: Synthetic oligonucleotide
  Antisense strand to SEQ ID NO: 582819
aaaugucacauuuaucuca

SEQ ID NO: 582821 - RNA, 19 nt, Artificial Sequence
  Description of Artificial Sequence: Synthetic oligonucleotide
  Sense strand starting at position 3676 of SEQ ID NO: 318701
agacauuugucauugcuuu

SEQ ID NO: 582822 - RNA, 19 nt, Artificial Sequence
  Description of Artificial Sequence: Synthetic oligonucleotide
  Antisense strand to SEQ ID NO: 582821
aaagcaaugacaaaugucu

SEQ ID NO: 582823 - RNA, 19 nt, Artificial Sequence
  Description of Artificial Sequence: Synthetic oligonucleotide
  Sense strand starting at position 3677 of SEQ ID NO: 318701
gacauuugucauugcuuug

SEQ ID NO: 582824 - RNA, 19 nt, Artificial Sequence
  Description of Artificial Sequence: Synthetic oligonucleotide
  Antisense strand to SEQ ID NO: 582823
caaagcaaugacaaauguc

SEQ ID NO: 582825 - RNA, 19 nt, Artificial Sequence
  Description of Artificial Sequence: Synthetic oligonucleotide
  Sense strand starting at position 3681 of SEQ ID NO: 318701
uuugucauugcuuugugua

SEQ ID NO: 582826 - RNA, 19 nt, Artificial Sequence
  Description of Artificial Sequence: Synthetic oligonucleotide
  Antisense strand to SEQ ID NO: 582825
uacacaaagcaaugacaaa

SEQ ID NO: 582827 - RNA, 19 nt, Artificial Sequence
  Description of Artificial Sequence: Synthetic oligonucleotide
  Sense strand starting at position 3869 of SEQ ID NO: 318701
agcauuuauugguuuaggu

SEQ ID NO: 582828 - RNA, 19 nt, Artificial Sequence
  Description of Artificial Sequence: Synthetic oligonucleotide
  Antisense strand to SEQ ID NO: 582827
accuaaaccaauaaaugcu

SEQ ID NO: 582829 - RNA, 19 nt, Artificial Sequence
  Description of Artificial Sequence: Synthetic oligonucleotide
  Sense strand starting at position 3884 of SEQ ID NO: 318701
agguaucaucugcacaacu

SEQ ID NO: 582830 - RNA, 19 nt, Artificial Sequence
  Description of Artificial Sequence: Synthetic oligonucleotide
  Antisense strand to SEQ ID NO: 582829
aguugugcagaugauaccu

SEQ ID NO: 582831 - RNA, 19 nt, Artificial Sequence
  Description of Artificial Sequence: Synthetic oligonucleotide
  Sense strand starting at position 173 of SEQ ID NO: 318702
aguugaauuugguacagac

SEQ ID NO: 582832 - RNA, 19 nt, Artificial Sequence
  Description of Artificial Sequence: Synthetic oligonucleotide
  Antisense strand to SEQ ID NO: 582831
gucuguaccaaauucaacu

SEQ ID NO: 582833 - RNA, 19 nt, Artificial Sequence
  Description of Artificial Sequence: Synthetic oligonucleotide
  Sense strand starting at position 712 of SEQ ID NO: 318702
ccucuuacuuguucuggaa

SEQ ID NO: 582834 - RNA, 19 nt, Artificial Sequence
  Description of Artificial Sequence: Synthetic oligonucleotide
  Antisense strand to SEQ ID NO: 582833
uuccagaacaaguaagagg

SEQ ID NO: 582835 - RNA, 19 nt, Artificial Sequence
  Description of Artificial Sequence: Synthetic oligonucleotide
  Sense strand starting at position 738 of SEQ ID NO: 318702
uugguauaaugacugaaca

SEQ ID NO: 582836 - RNA, 19 nt, Artificial Sequence
  Description of Artificial Sequence: Synthetic oligonucleotide
  Antisense strand to SEQ ID NO: 582835
uguucagucauuauaccaa

SEQ ID NO: 582837 - RNA, 19 nt, Artificial Sequence
  Description of Artificial Sequence: Synthetic oligonucleotide
  Sense strand starting at position 739 of SEQ ID NO: 318702
ugguauaaugacugaacau

SEQ ID NO: 582838 - RNA, 19 nt, Artificial Sequence
  Description of Artificial Sequence: Synthetic oligonucleotide
  Antisense strand to SEQ ID NO: 582837
auguucagucauuauacca

SEQ ID NO: 582839 - RNA, 19 nt, Artificial Sequence
  Description of Artificial Sequence: Synthetic oligonucleotide
  Sense strand starting at position 769 of SEQ ID NO: 318702
ucccuacuuguuuaguuaa

SEQ ID NO: 582840 - RNA, 19 nt, Artificial Sequence
  Description of Artificial Sequence: Synthetic oligonucleotide
  Antisense strand to SEQ ID NO: 582839
uuaacuaaacaaguaggga

SEQ ID NO: 582841 - RNA, 19 nt, Artificial Sequence
  Description of Artificial Sequence: Synthetic oligonucleotide
  Sense strand starting at position 771 of SEQ ID NO: 318702
ccuacuuguuuaguuaaca

SEQ ID NO: 582842 - RNA, 19 nt, Artificial Sequence
  Description of Artificial Sequence: Synthetic oligonucleotide
  Antisense strand to SEQ ID NO: 582841
uguuaacuaaacaaguagg

SEQ ID NO: 582843 - RNA, 19 nt, Artificial Sequence
  Description of Artificial Sequence: Synthetic oligonucleotide
  Sense strand starting at position 772 of SEQ ID NO: 318702
cuacuuguuuaguuaacaa

SEQ ID NO: 582844 - RNA, 19 nt, Artificial Sequence
  Description of Artificial Sequence: Synthetic oligonucleotide
  Antisense strand to SEQ ID NO: 582843
uuguuaacuaaacaaguag

SEQ ID NO: 582845 - RNA, 19 nt, Artificial Sequence
  Description of Artificial Sequence: Synthetic oligonucleotide
  Sense strand starting at position 903 of SEQ ID NO: 318702
agggauuuguuauauauug

SEQ ID NO: 582846 - RNA, 19 nt, Artificial Sequence
  Description of Artificial Sequence: Synthetic oligonucleotide
  Antisense strand to SEQ ID NO: 582845
caauauauaacaaaucccu

SEQ ID NO: 582847 - RNA, 19 nt, Artificial Sequence
  Description of Artificial Sequence: Synthetic oligonucleotide
  Sense strand starting at position 912 of SEQ ID NO: 318702
uuauauauugcugaggcuu

SEQ ID NO: 582848 - RNA, 19 nt, Artificial Sequence
  Description of Artificial Sequence: Synthetic oligonucleotide
  Antisense strand to SEQ ID NO: 582847
aagccucagcaauauauaa

SEQ ID NO: 582849 - RNA, 19 nt, Artificial Sequence
  Description of Artificial Sequence: Synthetic oligonucleotide
  Sense strand starting at position 951 of SEQ ID NO: 318702
uuagaaucucucugucuag

SEQ ID NO: 582850 - RNA, 19 nt, Artificial Sequence
  Description of Artificial Sequence: Synthetic oligonucleotide
  Antisense strand to SEQ ID NO: 582849
cuagacagagagauucuaa

SEQ ID NO: 582851 - RNA, 19 nt, Artificial Sequence
  Description of Artificial Sequence: Synthetic oligonucleotide
  Sense strand starting at position 1079 of SEQ ID NO: 318702
cugguucugcauuauauga

SEQ ID NO: 582852 - RNA, 19 nt, Artificial Sequence
  Description of Artificial Sequence: Synthetic oligonucleotide
  Antisense strand to SEQ ID NO: 582851
ucauauaaugcagaaccag

SEQ ID NO: 582853 - RNA, 19 nt, Artificial Sequence
  Description of Artificial Sequence: Synthetic oligonucleotide
  Sense strand starting at position 1086 of SEQ ID NO: 318702
ugcauuauaugacccaaga

SEQ ID NO: 582854 - RNA, 19 nt, Artificial Sequence
  Description of Artificial Sequence: Synthetic oligonucleotide
  Antisense strand to SEQ ID NO: 582853
ucuugggucauauaaugca

SEQ ID NO: 582855 - RNA, 19 nt, Artificial Sequence
  Description of Artificial Sequence: Synthetic oligonucleotide
  Sense strand starting at position 1100 of SEQ ID NO: 318702
caagacaaguggcuaucua

SEQ ID NO: 582856 - RNA, 19 nt, Artificial Sequence
  Description of Artificial Sequence: Synthetic oligonucleotide
  Antisense strand to SEQ ID NO: 582855
uagauagccacuugucuug

SEQ ID NO: 582857 - RNA, 19 nt, Artificial Sequence
  Description of Artificial Sequence: Synthetic oligonucleotide
  Sense strand starting at position 1120 of SEQ ID NO: 318702
ccucaagagguguggaaga

SEQ ID NO: 582858 - RNA, 19 nt, Artificial Sequence
  Description of Artificial Sequence: Synthetic oligonucleotide
  Antisense strand to SEQ ID NO: 582857
ucuuccacaccucuugagg

SEQ ID NO: 582859 - RNA, 19 nt, Artificial Sequence
  Description of Artificial Sequence: Synthetic oligonucleotide
  Sense strand starting at position 1138 of SEQ ID NO: 318702
augcuucgugugccaaaca

SEQ ID NO: 582860 - RNA, 19 nt, Artificial Sequence
  Description of Artificial Sequence: Synthetic oligonucleotide
  Antisense strand to SEQ ID NO: 582859
uguuuggcacacgaagcau

SEQ ID NO: 582861 - RNA, 19 nt, Artificial Sequence
  Description of Artificial Sequence: Synthetic oligonucleotide
  Sense strand starting at position 1196 of SEQ ID NO: 318702
aacguauugcuggugcauu

SEQ ID NO: 582862 - RNA, 19 nt, Artificial Sequence
  Description of Artificial Sequence: Synthetic oligonucleotide
  Antisense strand to SEQ ID NO: 582861
aaugcaccagcaauacguu

SEQ ID NO: 582863 - RNA, 19 nt, Artificial Sequence
  Description of Artificial Sequence: Synthetic oligonucleotide
  Sense strand starting at position 1242 of SEQ ID NO: 318702
cuucuacaucuguagcuua

SEQ ID NO: 582864 - RNA, 19 nt, Artificial Sequence
  Description of Artificial Sequence: Synthetic oligonucleotide
  Antisense strand to SEQ ID NO: 582863
uaagcuacagauguagaag

SEQ ID NO: 582865 - RNA, 19 nt, Artificial Sequence
  Description of Artificial Sequence: Synthetic oligonucleotide
  Sense strand starting at position 1400 of SEQ ID NO: 318702
cccauugauccgcagagca

SEQ ID NO: 582866 - RNA, 19 nt, Artificial Sequence
  Description of Artificial Sequence: Synthetic oligonucleotide
  Antisense strand to SEQ ID NO: 582865
ugcucugcggaucaauggg

SEQ ID NO: 582867 - RNA, 19 nt, Artificial Sequence
  Description of Artificial Sequence: Synthetic oligonucleotide
  Sense strand starting at position 2233 of SEQ ID NO: 318702
uucgauguacauuggagaa

SEQ ID NO: 582868 - RNA, 19 nt, Artificial Sequence
  Description of Artificial Sequence: Synthetic oligonucleotide
  Antisense strand to SEQ ID NO: 582867
uucuccaauguacaucgaa

SEQ ID NO: 582869 - RNA, 19 nt, Artificial Sequence
  Description of Artificial Sequence: Synthetic oligonucleotide
  Sense strand starting at position 2610 of SEQ ID NO: 318702
aauaaagaggacuguguau

SEQ ID NO: 582870 - RNA, 19 nt, Artificial Sequence
  Description of Artificial Sequence: Synthetic oligonucleotide
  Antisense strand to SEQ ID NO: 582869
auacacaguccucuuuauu

SEQ ID NO: 582871 - RNA, 19 nt, Artificial Sequence
  Description of Artificial Sequence: Synthetic oligonucleotide
  Sense strand starting at position 2612 of SEQ ID NO: 318702
uaaagaggacuguguauca

SEQ ID NO: 582872 - RNA, 19 nt, Artificial Sequence
  Description of Artificial Sequence: Synthetic oligonucleotide
  Antisense strand to SEQ ID NO: 582871
ugauacacaguccucuuua

SEQ ID NO: 582873 - RNA, 19 nt, Artificial Sequence
  Description of Artificial Sequence: Synthetic oligonucleotide
  Sense strand starting at position 2657 of SEQ ID NO: 318702
gauagaauuccaggugucu

SEQ ID NO: 582874 - RNA, 19 nt, Artificial Sequence
  Description of Artificial Sequence: Synthetic oligonucleotide
  Antisense strand to SEQ ID NO: 582873
agacaccuggaauucuauc

SEQ ID NO: 582875 - RNA, 19 nt, Artificial Sequence
  Description of Artificial Sequence: Synthetic oligonucleotide
  Sense strand starting at position 2679 of SEQ ID NO: 318702
gaggguauauguguauucu

SEQ ID NO: 582876 - RNA, 19 nt, Artificial Sequence
  Description of Artificial Sequence: Synthetic oligonucleotide
  Antisense strand to SEQ ID NO: 582875
agaauacacauauacccuc

SEQ ID NO: 582877 - RNA, 19 nt, Artificial Sequence
  Description of Artificial Sequence: Synthetic oligonucleotide
  Sense strand starting at position 2720 of SEQ ID NO: 318702
aauauuuggugacaagaag

SEQ ID NO: 582878 - RNA, 19 nt, Artificial Sequence
  Description of Artificial Sequence: Synthetic oligonucleotide
  Antisense strand to SEQ ID NO: 582877
cuucuugucaccaaauauu

SEQ ID NO: 582879 - RNA, 19 nt, Artificial Sequence
  Description of Artificial Sequence: Synthetic oligonucleotide
  Sense strand starting at position 2845 of SEQ ID NO: 318702
cuuccaggauuggucuaua

SEQ ID NO: 582880 - RNA, 19 nt, Artificial Sequence
  Description of Artificial Sequence: Synthetic oligonucleotide
  Antisense strand to SEQ ID NO: 582879
uauagaccaauccuggaag

SEQ ID NO: 582881 - RNA, 19 nt, Artificial Sequence
  Description of Artificial Sequence: Synthetic oligonucleotide
  Sense strand starting at position 2961 of SEQ ID NO: 318702
ccugaacgagugugauaga

SEQ ID NO: 582882 - RNA, 19 nt, Artificial Sequence
  Description of Artificial Sequence: Synthetic oligonucleotide
  Antisense strand to SEQ ID NO: 582881
ucuaucacacucguucagg

SEQ ID NO: 582883 - RNA, 19 nt, Artificial Sequence
  Description of Artificial Sequence: Synthetic oligonucleotide
  Sense strand starting at position 2974 of SEQ ID NO: 318702
gauagaguguccucaccaa

SEQ ID NO: 582884 - RNA, 19 nt, Artificial Sequence
  Description of Artificial Sequence: Synthetic oligonucleotide
  Antisense strand to SEQ ID NO: 582883
uuggugaggacacucuauc

SEQ ID NO: 582885 - RNA, 19 nt, Artificial Sequence
  Description of Artificial Sequence: Synthetic oligonucleotide
  Sense strand starting at position 3103 of SEQ ID NO: 318702
agguauggccuuugaugaa

SEQ ID NO: 582886 - RNA, 19 nt, Artificial Sequence
  Description of Artificial Sequence: Synthetic oligonucleotide
  Antisense strand to SEQ ID NO: 582885
uucaucaaaggccauaccu

SEQ ID NO: 582887 - RNA, 19 nt, Artificial Sequence
  Description of Artificial Sequence: Synthetic oligonucleotide
  Sense strand starting at position 3383 of SEQ ID NO: 318702
uggaaagucuagucuuaga

SEQ ID NO: 582888 - RNA, 19 nt, Artificial Sequence
  Description of Artificial Sequence: Synthetic oligonucleotide
  Antisense strand to SEQ ID NO: 582887
ucuaagacuagacuuucca

SEQ ID NO: 582889 - RNA, 19 nt, Artificial Sequence
  Description of Artificial Sequence: Synthetic oligonucleotide
  Sense strand starting at position 3513 of SEQ ID NO: 318702
ugaauauugcuguaagcca

SEQ ID NO: 582890 - RNA, 19 nt, Artificial Sequence
  Description of Artificial Sequence: Synthetic oligonucleotide
  Antisense strand to SEQ ID NO: 582889
uggcuuacagcaauauuca

SEQ ID NO: 582891 - RNA, 19 nt, Artificial Sequence
  Description of Artificial Sequence: Synthetic oligonucleotide
  Sense strand starting at position 3546 of SEQ ID NO: 318702
ggguuucuuacacagcagu

SEQ ID NO: 582892 - RNA, 19 nt, Artificial Sequence
  Description of Artificial Sequence: Synthetic oligonucleotide
  Antisense strand to SEQ ID NO: 582891
acugcuguguaagaaaccc

SEQ ID NO: 582893 - RNA, 19 nt, Artificial Sequence
  Description of Artificial Sequence: Synthetic oligonucleotide
  Sense strand starting at position 3619 of SEQ ID NO: 318702
aaggcugaucuugggcaua

SEQ ID NO: 582894 - RNA, 19 nt, Artificial Sequence
  Description of Artificial Sequence: Synthetic oligonucleotide
  Antisense strand to SEQ ID NO: 582893
uaugcccaagaucagccuu

SEQ ID NO: 582895 - RNA, 19 nt, Artificial Sequence
  Description of Artificial Sequence: Synthetic oligonucleotide
  Sense strand starting at position 3621 of SEQ ID NO: 318702
ggcugaucuugggcauaag

SEQ ID NO: 582896 - RNA, 19 nt, Artificial Sequence
  Description of Artificial Sequence: Synthetic oligonucleotide
  Antisense strand to SEQ ID NO: 582895
cuuaugcccaagaucagcc

SEQ ID NO: 582897 - RNA, 19 nt, Artificial Sequence
  Description of Artificial Sequence: Synthetic oligonucleotide
  Sense strand starting at position 3622 of SEQ ID NO: 318702
gcugaucuugggcauaagu

SEQ ID NO: 582898 - RNA, 19 nt, Artificial Sequence
  Description of Artificial Sequence: Synthetic oligonucleotide
  Antisense strand to SEQ ID NO: 582897
acuuaugcccaagaucagc

SEQ ID NO: 582899 - RNA, 19 nt, Artificial Sequence
  Description of Artificial Sequence: Synthetic oligonucleotide
  Sense strand starting at position 3624 of SEQ ID NO: 318702
ugaucuugggcauaaguga

SEQ ID NO: 582900 - RNA, 19 nt, Artificial Sequence
  Description of Artificial Sequence: Synthetic oligonucleotide
  Antisense strand to SEQ ID NO: 582899
ucacuuaugcccaagauca

SEQ ID NO: 582901 - RNA, 19 nt, Artificial Sequence
  Description of Artificial Sequence: Synthetic oligonucleotide
  Sense strand starting at position 3635 of SEQ ID NO: 318702
auaagugacuaggcugaaa

SEQ ID NO: 582902 - RNA, 19 nt, Artificial Sequence
  Description of Artificial Sequence: Synthetic oligonucleotide
  Antisense strand to SEQ ID NO: 582901
uuucagccuagucacuuau

SEQ ID NO: 582903 - RNA, 19 nt, Artificial Sequence
  Description of Artificial Sequence: Synthetic oligonucleotide
  Sense strand starting at position 3637 of SEQ ID NO: 318702
aagugacuaggcugaaaga

SEQ ID NO: 582904 - RNA, 19 nt, Artificial Sequence
  Description of Artificial Sequence: Synthetic oligonucleotide
  Antisense strand to SEQ ID NO: 582903
ucuuucagccuagucacuu

SEQ ID NO: 582905 - RNA, 19 nt, Artificial Sequence
  Description of Artificial Sequence: Synthetic oligonucleotide
  Sense strand starting at position 3715 of SEQ ID NO: 318702
uugauaugccuguaaacaa

SEQ ID NO: 582906 - RNA, 19 nt, Artificial Sequence
  Description of Artificial Sequence: Synthetic oligonucleotide
  Antisense strand to SEQ ID NO: 582905
uuguuuacaggcauaucaa

SEQ ID NO: 582907 - RNA, 19 nt, Artificial Sequence
  Description of Artificial Sequence: Synthetic oligonucleotide
  Sense strand starting at position 3770 of SEQ ID NO: 318702
ggagacugcucucuucuca

SEQ ID NO: 582908 - RNA, 19 nt, Artificial Sequence
  Description of Artificial Sequence: Synthetic oligonucleotide
  Antisense strand to SEQ ID NO: 582907
ugagaagagagcagucucc

SEQ ID NO: 582909 - RNA, 19 nt, Artificial Sequence
  Description of Artificial Sequence: Synthetic oligonucleotide
  Sense strand starting at position 3961 of SEQ ID NO: 318702
gggaaauauugucuuaagu

SEQ ID NO: 582910 - RNA, 19 nt, Artificial Sequence
  Description of Artificial Sequence: Synthetic oligonucleotide
  Antisense strand to SEQ ID NO: 582909
acuuaagacaauauuuccc

SEQ ID NO: 582911 - RNA, 19 nt, Artificial Sequence
  Description of Artificial Sequence: Synthetic oligonucleotide
  Sense strand starting at position 47 of SEQ ID NO: 318703
cuggaugaauaaucuguau

SEQ ID NO: 582912 - RNA, 19 nt, Artificial Sequence
  Description of Artificial Sequence: Synthetic oligonucleotide
  Antisense strand to SEQ ID NO: 582911
auacagauuauucauccag

SEQ ID NO: 582913 - RNA, 19 nt, Artificial Sequence
  Description of Artificial Sequence: Synthetic oligonucleotide
  Sense strand starting at position 60 of SEQ ID NO: 318703
cuguauaaacaugggcaua

SEQ ID NO: 582914 - RNA, 19 nt, Artificial Sequence
  Description of Artificial Sequence: Synthetic oligonucleotide
  Antisense strand to SEQ ID NO: 582913
uaugcccauguuuauacag

SEQ ID NO: 582915 - RNA, 19 nt, Artificial Sequence
  Description of Artificial Sequence: Synthetic oligonucleotide
  Sense strand starting at position 62 of SEQ ID NO: 318703
guauaaacaugggcauaua

SEQ ID NO: 582916 - RNA, 19 nt, Artificial Sequence
  Description of Artificial Sequence: Synthetic oligonucleotide
  Antisense strand to SEQ ID NO: 582915
uauaugcccauguuuauac

SEQ ID NO: 582917 - RNA, 19 nt, Artificial Sequence
  Description of Artificial Sequence: Synthetic oligonucleotide
  Sense strand starting at position 74 of SEQ ID NO: 318703
gcauauacacaagguauga

SEQ ID NO: 582918 - RNA, 19 nt, Artificial Sequence
  Description of Artificial Sequence: Synthetic oligonucleotide
  Antisense strand to SEQ ID NO: 582917
ucauaccuuguguauaugc

SEQ ID NO: 582919 - RNA, 19 nt, Artificial Sequence
  Description of Artificial Sequence: Synthetic oligonucleotide
  Sense strand starting at position 290 of SEQ ID NO: 318703
ccaggcagaguuuaaauca

SEQ ID NO: 582920 - RNA, 19 nt, Artificial Sequence
  Description of Artificial Sequence: Synthetic oligonucleotide
  Antisense strand to SEQ ID NO: 582919
ugauuuaaacucugccugg

SEQ ID NO: 582921 - RNA, 19 nt, Artificial Sequence
  Description of Artificial Sequence: Synthetic oligonucleotide
  Sense strand starting at position 530 of SEQ ID NO: 318703
aguuuacugccauauauua

SEQ ID NO: 582922 - RNA, 19 nt, Artificial Sequence
  Description of Artificial Sequence: Synthetic oligonucleotide
  Antisense strand to SEQ ID NO: 582921
uaauauauggcaguaaacu

SEQ ID NO: 582923 - RNA, 19 nt, Artificial Sequence
  Description of Artificial Sequence: Synthetic oligonucleotide
  Sense strand starting at position 605 of SEQ ID NO: 318703
gaaggcuuagcugaaguua

SEQ ID NO: 582924 - RNA, 19 nt, Artificial Sequence
  Description of Artificial Sequence: Synthetic oligonucleotide
  Antisense strand to SEQ ID NO: 582923
uaacuucagcuaagccuuc

SEQ ID NO: 582925 - RNA, 19 nt, Artificial Sequence
  Description of Artificial Sequence: Synthetic oligonucleotide
  Sense strand starting at position 702 of SEQ ID NO: 318703
agguuauauguggacugua

SEQ ID NO: 582926 - RNA, 19 nt, Artificial Sequence
  Description of Artificial Sequence: Synthetic oligonucleotide
  Antisense strand to SEQ ID NO: 582925
uacaguccacauauaaccu

SEQ ID NO: 582927 - RNA, 19 nt, Artificial Sequence
  Description of Artificial Sequence: Synthetic oligonucleotide
  Sense strand starting at position 755 of SEQ ID NO: 318703
gaaucagaguuguuuccua

SEQ ID NO: 582928 - RNA, 19 nt, Artificial Sequence
  Description of Artificial Sequence: Synthetic oligonucleotide
  Antisense strand to SEQ ID NO: 582927
uaggaaacaacucugauuc

SEQ ID NO: 582929 - RNA, 19 nt, Artificial Sequence
  Description of Artificial Sequence: Synthetic oligonucleotide
  Sense strand starting at position 759 of SEQ ID NO: 318703
cagaguuguuuccuaaaug

SEQ ID NO: 582930 - RNA, 19 nt, Artificial Sequence
  Description of Artificial Sequence: Synthetic oligonucleotide
  Antisense strand to SEQ ID NO: 582929
cauuuaggaaacaacucug

SEQ ID NO: 582931 - RNA, 19 nt, Artificial Sequence
  Description of Artificial Sequence: Synthetic oligonucleotide
  Sense strand starting at position 912 of SEQ ID NO: 318703
gcauuacuuugcuuaauag

SEQ ID NO: 582932 - RNA, 19 nt, Artificial Sequence
  Description of Artificial Sequence: Synthetic oligonucleotide
  Antisense strand to SEQ ID NO: 582931
cuauuaagcaaaguaaugc

SEQ ID NO: 582933 - RNA, 19 nt, Artificial Sequence
  Description of Artificial Sequence: Synthetic oligonucleotide
  Sense strand starting at position 944 of SEQ ID NO: 318703
gauuaagguggugauccau

SEQ ID NO: 582934 - RNA, 19 nt, Artificial Sequence
  Description of Artificial Sequence: Synthetic oligonucleotide
  Antisense strand to SEQ ID NO: 582933
auggaucaccaccuuaauc

SEQ ID NO: 582935 - RNA, 19 nt, Artificial Sequence
  Description of Artificial Sequence: Synthetic oligonucleotide
  Sense strand starting at position 1021 of SEQ ID NO: 318703
uuugaaggccuuugugacu

SEQ ID NO: 582936 - RNA, 19 nt, Artificial Sequence
  Description of Artificial Sequence: Synthetic oligonucleotide
  Antisense strand to SEQ ID NO: 582935
agucacaaaggccuucaaa

SEQ ID NO: 582937 - RNA, 19 nt, Artificial Sequence
  Description of Artificial Sequence: Synthetic oligonucleotide
  Sense strand starting at position 1026 of SEQ ID NO: 318703
aggccuuugugacucaaag

SEQ ID NO: 582938 - RNA, 19 nt, Artificial Sequence
  Description of Artificial Sequence: Synthetic oligonucleotide
  Antisense strand to SEQ ID NO: 582937
cuuugagucacaaaggccu

SEQ ID NO: 582939 - RNA, 19 nt, Artificial Sequence
  Description of Artificial Sequence: Synthetic oligonucleotide
  Sense strand starting at position 1068 of SEQ ID NO: 318703
uugagaauuaccuggcuug

SEQ ID NO: 582940 - RNA, 19 nt, Artificial Sequence
  Description of Artificial Sequence: Synthetic oligonucleotide
  Antisense strand to SEQ ID NO: 582939
caagccagguaauucucaa

SEQ ID NO: 582941 - RNA, 19 nt, Artificial Sequence
  Description of Artificial Sequence: Synthetic oligonucleotide
  Sense strand starting at position 1170 of SEQ ID NO: 318703
ggugucagcauaugaauaa

SEQ ID NO: 582942 - RNA, 19 nt, Artificial Sequence
  Description of Artificial Sequence: Synthetic oligonucleotide
  Antisense strand to SEQ ID NO: 582941
uuauucauaugcugacacc

SEQ ID NO: 582943 - RNA, 19 nt, Artificial Sequence
  Description of Artificial Sequence: Synthetic oligonucleotide
  Sense strand starting at position 1208 of SEQ ID NO: 318703
cccuaauuaggucaaugua

SEQ ID NO: 582944 - RNA, 19 nt, Artificial Sequence
  Description of Artificial Sequence: Synthetic oligonucleotide
  Antisense strand to SEQ ID NO: 582943
uacauugaccuaauuaggg

SEQ ID NO: 582945 - RNA, 19 nt, Artificial Sequence
  Description of Artificial Sequence: Synthetic oligonucleotide
  Sense strand starting at position 1270 of SEQ ID NO: 318703
guagucuuggcucauuaga

SEQ ID NO: 582946 - RNA, 19 nt, Artificial Sequence
  Description of Artificial Sequence: Synthetic oligonucleotide
  Antisense strand to SEQ ID NO: 582945
ucuaaugagccaagacuac

SEQ ID NO: 582947 - RNA, 19 nt, Artificial Sequence
  Description of Artificial Sequence: Synthetic oligonucleotide
  Sense strand starting at position 1272 of SEQ ID NO: 318703
agucuuggcucauuagaaa

SEQ ID NO: 582948 - RNA, 19 nt, Artificial Sequence
  Description of Artificial Sequence: Synthetic oligonucleotide
  Antisense strand to SEQ ID NO: 582947
uuucuaaugagccaagacu

SEQ ID NO: 582949 - RNA, 19 nt, Artificial Sequence
  Description of Artificial Sequence: Synthetic oligonucleotide
  Sense strand starting at position 1285 of SEQ ID NO: 318703
uagaaauucgacuaguggu

SEQ ID NO: 582950 - RNA, 19 nt, Artificial Sequence
  Description of Artificial Sequence: Synthetic oligonucleotide
  Antisense strand to SEQ ID NO: 582949
accacuagucgaauuucua

SEQ ID NO: 582951 - RNA, 19 nt, Artificial Sequence
  Description of Artificial Sequence: Synthetic oligonucleotide
  Sense strand starting at position 1352 of SEQ ID NO: 318703
gggcauuugguucgugcaa

SEQ ID NO: 582952 - RNA, 19 nt, Artificial Sequence
  Description of Artificial Sequence: Synthetic oligonucleotide
  Antisense strand to SEQ ID NO: 582951
uugcacgaaccaaaugccc

SEQ ID NO: 582953 - RNA, 19 nt, Artificial Sequence
  Description of Artificial Sequence: Synthetic oligonucleotide
  Sense strand starting at position 1359 of SEQ ID NO: 318703
ugguucgugcaagaaauca

SEQ ID NO: 582954 - RNA, 19 nt, Artificial Sequence
  Description of Artificial Sequence: Synthetic oligonucleotide
  Antisense strand to SEQ ID NO: 582953
ugauuucuugcacgaacca

SEQ ID NO: 582955 - RNA, 19 nt, Artificial Sequence
  Description of Artificial Sequence: Synthetic oligonucleotide
  Sense strand starting at position 1364 of SEQ ID NO: 318703
cgugcaagaaaucacagaa

SEQ ID NO: 582956 - RNA, 19 nt, Artificial Sequence
  Description of Artificial Sequence: Synthetic oligonucleotide
  Antisense strand to SEQ ID NO: 582955
uucugugauuucuugcacg

SEQ ID NO: 582957 - RNA, 19 nt, Artificial Sequence
  Description of Artificial Sequence: Synthetic oligonucleotide
  Sense strand starting at position 1455 of SEQ ID NO: 318703
gggauucugguguaagcuu

SEQ ID NO: 582958 - RNA, 19 nt, Artificial Sequence
  Description of Artificial Sequence: Synthetic oligonucleotide
  Antisense strand to SEQ ID NO: 582957
aagcuuacaccagaauccc

SEQ ID NO: 582959 - RNA, 19 nt, Artificial Sequence
  Description of Artificial Sequence: Synthetic oligonucleotide
  Sense strand starting at position 1944 of SEQ ID NO: 318703
ucgggaguccgagauggua

SEQ ID NO: 582960 - RNA, 19 nt, Artificial Sequence
  Description of Artificial Sequence: Synthetic oligonucleotide
  Antisense strand to SEQ ID NO: 582959
uaccaucucggacucccga

SEQ ID NO: 582961 - RNA, 19 nt, Artificial Sequence
  Description of Artificial Sequence: Synthetic oligonucleotide
  Sense strand starting at position 2111 of SEQ ID NO: 318703
cucugaaaccgccaaggau

SEQ ID NO: 582962 - RNA, 19 nt, Artificial Sequence
  Description of Artificial Sequence: Synthetic oligonucleotide
  Antisense strand to SEQ ID NO: 582961
auccuuggcgguuucagag

SEQ ID NO: 582963 - RNA, 19 nt, Artificial Sequence
  Description of Artificial Sequence: Synthetic oligonucleotide
  Sense strand starting at position 2133 of SEQ ID NO: 318703
gagcgacagauuuguguug

SEQ ID NO: 582964 - RNA, 19 nt, Artificial Sequence
  Description of Artificial Sequence: Synthetic oligonucleotide
  Antisense strand to SEQ ID NO: 582963
caacacaaaucugucgcuc

SEQ ID NO: 582965 - RNA, 19 nt, Artificial Sequence
  Description of Artificial Sequence: Synthetic oligonucleotide
  Sense strand starting at position 2178 of SEQ ID NO: 318703
cugagugugguugaaaugu

SEQ ID NO: 582966 - RNA, 19 nt, Artificial Sequence
  Description of Artificial Sequence: Synthetic oligonucleotide
  Antisense strand to SEQ ID NO: 582965
acauuucaaccacacucag

SEQ ID NO: 582967 - RNA, 19 nt, Artificial Sequence
  Description of Artificial Sequence: Synthetic oligonucleotide
  Sense strand starting at position 2184 of SEQ ID NO: 318703
gugguugaaauguaacuau

SEQ ID NO: 582968 - RNA, 19 nt, Artificial Sequence
  Description of Artificial Sequence: Synthetic oligonucleotide
  Antisense strand to SEQ ID NO: 582967
auaguuacauuucaaccac

SEQ ID NO: 582969 - RNA, 19 nt, Artificial Sequence
  Description of Artificial Sequence: Synthetic oligonucleotide
  Sense strand starting at position 2187 of SEQ ID NO: 318703
guugaaauguaacuauugu

SEQ ID NO: 582970 - RNA, 19 nt, Artificial Sequence
  Description of Artificial Sequence: Synthetic oligonucleotide
  Antisense strand to SEQ ID NO: 582969
acaauaguuacauuucaac

SEQ ID NO: 582971 - RNA, 19 nt, Artificial Sequence
  Description of Artificial Sequence: Synthetic oligonucleotide
  Sense strand starting at position 2234 of SEQ ID NO: 318703
ccugaauucccgggccuga

SEQ ID NO: 582972 - RNA, 19 nt, Artificial Sequence
  Description of Artificial Sequence: Synthetic oligonucleotide
  Antisense strand to SEQ ID NO: 582971
ucaggcccgggaauucagg

SEQ ID NO: 582973 - RNA, 19 nt, Artificial Sequence
  Description of Artificial Sequence: Synthetic oligonucleotide
  Sense strand starting at position 2484 of SEQ ID NO: 318703
gagcuuuggcaguacucca

SEQ ID NO: 582974 - RNA, 19 nt, Artificial Sequence
  Description of Artificial Sequence: Synthetic oligonucleotide
  Antisense strand to SEQ ID NO: 582973
uggaguacugccaaagcuc

SEQ ID NO: 582975 - RNA, 19 nt, Artificial Sequence
  Description of Artificial Sequence: Synthetic oligonucleotide
  Sense strand starting at position 2593 of SEQ ID NO: 318703
aguccagauauguaguguu

SEQ ID NO: 582976 - RNA, 19 nt, Artificial Sequence
  Description of Artificial Sequence: Synthetic oligonucleotide
  Antisense strand to SEQ ID NO: 582975
aacacuacauaucuggacu

SEQ ID NO: 582977 - RNA, 19 nt, Artificial Sequence
  Description of Artificial Sequence: Synthetic oligonucleotide
  Sense strand starting at position 2611 of SEQ ID NO: 318703
uugcuauuucuaugaugua

SEQ ID NO: 582978 - RNA, 19 nt, Artificial Sequence
  Description of Artificial Sequence: Synthetic oligonucleotide
  Antisense strand to SEQ ID NO: 582977
uacaucauagaaauagcaa

SEQ ID NO: 582979 - RNA, 19 nt, Artificial Sequence
  Description of Artificial Sequence: Synthetic oligonucleotide
  Sense strand starting at position 2681 of SEQ ID NO: 318703
ugccaaguuccuggaaauu

SEQ ID NO: 582980 - RNA, 19 nt, Artificial Sequence
  Description of Artificial Sequence: Synthetic oligonucleotide
  Antisense strand to SEQ ID NO: 582979
aauuuccaggaacuuggca

SEQ ID NO: 582981 - RNA, 19 nt, Artificial Sequence
  Description of Artificial Sequence: Synthetic oligonucleotide
  Sense strand starting at position 2691 of SEQ ID NO: 318703
cuggaaauuuaacaauuag

SEQ ID NO: 582982 - RNA, 19 nt, Artificial Sequence
  Description of Artificial Sequence: Synthetic oligonucleotide
  Antisense strand to SEQ ID NO: 582981
cuaauuguuaaauuuccag

SEQ ID NO: 582983 - RNA, 19 nt, Artificial Sequence
  Description of Artificial Sequence: Synthetic oligonucleotide
  Sense strand starting at position 3676 of SEQ ID NO: 318703
agggaacggccuuauucua

SEQ ID NO: 582984 - RNA, 19 nt, Artificial Sequence
  Description of Artificial Sequence: Synthetic oligonucleotide
  Antisense strand to SEQ ID NO: 582983
uagaauaaggccguucccu

SEQ ID NO: 582985 - RNA, 19 nt, Artificial Sequence
  Description of Artificial Sequence: Synthetic oligonucleotide
  Sense strand starting at position 3684 of SEQ ID NO: 318703
gccuuauucuacccaguag

SEQ ID NO: 582986 - RNA, 19 nt, Artificial Sequence
  Description of Artificial Sequence: Synthetic oligonucleotide
  Antisense strand to SEQ ID NO: 582985
cuacuggguagaauaaggc

SEQ ID NO: 582987 - RNA, 19 nt, Artificial Sequence
  Description of Artificial Sequence: Synthetic oligonucleotide
  Sense strand starting at position 3817 of SEQ ID NO: 318703
ggaagaaacugguugggua

SEQ ID NO: 582988 - RNA, 19 nt, Artificial Sequence
  Description of Artificial Sequence: Synthetic oligonucleotide
  Antisense strand to SEQ ID NO: 582987
uacccaaccaguuucuucc

SEQ ID NO: 582989 - RNA, 19 nt, Artificial Sequence
  Description of Artificial Sequence: Synthetic oligonucleotide
  Sense strand starting at position 3818 of SEQ ID NO: 318703
gaagaaacugguuggguau

SEQ ID NO: 582990 - RNA, 19 nt, Artificial Sequence
  Description of Artificial Sequence: Synthetic oligonucleotide
  Antisense strand to SEQ ID NO: 582989
auacccaaccaguuucuuc

SEQ ID NO: 582991 - RNA, 19 nt, Artificial Sequence
  Description of Artificial Sequence: Synthetic oligonucleotide
  Sense strand starting at position 544 of SEQ ID NO: 318704
uugacuaugucucucaagu

SEQ ID NO: 582992 - RNA, 19 nt, Artificial Sequence
  Description of Artificial Sequence: Synthetic oligonucleotide
  Antisense strand to SEQ ID NO: 582991
acuugagagacauagucaa

SEQ ID NO: 582993 - RNA, 19 nt, Artificial Sequence
  Description of Artificial Sequence: Synthetic oligonucleotide
  Sense strand starting at position 810 of SEQ ID NO: 318704
guuaaacaggcaugauaau

SEQ ID NO: 582994 - RNA, 19 nt, Artificial Sequence
  Description of Artificial Sequence: Synthetic oligonucleotide
  Antisense strand to SEQ ID NO: 582993
auuaucaugccuguuuaac

SEQ ID NO: 582995 - RNA, 19 nt, Artificial Sequence
  Description of Artificial Sequence: Synthetic oligonucleotide
  Sense strand starting at position 856 of SEQ ID NO: 318704
ccucauuuguuagauacag

SEQ ID NO: 582996 - RNA, 19 nt, Artificial Sequence
  Description of Artificial Sequence: Synthetic oligonucleotide
  Antisense strand to SEQ ID NO: 582995
cuguaucuaacaaaugagg

SEQ ID NO: 582997 - RNA, 19 nt, Artificial Sequence
  Description of Artificial Sequence: Synthetic oligonucleotide
  Sense strand starting at position 903 of SEQ ID NO: 318704
cugggauuccuuugaaaua

SEQ ID NO: 582998 - RNA, 19 nt, Artificial Sequence
  Description of Artificial Sequence: Synthetic oligonucleotide
  Antisense strand to SEQ ID NO: 582997
uauuucaaaggaaucccag

SEQ ID NO: 582999 - RNA, 19 nt, Artificial Sequence
  Description of Artificial Sequence: Synthetic oligonucleotide
  Sense strand starting at position 970 of SEQ ID NO: 318704
agaaaugacuggccuuaag

SEQ ID NO: 583000 - RNA, 19 nt, Artificial Sequence
  Description of Artificial Sequence: Synthetic oligonucleotide
  Antisense strand to SEQ ID NO: 582999
cuuaaggccagucauuucu

SEQ ID NO: 583001 - RNA, 19 nt, Artificial Sequence
  Description of Artificial Sequence: Synthetic oligonucleotide
  Sense strand starting at position 995 of SEQ ID NO: 318704
acucuugaagcuggaugau

SEQ ID NO: 583002 - RNA, 19 nt, Artificial Sequence
  Description of Artificial Sequence: Synthetic oligonucleotide
  Antisense strand to SEQ ID NO: 583001
aucauccagcuucaagagu

SEQ ID NO: 583003 - RNA, 19 nt, Artificial Sequence
  Description of Artificial Sequence: Synthetic oligonucleotide
  Sense strand starting at position 1004 of SEQ ID NO: 318704
gcuggaugauggguauaca

SEQ ID NO: 583004 - RNA, 19 nt, Artificial Sequence
  Description of Artificial Sequence: Synthetic oligonucleotide
  Antisense strand to SEQ ID NO: 583003
uguauacccaucauccagc

SEQ ID NO: 583005 - RNA, 19 nt, Artificial Sequence
  Description of Artificial Sequence: Synthetic oligonucleotide
  Sense strand starting at position 1020 of SEQ ID NO: 318704
acaucauuacaccguucua

SEQ ID NO: 583006 - RNA, 19 nt, Artificial Sequence
  Description of Artificial Sequence: Synthetic oligonucleotide
  Antisense strand to SEQ ID NO: 583005
uagaacgguguaaugaugu

SEQ ID NO: 583007 - RNA, 19 nt, Artificial Sequence
  Description of Artificial Sequence: Synthetic oligonucleotide
  Sense strand starting at position 1187 of SEQ ID NO: 318704
caaguuuaugaaggguaga

SEQ ID NO: 583008 - RNA, 19 nt, Artificial Sequence
  Description of Artificial Sequence: Synthetic oligonucleotide
  Antisense strand to SEQ ID NO: 583007
ucuacccuucauaaacuug

SEQ ID NO: 583009 - RNA, 19 nt, Artificial Sequence
  Description of Artificial Sequence: Synthetic oligonucleotide
  Sense strand starting at position 1518 of SEQ ID NO: 318704
ggcuuugucacuuacagga

SEQ ID NO: 583010 - RNA, 19 nt, Artificial Sequence
  Description of Artificial Sequence: Synthetic oligonucleotide
  Antisense strand to SEQ ID NO: 583009
uccuguaagugacaaagcc

SEQ ID NO: 583011 - RNA, 19 nt, Artificial Sequence
  Description of Artificial Sequence: Synthetic oligonucleotide
  Sense strand starting at position 1590 of SEQ ID NO: 318704
caggguuguuaggagauuu

SEQ ID NO: 583012 - RNA, 19 nt, Artificial Sequence
  Description of Artificial Sequence: Synthetic oligonucleotide
  Antisense strand to SEQ ID NO: 583011
aaaucuccuaacaacccug

SEQ ID NO: 583013 - RNA, 19 nt, Artificial Sequence
  Description of Artificial Sequence: Synthetic oligonucleotide
  Sense strand starting at position 1668 of SEQ ID NO: 318704
acuguuaaggacggagauu

SEQ ID NO: 583014 - RNA, 19 nt, Artificial Sequence
  Description of Artificial Sequence: Synthetic oligonucleotide
  Antisense strand to SEQ ID NO: 583013
aaucuccguccuuaacagu

SEQ ID NO: 583015 - RNA, 19 nt, Artificial Sequence
  Description of Artificial Sequence: Synthetic oligonucleotide
  Sense strand starting at position 1943 of SEQ ID NO: 318704
agagaagcauccgcaacaa

SEQ ID NO: 583016 - RNA, 19 nt, Artificial Sequence
  Description of Artificial Sequence: Synthetic oligonucleotide
  Antisense strand to SEQ ID NO: 583015
uuguugcggaugcuucucu

SEQ ID NO: 583017 - RNA, 19 nt, Artificial Sequence
  Description of Artificial Sequence: Synthetic oligonucleotide
  Sense strand starting at position 2103 of SEQ ID NO: 318704
gcgcuagcccuucccaauu

SEQ ID NO: 583018 - RNA, 19 nt, Artificial Sequence
  Description of Artificial Sequence: Synthetic oligonucleotide
  Antisense strand to SEQ ID NO: 583017
aauugggaagggcuagcgc

SEQ ID NO: 583019 - RNA, 19 nt, Artificial Sequence
  Description of Artificial Sequence: Synthetic oligonucleotide
  Sense strand starting at position 2144 of SEQ ID NO: 318704
ggaacaagaaaucguuugu

SEQ ID NO: 583020 - RNA, 19 nt, Artificial Sequence
  Description of Artificial Sequence: Synthetic oligonucleotide
  Antisense strand to SEQ ID NO: 583019
acaaacgauuucuuguucc

SEQ ID NO: 583021 - RNA, 19 nt, Artificial Sequence
  Description of Artificial Sequence: Synthetic oligonucleotide
  Sense strand starting at position 2166 of SEQ ID NO: 318704
uugugucugccagagagga

SEQ ID NO: 583022 - RNA, 19 nt, Artificial Sequence
  Description of Artificial Sequence: Synthetic oligonucleotide
  Antisense strand to SEQ ID NO: 583021
uccucucuggcagacacaa

SEQ ID NO: 583023 - RNA, 19 nt, Artificial Sequence
  Description of Artificial Sequence: Synthetic oligonucleotide
  Sense strand starting at position 2215 of SEQ ID NO: 318704
cuguaaacuccacauaguu

SEQ ID NO: 583024 - RNA, 19 nt, Artificial Sequence
  Description of Artificial Sequence: Synthetic oligonucleotide
  Antisense strand to SEQ ID NO: 583023
aacuauguggaguuuacag

SEQ ID NO: 583025 - RNA, 19 nt, Artificial Sequence
  Description of Artificial Sequence: Synthetic oligonucleotide
  Sense strand starting at position 2274 of SEQ ID NO: 318704
gggcuuugagcuuggagau

SEQ ID NO: 583026 - RNA, 19 nt, Artificial Sequence
  Description of Artificial Sequence: Synthetic oligonucleotide
  Antisense strand to SEQ ID NO: 583025
aucuccaagcucaaagccc

SEQ ID NO: 583027 - RNA, 19 nt, Artificial Sequence
  Description of Artificial Sequence: Synthetic oligonucleotide
  Sense strand starting at position 2275 of SEQ ID NO: 318704
ggcuuugagcuuggagaua

SEQ ID NO: 583028 - RNA, 19 nt, Artificial Sequence
  Description of Artificial Sequence: Synthetic oligonucleotide
  Antisense strand to SEQ ID NO: 583027
uaucuccaagcucaaagcc

SEQ ID NO: 583029 - RNA, 19 nt, Artificial Sequence
  Description of Artificial Sequence: Synthetic oligonucleotide
  Sense strand starting at position 2344 of SEQ ID NO: 318704
gaaggaagcucauuguaau

SEQ ID NO: 583030 - RNA, 19 nt, Artificial Sequence
  Description of Artificial Sequence: Synthetic oligonucleotide
  Antisense strand to SEQ ID NO: 583029
auuacaaugagcuuccuuc

SEQ ID NO: 583031 - RNA, 19 nt, Artificial Sequence
  Description of Artificial Sequence: Synthetic oligonucleotide
  Sense strand starting at position 2404 of SEQ ID NO: 318704
gcuuguguacuguugccua

SEQ ID NO: 583032 - RNA, 19 nt, Artificial Sequence
  Description of Artificial Sequence: Synthetic oligonucleotide
  Antisense strand to SEQ ID NO: 583031
uaggcaacaguacacaagc

SEQ ID NO: 583033 - RNA, 19 nt, Artificial Sequence
  Description of Artificial Sequence: Synthetic oligonucleotide
  Sense strand starting at position 2584 of SEQ ID NO: 318704
uaggaaacguuguugaaag

SEQ ID NO: 583034 - RNA, 19 nt, Artificial Sequence
  Description of Artificial Sequence: Synthetic oligonucleotide
  Antisense strand to SEQ ID NO: 583033
cuuucaacaacguuuccua

SEQ ID NO: 583035 - RNA, 19 nt, Artificial Sequence
  Description of Artificial Sequence: Synthetic oligonucleotide
  Sense strand starting at position 2677 of SEQ ID NO: 318704
uguacaaucuuguuagaag

SEQ ID NO: 583036 - RNA, 19 nt, Artificial Sequence
  Description of Artificial Sequence: Synthetic oligonucleotide
  Antisense strand to SEQ ID NO: 583035
cuucuaacaagauuguaca

SEQ ID NO: 583037 - RNA, 19 nt, Artificial Sequence
  Description of Artificial Sequence: Synthetic oligonucleotide
  Sense strand starting at position 2773 of SEQ ID NO: 318704
aagggugagccugguaaau

SEQ ID NO: 583038 - RNA, 19 nt, Artificial Sequence
  Description of Artificial Sequence: Synthetic oligonucleotide
  Antisense strand to SEQ ID NO: 583037
auuuaccaggcucacccuu

SEQ ID NO: 583039 - RNA, 19 nt, Artificial Sequence
  Description of Artificial Sequence: Synthetic oligonucleotide
  Sense strand starting at position 2842 of SEQ ID NO: 318704
agccuuguuggucaagaaa

SEQ ID NO: 583040 - RNA, 19 nt, Artificial Sequence
  Description of Artificial Sequence: Synthetic oligonucleotide
  Antisense strand to SEQ ID NO: 583039
uuucuugaccaacaaggcu

SEQ ID NO: 583041 - RNA, 19 nt, Artificial Sequence
  Description of Artificial Sequence: Synthetic oligonucleotide
  Sense strand starting at position 2845 of SEQ ID NO: 318704
cuuguuggucaagaaauua

SEQ ID NO: 583042 - RNA, 19 nt, Artificial Sequence
  Description of Artificial Sequence: Synthetic oligonucleotide
  Antisense strand to SEQ ID NO: 583041
uaauuucuugaccaacaag

SEQ ID NO: 583043 - RNA, 19 nt, Artificial Sequence
  Description of Artificial Sequence: Synthetic oligonucleotide
  Sense strand starting at position 2924 of SEQ ID NO: 318704
gacuccaacgguuaggauu

SEQ ID NO: 583044 - RNA, 19 nt, Artificial Sequence
  Description of Artificial Sequence: Synthetic oligonucleotide
  Antisense strand to SEQ ID NO: 583043
aauccuaaccguuggaguc

SEQ ID NO: 583045 - RNA, 19 nt, Artificial Sequence
  Description of Artificial Sequence: Synthetic oligonucleotide
  Sense strand starting at position 2937 of SEQ ID NO: 318704
aggauuugugcagguuacu

SEQ ID NO: 583046 - RNA, 19 nt, Artificial Sequence
  Description of Artificial Sequence: Synthetic oligonucleotide
  Antisense strand to SEQ ID NO: 583045
aguaaccugcacaaauccu

SEQ ID NO: 583047 - RNA, 19 nt, Artificial Sequence
  Description of Artificial Sequence: Synthetic oligonucleotide
  Sense strand starting at position 3103 of SEQ ID NO: 318704
agcucaaucugaguaaugu

SEQ ID NO: 583048 - RNA, 19 nt, Artificial Sequence
  Description of Artificial Sequence: Synthetic oligonucleotide
  Antisense strand to SEQ ID NO: 583047
acauuacucagauugagcu

SEQ ID NO: 583049 - RNA, 19 nt, Artificial Sequence
  Description of Artificial Sequence: Synthetic oligonucleotide
  Sense strand starting at position 3104 of SEQ ID NO: 318704
gcucaaucugaguaauguc

SEQ ID NO: 583050 - RNA, 19 nt, Artificial Sequence
  Description of Artificial Sequence: Synthetic oligonucleotide
  Antisense strand to SEQ ID NO: 583049
gacauuacucagauugagc

SEQ ID NO: 583051 - RNA, 19 nt, Artificial Sequence
  Description of Artificial Sequence: Synthetic oligonucleotide
  Sense strand starting at position 3666 of SEQ ID NO: 318704
gaaccacccuguuuaggua

SEQ ID NO: 583052 - RNA, 19 nt, Artificial Sequence
  Description of Artificial Sequence: Synthetic oligonucleotide
  Antisense strand to SEQ ID NO: 583051
uaccuaaacagggugguuc

SEQ ID NO: 583053 - RNA, 19 nt, Artificial Sequence
  Description of Artificial Sequence: Synthetic oligonucleotide
  Sense strand starting at position 3732 of SEQ ID NO: 318704
cuauuugcauugcuguuua

SEQ ID NO: 583054 - RNA, 19 nt, Artificial Sequence
  Description of Artificial Sequence: Synthetic oligonucleotide
  Antisense strand to SEQ ID NO: 583053
uaaacagcaaugcaaauag

SEQ ID NO: 583055 - RNA, 19 nt, Artificial Sequence
  Description of Artificial Sequence: Synthetic oligonucleotide
  Sense strand starting at position 3736 of SEQ ID NO: 318704
uugcauugcuguuuaauuu

SEQ ID NO: 583056 - RNA, 19 nt, Artificial Sequence
  Description of Artificial Sequence: Synthetic oligonucleotide
  Antisense strand to SEQ ID NO: 583055
aaauuaaacagcaaugcaa

SEQ ID NO: 583057 - RNA, 19 nt, Artificial Sequence
  Description of Artificial Sequence: Synthetic oligonucleotide
  Sense strand starting at position 3766 of SEQ ID NO: 318704
aaagcucgacacuauguau

SEQ ID NO: 583058 - RNA, 19 nt, Artificial Sequence
  Description of Artificial Sequence: Synthetic oligonucleotide
  Antisense strand to SEQ ID NO: 583057
auacauagugucgagcuuu

SEQ ID NO: 583059 - RNA, 19 nt, Artificial Sequence
  Description of Artificial Sequence: Synthetic oligonucleotide
  Sense strand starting at position 3772 of SEQ ID NO: 318704
cgacacuauguauauccaa

SEQ ID NO: 583060 - RNA, 19 nt, Artificial Sequence
  Description of Artificial Sequence: Synthetic oligonucleotide
  Antisense strand to SEQ ID NO: 583059
uuggauauacauagugucg

SEQ ID NO: 583061 - RNA, 19 nt, Artificial Sequence
  Description of Artificial Sequence: Synthetic oligonucleotide
  Sense strand starting at position 3819 of SEQ ID NO: 318704
acaccacuguuucugagau

SEQ ID NO: 583062 - RNA, 19 nt, Artificial Sequence
  Description of Artificial Sequence: Synthetic oligonucleotide
  Antisense strand to SEQ ID NO: 583061
aucucagaaacaguggugu

SEQ ID NO: 583063 - RNA, 19 nt, Artificial Sequence
  Description of Artificial Sequence: Synthetic oligonucleotide
  Sense strand starting at position 3829 of SEQ ID NO: 318704
uucugagaugcugacuuaa

SEQ ID NO: 583064 - RNA, 19 nt, Artificial Sequence
  Description of Artificial Sequence: Synthetic oligonucleotide
  Antisense strand to SEQ ID NO: 583063
uuaagucagcaucucagaa

SEQ ID NO: 583065 - RNA, 19 nt, Artificial Sequence
  Description of Artificial Sequence: Synthetic oligonucleotide
  Sense strand starting at position 3831 of SEQ ID NO: 318704
cugagaugcugacuuaaug

SEQ ID NO: 583066 - RNA, 19 nt, Artificial Sequence
  Description of Artificial Sequence: Synthetic oligonucleotide
  Antisense strand to SEQ ID NO: 583065
cauuaagucagcaucucag

SEQ ID NO: 583067 - RNA, 19 nt, Artificial Sequence
  Description of Artificial Sequence: Synthetic oligonucleotide
  Sense strand starting at position 3952 of SEQ ID NO: 318704
auucuacugucaguauuau

SEQ ID NO: 583068 - RNA, 19 nt, Artificial Sequence
  Description of Artificial Sequence: Synthetic oligonucleotide
  Antisense strand to SEQ ID NO: 583067
auaauacugacaguagaau

SEQ ID NO: 583069 - RNA, 19 nt, Artificial Sequence
  Description of Artificial Sequence: Synthetic oligonucleotide
  Sense strand starting at position 3953 of SEQ ID NO: 318704
uucuacugucaguauuauc

SEQ ID NO: 583070 - RNA, 19 nt, Artificial Sequence
  Description of Artificial Sequence: Synthetic oligonucleotide
  Antisense strand to SEQ ID NO: 583069
gauaauacugacaguagaa

SEQ ID NO: 583071 - RNA, 19 nt, Artificial Sequence
  Description of Artificial Sequence: Synthetic oligonucleotide
  Sense strand starting at position 15 of SEQ ID NO: 318705
aucucagaauugucugacu

SEQ ID NO: 583072 - RNA, 19 nt, Artificial Sequence
  Description of Artificial Sequence: Synthetic oligonucleotide
  Antisense strand to SEQ ID NO: 583071
agucagacaauucugagau

SEQ ID NO: 583073 - RNA, 19 nt, Artificial Sequence
  Description of Artificial Sequence: Synthetic oligonucleotide
  Sense strand starting at position 17 of SEQ ID NO: 318705
cucagaauugucugacuua

SEQ ID NO: 583074 - RNA, 19 nt, Artificial Sequence
  Description of Artificial Sequence: Synthetic oligonucleotide
  Antisense strand to SEQ ID NO: 583073
uaagucagacaauucugag

SEQ ID NO: 583075 - RNA, 19 nt, Artificial Sequence
  Description of Artificial Sequence: Synthetic oligonucleotide
  Sense strand starting at position 20 of SEQ ID NO: 318705
agaauugucugacuuaaug

SEQ ID NO: 583076 - RNA, 19 nt, Artificial Sequence
  Description of Artificial Sequence: Synthetic oligonucleotide
  Antisense strand to SEQ ID NO: 583075
cauuaagucagacaauucu

SEQ ID NO: 583077 - RNA, 19 nt, Artificial Sequence
  Description of Artificial Sequence: Synthetic oligonucleotide
  Sense strand starting at position 387 of SEQ ID NO: 318705
cccuaagucugucuguaca

SEQ ID NO: 583078 - RNA, 19 nt, Artificial Sequence
  Description of Artificial Sequence: Synthetic oligonucleotide
  Antisense strand to SEQ ID NO: 583077
uguacagacagacuuaggg

SEQ ID NO: 583079 - RNA, 19 nt, Artificial Sequence
  Description of Artificial Sequence: Synthetic oligonucleotide
  Sense strand starting at position 389 of SEQ ID NO: 318705
cuaagucugucuguacauu

SEQ ID NO: 583080 - RNA, 19 nt, Artificial Sequence
  Description of Artificial Sequence: Synthetic oligonucleotide
  Antisense strand to SEQ ID NO: 583079
aauguacagacagacuuag

SEQ ID NO: 583081 - RNA, 19 nt, Artificial Sequence
  Description of Artificial Sequence: Synthetic oligonucleotide
  Sense strand starting at position 520 of SEQ ID NO: 318705
agcagacucugagcuacau

SEQ ID NO: 583082 - RNA, 19 nt, Artificial Sequence
  Description of Artificial Sequence: Synthetic oligonucleotide
  Antisense strand to SEQ ID NO: 583081
auguagcucagagucugcu

SEQ ID NO: 583083 - RNA, 19 nt, Artificial Sequence
  Description of Artificial Sequence: Synthetic oligonucleotide
  Sense strand starting at position 581 of SEQ ID NO: 318705
gaggcagaugucuggaugu

SEQ ID NO: 583084 - RNA, 19 nt, Artificial Sequence
  Description of Artificial Sequence: Synthetic oligonucleotide
  Antisense strand to SEQ ID NO: 583083
acauccagacaucugccuc

SEQ ID NO: 583085 - RNA, 19 nt, Artificial Sequence
  Description of Artificial Sequence: Synthetic oligonucleotide
  Sense strand starting at position 974 of SEQ ID NO: 318705
uugcauuauuugucagcua

SEQ ID NO: 583086 - RNA, 19 nt, Artificial Sequence
  Description of Artificial Sequence: Synthetic oligonucleotide
  Antisense strand to SEQ ID NO: 583085
uagcugacaaauaaugcaa

SEQ ID NO: 583087 - RNA, 19 nt, Artificial Sequence
  Description of Artificial Sequence: Synthetic oligonucleotide
  Sense strand starting at position 1025 of SEQ ID NO: 318705
aggcguaauggcuaucuuu

SEQ ID NO: 583088 - RNA, 19 nt, Artificial Sequence
  Description of Artificial Sequence: Synthetic oligonucleotide
  Antisense strand to SEQ ID NO: 583087
aaagauagccauuacgccu

SEQ ID NO: 583089 - RNA, 19 nt, Artificial Sequence
  Description of Artificial Sequence: Synthetic oligonucleotide
  Sense strand starting at position 1091 of SEQ ID NO: 318705
uccggaugcucuuucucaa

SEQ ID NO: 583090 - RNA, 19 nt, Artificial Sequence
  Description of Artificial Sequence: Synthetic oligonucleotide
  Antisense strand to SEQ ID NO: 583089
uugagaaagagcauccgga

SEQ ID NO: 583091 - RNA, 19 nt, Artificial Sequence
  Description of Artificial Sequence: Synthetic oligonucleotide
  Sense strand starting at position 1288 of SEQ ID NO: 318705
uguuuccaucacuagaaug

SEQ ID NO: 583092 - RNA, 19 nt, Artificial Sequence
  Description of Artificial Sequence: Synthetic oligonucleotide
  Antisense strand to SEQ ID NO: 583091
cauucuagugauggaaaca

SEQ ID NO: 583093 - RNA, 19 nt, Artificial Sequence
  Description of Artificial Sequence: Synthetic oligonucleotide
  Sense strand starting at position 1430 of SEQ ID NO: 318705
guaagauagccugggaaag

SEQ ID NO: 583094 - RNA, 19 nt, Artificial Sequence
  Description of Artificial Sequence: Synthetic oligonucleotide
  Antisense strand to SEQ ID NO: 583093
cuuucccaggcuaucuuac

SEQ ID NO: 583095 - RNA, 19 nt, Artificial Sequence
  Description of Artificial Sequence: Synthetic oligonucleotide
  Sense strand starting at position 1441 of SEQ ID NO: 318705
ugggaaagcaaucggcauu

SEQ ID NO: 583096 - RNA, 19 nt, Artificial Sequence
  Description of Artificial Sequence: Synthetic oligonucleotide
  Antisense strand to SEQ ID NO: 583095
aaugccgauugcuuuccca

SEQ ID NO: 583097 - RNA, 19 nt, Artificial Sequence
  Description of Artificial Sequence: Synthetic oligonucleotide
  Sense strand starting at position 1444 of SEQ ID NO: 318705
gaaagcaaucggcauugaa

SEQ ID NO: 583098 - RNA, 19 nt, Artificial Sequence
  Description of Artificial Sequence: Synthetic oligonucleotide
  Antisense strand to SEQ ID NO: 583097
uucaaugccgauugcuuuc

SEQ ID NO: 583099 - RNA, 19 nt, Artificial Sequence
  Description of Artificial Sequence: Synthetic oligonucleotide
  Sense strand starting at position 1476 of SEQ ID NO: 318705
uaaggaaggcgcuagaaua

SEQ ID NO: 583100 - RNA, 19 nt, Artificial Sequence
  Description of Artificial Sequence: Synthetic oligonucleotide
  Antisense strand to SEQ ID NO: 583099
uauucuagcgccuuccuua

SEQ ID NO: 583101 - RNA, 19 nt, Artificial Sequence
  Description of Artificial Sequence: Synthetic oligonucleotide
  Sense strand starting at position 1542 of SEQ ID NO: 318705
agguuuacgucggcuggaa

SEQ ID NO: 583102 - RNA, 19 nt, Artificial Sequence
  Description of Artificial Sequence: Synthetic oligonucleotide
  Antisense strand to SEQ ID NO: 583101
uuccagccgacguaaaccu

SEQ ID NO: 583103 - RNA, 19 nt, Artificial Sequence
  Description of Artificial Sequence: Synthetic oligonucleotide
  Sense strand starting at position 1546 of SEQ ID NO: 318705
uuacgucggcuggaauaaa

SEQ ID NO: 583104 - RNA, 19 nt, Artificial Sequence
  Description of Artificial Sequence: Synthetic oligonucleotide
  Antisense strand to SEQ ID NO: 583103
uuuauuccagccgacguaa

SEQ ID NO: 583105 - RNA, 19 nt, Artificial Sequence
  Description of Artificial Sequence: Synthetic oligonucleotide
  Sense strand starting at position 1619 of SEQ ID NO: 318705
ggcauaaaucacugaguga

SEQ ID NO: 583106 - RNA, 19 nt, Artificial Sequence
  Description of Artificial Sequence: Synthetic oligonucleotide
  Antisense strand to SEQ ID NO: 583105
ucacucagugauuuaugcc

SEQ ID NO: 583107 - RNA, 19 nt, Artificial Sequence
  Description of Artificial Sequence: Synthetic oligonucleotide
  Sense strand starting at position 1788 of SEQ ID NO: 318705
gagccagaagaguguuuga

SEQ ID NO: 583108 - RNA, 19 nt, Artificial Sequence
  Description of Artificial Sequence: Synthetic oligonucleotide
  Antisense strand to SEQ ID NO: 583107
ucaaacacucuucuggcuc

SEQ ID NO: 583109 - RNA, 19 nt, Artificial Sequence
  Description of Artificial Sequence: Synthetic oligonucleotide
  Sense strand starting at position 1793 of SEQ ID NO: 318705
agaagaguguuugagaaac

SEQ ID NO: 583110 - RNA, 19 nt, Artificial Sequence
  Description of Artificial Sequence: Synthetic oligonucleotide
  Antisense strand to SEQ ID NO: 583109
guuucucaaacacucuucu

SEQ ID NO: 583111 - RNA, 19 nt, Artificial Sequence
  Description of Artificial Sequence: Synthetic oligonucleotide
  Sense strand starting at position 1799 of SEQ ID NO: 318705
guguuugagaaacggacau

SEQ ID NO: 583112 - RNA, 19 nt, Artificial Sequence
  Description of Artificial Sequence: Synthetic oligonucleotide
  Antisense strand to SEQ ID NO: 583111
auguccguuucucaaacac

SEQ ID NO: 583113 - RNA, 19 nt, Artificial Sequence
  Description of Artificial Sequence: Synthetic oligonucleotide
  Sense strand starting at position 1914 of SEQ ID NO: 318705
gcuugucuccgggcuauua

SEQ ID NO: 583114 - RNA, 19 nt, Artificial Sequence
  Description of Artificial Sequence: Synthetic oligonucleotide
  Antisense strand to SEQ ID NO: 583113
uaauagcccggagacaagc

SEQ ID NO: 583115 - RNA, 19 nt, Artificial Sequence
  Description of Artificial Sequence: Synthetic oligonucleotide
  Sense strand starting at position 1924 of SEQ ID NO: 318705
gggcuauuagccgaugcau

SEQ ID NO: 583116 - RNA, 19 nt, Artificial Sequence
  Description of Artificial Sequence: Synthetic oligonucleotide
  Antisense strand to SEQ ID NO: 583115
augcaucggcuaauagccc

SEQ ID NO: 583117 - RNA, 19 nt, Artificial Sequence
  Description of Artificial Sequence: Synthetic oligonucleotide
  Sense strand starting at position 1987 of SEQ ID NO: 318705
uugggaaacuccucggaag

SEQ ID NO: 583118 - RNA, 19 nt, Artificial Sequence
  Description of Artificial Sequence: Synthetic oligonucleotide
  Antisense strand to SEQ ID NO: 583117
cuuccgaggaguuucccaa

SEQ ID NO: 583119 - RNA, 19 nt, Artificial Sequence
  Description of Artificial Sequence: Synthetic oligonucleotide
  Sense strand starting at position 2357 of SEQ ID NO: 318705
cuagaaguagucuggagaa

SEQ ID NO: 583120 - RNA, 19 nt, Artificial Sequence
  Description of Artificial Sequence: Synthetic oligonucleotide
  Antisense strand to SEQ ID NO: 583119
uucuccagacuacuucuag

SEQ ID NO: 583121 - RNA, 19 nt, Artificial Sequence
  Description of Artificial Sequence: Synthetic oligonucleotide
  Sense strand starting at position 2385 of SEQ ID NO: 318705
auuaguugaccaggauuga

SEQ ID NO: 583122 - RNA, 19 nt, Artificial Sequence
  Description of Artificial Sequence: Synthetic oligonucleotide
  Antisense strand to SEQ ID NO: 583121
ucaauccuggucaacuaau

SEQ ID NO: 583123 - RNA, 19 nt, Artificial Sequence
  Description of Artificial Sequence: Synthetic oligonucleotide
  Sense strand starting at position 2473 of SEQ ID NO: 318705
uguauuucacagcguuguu

SEQ ID NO: 583124 - RNA, 19 nt, Artificial Sequence
  Description of Artificial Sequence: Synthetic oligonucleotide
  Antisense strand to SEQ ID NO: 583123
aacaacgcugugaaauaca

SEQ ID NO: 583125 - RNA, 19 nt, Artificial Sequence
  Description of Artificial Sequence: Synthetic oligonucleotide
  Sense strand starting at position 2485 of SEQ ID NO: 318705
cguuguuacgaguacuaaa

SEQ ID NO: 583126 - RNA, 19 nt, Artificial Sequence
  Description of Artificial Sequence: Synthetic oligonucleotide
  Antisense strand to SEQ ID NO: 583125
uuuaguacucguaacaacg

SEQ ID NO: 583127 - RNA, 19 nt, Artificial Sequence
  Description of Artificial Sequence: Synthetic oligonucleotide
  Sense strand starting at position 2593 of SEQ ID NO: 318705
agcucacggagcuauuauu

SEQ ID NO: 583128 - RNA, 19 nt, Artificial Sequence
  Description of Artificial Sequence: Synthetic oligonucleotide
  Antisense strand to SEQ ID NO: 583127
aauaauagcuccgugagcu

SEQ ID NO: 583129 - RNA, 19 nt, Artificial Sequence
  Description of Artificial Sequence: Synthetic oligonucleotide
  Sense strand starting at position 2599 of SEQ ID NO: 318705
cggagcuauuauucucuua

SEQ ID NO: 583130 - RNA, 19 nt, Artificial Sequence
  Description of Artificial Sequence: Synthetic oligonucleotide
  Antisense strand to SEQ ID NO: 583129
uaagagaauaauagcuccg

SEQ ID NO: 583131 - RNA, 19 nt, Artificial Sequence
  Description of Artificial Sequence: Synthetic oligonucleotide
  Sense strand starting at position 2620 of SEQ ID NO: 318705
acccacguucucugaaaua

SEQ ID NO: 583132 - RNA, 19 nt, Artificial Sequence
  Description of Artificial Sequence: Synthetic oligonucleotide
  Antisense strand to SEQ ID NO: 583131
uauuucagagaacgugggu

SEQ ID NO: 583133 - RNA, 19 nt, Artificial Sequence
  Description of Artificial Sequence: Synthetic oligonucleotide
  Sense strand starting at position 2663 of SEQ ID NO: 318705
guguuucugggucauccau

SEQ ID NO: 583134 - RNA, 19 nt, Artificial Sequence
  Description of Artificial Sequence: Synthetic oligonucleotide
  Antisense strand to SEQ ID NO: 583133
auggaugacccagaaacac

SEQ ID NO: 583135 - RNA, 19 nt, Artificial Sequence
  Description of Artificial Sequence: Synthetic oligonucleotide
  Sense strand starting at position 2665 of SEQ ID NO: 318705
guuucugggucauccauau

SEQ ID NO: 583136 - RNA, 19 nt, Artificial Sequence
  Description of Artificial Sequence: Synthetic oligonucleotide
  Antisense strand to SEQ ID NO: 583135
auauggaugacccagaaac

SEQ ID NO: 583137 - RNA, 19 nt, Artificial Sequence
  Description of Artificial Sequence: Synthetic oligonucleotide
  Sense strand starting at position 2771 of SEQ ID NO: 318705
cugggucccugguucaaga

SEQ ID NO: 583138 - RNA, 19 nt, Artificial Sequence
  Description of Artificial Sequence: Synthetic oligonucleotide
  Antisense strand to SEQ ID NO: 583137
ucuugaaccagggacccag

SEQ ID NO: 583139 - RNA, 19 nt, Artificial Sequence
  Description of Artificial Sequence: Synthetic oligonucleotide
  Sense strand starting at position 3096 of SEQ ID NO: 318705
gacuauucucaugggcaua

SEQ ID NO: 583140 - RNA, 19 nt, Artificial Sequence
  Description of Artificial Sequence: Synthetic oligonucleotide
  Antisense strand to SEQ ID NO: 583139
uaugcccaugagaauaguc

SEQ ID NO: 583141 - RNA, 19 nt, Artificial Sequence
  Description of Artificial Sequence: Synthetic oligonucleotide
  Sense strand starting at position 3110 of SEQ ID NO: 318705
gcauaaguacucuaacgaa

SEQ ID NO: 583142 - RNA, 19 nt, Artificial Sequence
  Description of Artificial Sequence: Synthetic oligonucleotide
  Antisense strand to SEQ ID NO: 583141
uucguuagaguacuuaugc

SEQ ID NO: 583143 - RNA, 19 nt, Artificial Sequence
  Description of Artificial Sequence: Synthetic oligonucleotide
  Sense strand starting at position 3259 of SEQ ID NO: 318705
uccucaguguacuuaugaa

SEQ ID NO: 583144 - RNA, 19 nt, Artificial Sequence
  Description of Artificial Sequence: Synthetic oligonucleotide
  Antisense strand to SEQ ID NO: 583143
uucauaaguacacugagga

SEQ ID NO: 583145 - RNA, 19 nt, Artificial Sequence
  Description of Artificial Sequence: Synthetic oligonucleotide
  Sense strand starting at position 3480 of SEQ ID NO: 318705
aagagauucgcuugaacuu

SEQ ID NO: 583146 - RNA, 19 nt, Artificial Sequence
  Description of Artificial Sequence: Synthetic oligonucleotide
  Antisense strand to SEQ ID NO: 583145
aaguucaagcgaaucucuu

SEQ ID NO: 583147 - RNA, 19 nt, Artificial Sequence
  Description of Artificial Sequence: Synthetic oligonucleotide
  Sense strand starting at position 3481 of SEQ ID NO: 318705
agagauucgcuugaacuug

SEQ ID NO: 583148 - RNA, 19 nt, Artificial Sequence
  Description of Artificial Sequence: Synthetic oligonucleotide
  Antisense strand to SEQ ID NO: 583147
caaguucaagcgaaucucu

SEQ ID NO: 583149 - RNA, 19 nt, Artificial Sequence
  Description of Artificial Sequence: Synthetic oligonucleotide
  Sense strand starting at position 3601 of SEQ ID NO: 318705
uuucccaugucugcacaua

SEQ ID NO: 583150 - RNA, 19 nt, Artificial Sequence
  Description of Artificial Sequence: Synthetic oligonucleotide
  Antisense strand to SEQ ID NO: 583149
uaugugcagacaugggaaa

SEQ ID NO: 583151 - RNA, 19 nt, Artificial Sequence
  Description of Artificial Sequence: Synthetic oligonucleotide
  Sense strand starting at position 156 of SEQ ID NO: 318706
agaauaauguaagggaaua

SEQ ID NO: 583152 - RNA, 19 nt, Artificial Sequence
  Description of Artificial Sequence: Synthetic oligonucleotide
  Antisense strand to SEQ ID NO: 583151
uauucccuuacauuauucu

SEQ ID NO: 583153 - RNA, 19 nt, Artificial Sequence
  Description of Artificial Sequence: Synthetic oligonucleotide
  Sense strand starting at position 554 of SEQ ID NO: 318706
gagaauaaacuccgucuca

SEQ ID NO: 583154 - RNA, 19 nt, Artificial Sequence
  Description of Artificial Sequence: Synthetic oligonucleotide
  Antisense strand to SEQ ID NO: 583153
ugagacggaguuuauucuc

SEQ ID NO: 583155 - RNA, 19 nt, Artificial Sequence
  Description of Artificial Sequence: Synthetic oligonucleotide
  Sense strand starting at position 555 of SEQ ID NO: 318706
agaauaaacuccgucucaa

SEQ ID NO: 583156 - RNA, 19 nt, Artificial Sequence
  Description of Artificial Sequence: Synthetic oligonucleotide
  Antisense strand to SEQ ID NO: 583155
uugagacggaguuuauucu

SEQ ID NO: 583157 - RNA, 19 nt, Artificial Sequence
  Description of Artificial Sequence: Synthetic oligonucleotide
  Sense strand starting at position 915 of SEQ ID NO: 318706
guaguuauacuguacaggu

SEQ ID NO: 583158 - RNA, 19 nt, Artificial Sequence
  Description of Artificial Sequence: Synthetic oligonucleotide
  Antisense strand to SEQ ID NO: 583157
accuguacaguauaacuac

SEQ ID NO: 583159 - RNA, 19 nt, Artificial Sequence
  Description of Artificial Sequence: Synthetic oligonucleotide
  Sense strand starting at position 1060 of SEQ ID NO: 318706
ggagcauggcuguauuaag

SEQ ID NO: 583160 - RNA, 19 nt, Artificial Sequence
  Description of Artificial Sequence: Synthetic oligonucleotide
  Antisense strand to SEQ ID NO: 583159
cuuaauacagccaugcucc

SEQ ID NO: 583161 - RNA, 19 nt, Artificial Sequence
  Description of Artificial Sequence: Synthetic oligonucleotide
  Sense strand starting at position 1099 of SEQ ID NO: 318706
guuguggucguuguugaga

SEQ ID NO: 583162 - RNA, 19 nt, Artificial Sequence
  Description of Artificial Sequence: Synthetic oligonucleotide
  Antisense strand to SEQ ID NO: 583161
ucucaacaacgaccacaac

SEQ ID NO: 583163 - RNA, 19 nt, Artificial Sequence
  Description of Artificial Sequence: Synthetic oligonucleotide
  Sense strand starting at position 1506 of SEQ ID NO: 318706
ugagaaacuccaugccacu

SEQ ID NO: 583164 - RNA, 19 nt, Artificial Sequence
  Description of Artificial Sequence: Synthetic oligonucleotide
  Antisense strand to SEQ ID NO: 583163
aguggcauggaguuucuca

SEQ ID NO: 583165 - RNA, 19 nt, Artificial Sequence
  Description of Artificial Sequence: Synthetic oligonucleotide
  Sense strand starting at position 2043 of SEQ ID NO: 318706
cgacucgugggcgucaaua

SEQ ID NO: 583166 - RNA, 19 nt, Artificial Sequence
  Description of Artificial Sequence: Synthetic oligonucleotide
  Antisense strand to SEQ ID NO: 583165
uauugacgcccacgagucg

SEQ ID NO: 583167 - RNA, 19 nt, Artificial Sequence
  Description of Artificial Sequence: Synthetic oligonucleotide
  Sense strand starting at position 2054 of SEQ ID NO: 318706
cgucaauacugggcugagu

SEQ ID NO: 583168 - RNA, 19 nt, Artificial Sequence
  Description of Artificial Sequence: Synthetic oligonucleotide
  Antisense strand to SEQ ID NO: 583167
acucagcccaguauugacg

SEQ ID NO: 583169 - RNA, 19 nt, Artificial Sequence
  Description of Artificial Sequence: Synthetic oligonucleotide
  Sense strand starting at position 2056 of SEQ ID NO: 318706
ucaauacugggcugaguuu

SEQ ID NO: 583170 - RNA, 19 nt, Artificial Sequence
  Description of Artificial Sequence: Synthetic oligonucleotide
  Antisense strand to SEQ ID NO: 583169
aaacucagcccaguauuga

SEQ ID NO: 583171 - RNA, 19 nt, Artificial Sequence
  Description of Artificial Sequence: Synthetic oligonucleotide
  Sense strand starting at position 2169 of SEQ ID NO: 318706
gcgagauagacgggaagau

SEQ ID NO: 583172 - RNA, 19 nt, Artificial Sequence
  Description of Artificial Sequence: Synthetic oligonucleotide
  Antisense strand to SEQ ID NO: 583171
aucuucccgucuaucucgc

SEQ ID NO: 583173 - RNA, 19 nt, Artificial Sequence
  Description of Artificial Sequence: Synthetic oligonucleotide
  Sense strand starting at position 2209 of SEQ ID NO: 318706
aaaggcuucccgugagacu

SEQ ID NO: 583174 - RNA, 19 nt, Artificial Sequence
  Description of Artificial Sequence: Synthetic oligonucleotide
  Antisense strand to SEQ ID NO: 583173
agucucacgggaagccuuu

SEQ ID NO: 583175 - RNA, 19 nt, Artificial Sequence
  Description of Artificial Sequence: Synthetic oligonucleotide
  Sense strand starting at position 2248 of SEQ ID NO: 318706
ggugaaauugccggcaaga

SEQ ID NO: 583176 - RNA, 19 nt, Artificial Sequence
  Description of Artificial Sequence: Synthetic oligonucleotide
  Antisense strand to SEQ ID NO: 583175
ucuugccggcaauuucacc

SEQ ID NO: 583177 - RNA, 19 nt, Artificial Sequence
  Description of Artificial Sequence: Synthetic oligonucleotide
  Sense strand starting at position 2311 of SEQ ID NO: 318706
gggagugggucacugugau

SEQ ID NO: 583178 - RNA, 19 nt, Artificial Sequence
  Description of Artificial Sequence: Synthetic oligonucleotide
  Antisense strand to SEQ ID NO: 583177
aucacagugacccacuccc

SEQ ID NO: 583179 - RNA, 19 nt, Artificial Sequence
  Description of Artificial Sequence: Synthetic oligonucleotide
  Sense strand starting at position 2520 of SEQ ID NO: 318706
accagcugugccuagugaa

SEQ ID NO: 583180 - RNA, 19 nt, Artificial Sequence
  Description of Artificial Sequence: Synthetic oligonucleotide
  Antisense strand to SEQ ID NO: 583179
uucacuaggcacagcuggu

SEQ ID NO: 583181 - RNA, 19 nt, Artificial Sequence
  Description of Artificial Sequence: Synthetic oligonucleotide
  Sense strand starting at position 2638 of SEQ ID NO: 318706
ucccuugucccauauugua

SEQ ID NO: 583182 - RNA, 19 nt, Artificial Sequence
  Description of Artificial Sequence: Synthetic oligonucleotide
  Antisense strand to SEQ ID NO: 583181
uacaauaugggacaaggga

SEQ ID NO: 583183 - RNA, 19 nt, Artificial Sequence
  Description of Artificial Sequence: Synthetic oligonucleotide
  Sense strand starting at position 2774 of SEQ ID NO: 318706
gcuguacugcuuuaaacuc

SEQ ID NO: 583184 - RNA, 19 nt, Artificial Sequence
  Description of Artificial Sequence: Synthetic oligonucleotide
  Antisense strand to SEQ ID NO: 583183
gaguuuaaagcaguacagc

SEQ ID NO: 583185 - RNA, 19 nt, Artificial Sequence
  Description of Artificial Sequence: Synthetic oligonucleotide
  Sense strand starting at position 2916 of SEQ ID NO: 318706
uucucaaaugccgugugua

SEQ ID NO: 583186 - RNA, 19 nt, Artificial Sequence
  Description of Artificial Sequence: Synthetic oligonucleotide
  Antisense strand to SEQ ID NO: 583185
uacacacggcauuugagaa

SEQ ID NO: 583187 - RNA, 19 nt, Artificial Sequence
  Description of Artificial Sequence: Synthetic oligonucleotide
  Sense strand starting at position 2958 of SEQ ID NO: 318706
auuugcuagucucuuugua

SEQ ID NO: 583188 - RNA, 19 nt, Artificial Sequence
  Description of Artificial Sequence: Synthetic oligonucleotide
  Antisense strand to SEQ ID NO: 583187
uacaaagagacuagcaaau

SEQ ID NO: 583189 - RNA, 19 nt, Artificial Sequence
  Description of Artificial Sequence: Synthetic oligonucleotide
  Sense strand starting at position 3101 of SEQ ID NO: 318706
ggcagucuauacuuucuua

SEQ ID NO: 583190 - RNA, 19 nt, Artificial Sequence
  Description of Artificial Sequence: Synthetic oligonucleotide
  Antisense strand to SEQ ID NO: 583189
uaagaaaguauagacugcc

SEQ ID NO: 583191 - RNA, 19 nt, Artificial Sequence
  Description of Artificial Sequence: Synthetic oligonucleotide
  Sense strand starting at position 3104 of SEQ ID NO: 318706
agucuauacuuucuuauga

SEQ ID NO: 583192 - RNA, 19 nt, Artificial Sequence
  Description of Artificial Sequence: Synthetic oligonucleotide
  Antisense strand to SEQ ID NO: 583191
ucauaagaaaguauagacu

SEQ ID NO: 583193 - RNA, 19 nt, Artificial Sequence
  Description of Artificial Sequence: Synthetic oligonucleotide
  Sense strand starting at position 3159 of SEQ ID NO: 318706
aguuuauuguauccucauu

SEQ ID NO: 583194 - RNA, 19 nt, Artificial Sequence
  Description of Artificial Sequence: Synthetic oligonucleotide
  Antisense strand to SEQ ID NO: 583193
aaugaggauacaauaaacu

SEQ ID NO: 583195 - RNA, 19 nt, Artificial Sequence
  Description of Artificial Sequence: Synthetic oligonucleotide
  Sense strand starting at position 3170 of SEQ ID NO: 318706
uccucauugccugguacau

SEQ ID NO: 583196 - RNA, 19 nt, Artificial Sequence
  Description of Artificial Sequence: Synthetic oligonucleotide
  Antisense strand to SEQ ID NO: 583195
auguaccaggcaaugagga

SEQ ID NO: 583197 - RNA, 19 nt, Artificial Sequence
  Description of Artificial Sequence: Synthetic oligonucleotide
  Sense strand starting at position 3401 of SEQ ID NO: 318706
uuuaguagugaugggauau

SEQ ID NO: 583198 - RNA, 19 nt, Artificial Sequence
  Description of Artificial Sequence: Synthetic oligonucleotide
  Antisense strand to SEQ ID NO: 583197
auaucccaucacuacuaaa

SEQ ID NO: 583199 - RNA, 19 nt, Artificial Sequence
  Description of Artificial Sequence: Synthetic oligonucleotide
  Sense strand starting at position 3402 of SEQ ID NO: 318706
uuaguagugaugggauauc

SEQ ID NO: 583200 - RNA, 19 nt, Artificial Sequence
  Description of Artificial Sequence: Synthetic oligonucleotide
  Antisense strand to SEQ ID NO: 583199
gauaucccaucacuacuaa

SEQ ID NO: 583201 - RNA, 19 nt, Artificial Sequence
  Description of Artificial Sequence: Synthetic oligonucleotide
  Sense strand starting at position 3440 of SEQ ID NO: 318706
ucucaaacuccugaguuag

SEQ ID NO: 583202 - RNA, 19 nt, Artificial Sequence
  Description of Artificial Sequence: Synthetic oligonucleotide
  Antisense strand to SEQ ID NO: 583201
cuaacucaggaguuugaga

SEQ ID NO: 583203 - RNA, 19 nt, Artificial Sequence
  Description of Artificial Sequence: Synthetic oligonucleotide
  Sense strand starting at position 3518 of SEQ ID NO: 318706
uggcccucguauuuguuaa

SEQ ID NO: 583204 - RNA, 19 nt, Artificial Sequence
  Description of Artificial Sequence: Synthetic oligonucleotide
  Antisense strand to SEQ ID NO: 583203
uuaacaaauacgagggcca

SEQ ID NO: 583205 - RNA, 19 nt, Artificial Sequence
  Description of Artificial Sequence: Synthetic oligonucleotide
  Sense strand starting at position 3525 of SEQ ID NO: 318706
cguauuuguuaaguaaaug

SEQ ID NO: 583206 - RNA, 19 nt, Artificial Sequence
  Description of Artificial Sequence: Synthetic oligonucleotide
  Antisense strand to SEQ ID NO: 583205
cauuuacuuaacaaauacg

SEQ ID NO: 583207 - RNA, 19 nt, Artificial Sequence
  Description of Artificial Sequence: Synthetic oligonucleotide
  Sense strand starting at position 3544 of SEQ ID NO: 318706
aagaauaaguacuuugcga

SEQ ID NO: 583208 - RNA, 19 nt, Artificial Sequence
  Description of Artificial Sequence: Synthetic oligonucleotide
  Antisense strand to SEQ ID NO: 583207
ucgcaaaguacuuauucuu

SEQ ID NO: 583209 - RNA, 19 nt, Artificial Sequence
  Description of Artificial Sequence: Synthetic oligonucleotide
  Sense strand starting at position 3546 of SEQ ID NO: 318706
gaauaaguacuuugcgaug

SEQ ID NO: 583210 - RNA, 19 nt, Artificial Sequence
  Description of Artificial Sequence: Synthetic oligonucleotide
  Antisense strand to SEQ ID NO: 583209
caucgcaaaguacuuauuc

SEQ ID NO: 583211 - RNA, 19 nt, Artificial Sequence
  Description of Artificial Sequence: Synthetic oligonucleotide
  Sense strand starting at position 3552 of SEQ ID NO: 318706
guacuuugcgauguuuguu

SEQ ID NO: 583212 - RNA, 19 nt, Artificial Sequence
  Description of Artificial Sequence: Synthetic oligonucleotide
  Antisense strand to SEQ ID NO: 583211
aacaaacaucgcaaaguac

SEQ ID NO: 583213 - RNA, 19 nt, Artificial Sequence
  Description of Artificial Sequence: Synthetic oligonucleotide
  Sense strand starting at position 3619 of SEQ ID NO: 318706
aaagucagugcuuguagga

SEQ ID NO: 583214 - RNA, 19 nt, Artificial Sequence
  Description of Artificial Sequence: Synthetic oligonucleotide
  Antisense strand to SEQ ID NO: 583213
uccuacaagcacugacuuu

SEQ ID NO: 583215 - RNA, 19 nt, Artificial Sequence
  Description of Artificial Sequence: Synthetic oligonucleotide
  Sense strand starting at position 3643 of SEQ ID NO: 318706
gagauuugguaugguacau

SEQ ID NO: 583216 - RNA, 19 nt, Artificial Sequence
  Description of Artificial Sequence: Synthetic oligonucleotide
  Antisense strand to SEQ ID NO: 583215
auguaccauaccaaaucuc

SEQ ID NO: 583217 - RNA, 19 nt, Artificial Sequence
  Description of Artificial Sequence: Synthetic oligonucleotide
  Sense strand starting at position 3647 of SEQ ID NO: 318706
uuugguaugguacauauca

SEQ ID NO: 583218 - RNA, 19 nt, Artificial Sequence
  Description of Artificial Sequence: Synthetic oligonucleotide
  Antisense strand to SEQ ID NO: 583217
ugauauguaccauaccaaa

SEQ ID NO: 583219 - RNA, 19 nt, Artificial Sequence
  Description of Artificial Sequence: Synthetic oligonucleotide
  Sense strand starting at position 3676 of SEQ ID NO: 318706
aguucauaugguggagaaa

SEQ ID NO: 583220 - RNA, 19 nt, Artificial Sequence
  Description of Artificial Sequence: Synthetic oligonucleotide
  Antisense strand to SEQ ID NO: 583219
uuucuccaccauaugaacu

SEQ ID NO: 583221 - RNA, 19 nt, Artificial Sequence
  Description of Artificial Sequence: Synthetic oligonucleotide
  Sense strand starting at position 3726 of SEQ ID NO: 318706
cuuccagcucuugaagaua

SEQ ID NO: 583222 - RNA, 19 nt, Artificial Sequence
  Description of Artificial Sequence: Synthetic oligonucleotide
  Antisense strand to SEQ ID NO: 583221
uaucuucaagagcuggaag

SEQ ID NO: 583223 - RNA, 19 nt, Artificial Sequence
  Description of Artificial Sequence: Synthetic oligonucleotide
  Sense strand starting at position 3764 of SEQ ID NO: 318706
ugugguagugcugcccaua

SEQ ID NO: 583224 - RNA, 19 nt, Artificial Sequence
  Description of Artificial Sequence: Synthetic oligonucleotide
  Antisense strand to SEQ ID NO: 583223
uaugggcagcacuaccaca

SEQ ID NO: 583225 - RNA, 19 nt, Artificial Sequence
  Description of Artificial Sequence: Synthetic oligonucleotide
  Sense strand starting at position 3774 of SEQ ID NO: 318706
cugcccauacuguaaugau

SEQ ID NO: 583226 - RNA, 19 nt, Artificial Sequence
  Description of Artificial Sequence: Synthetic oligonucleotide
  Antisense strand to SEQ ID NO: 583225
aucauuacaguaugggcag

SEQ ID NO: 583227 - RNA, 19 nt, Artificial Sequence
  Description of Artificial Sequence: Synthetic oligonucleotide
  Sense strand starting at position 3837 of SEQ ID NO: 318706
uuaucuuugguagaugcaa

SEQ ID NO: 583228 - RNA, 19 nt, Artificial Sequence
  Description of Artificial Sequence: Synthetic oligonucleotide
  Antisense strand to SEQ ID NO: 583227
uugcaucuaccaaagauaa

SEQ ID NO: 583229 - RNA, 19 nt, Artificial Sequence
  Description of Artificial Sequence: Synthetic oligonucleotide
  Sense strand starting at position 3938 of SEQ ID NO: 318706
ggucguucauucuuggaag

SEQ ID NO: 583230 - RNA, 19 nt, Artificial Sequence
  Description of Artificial Sequence: Synthetic oligonucleotide
  Antisense strand to SEQ ID NO: 583229
cuuccaagaaugaacgacc

SEQ ID NO: 583231 - RNA, 19 nt, Artificial Sequence
  Description of Artificial Sequence: Synthetic oligonucleotide
  Sense strand starting at position 571 of SEQ ID NO: 318707
gagaauagcucagggaaac

SEQ ID NO: 583232 - RNA, 19 nt, Artificial Sequence
  Description of Artificial Sequence: Synthetic oligonucleotide
  Antisense strand to SEQ ID NO: 583231
guuucccugagcuauucuc

SEQ ID NO: 583233 - RNA, 19 nt, Artificial Sequence
  Description of Artificial Sequence: Synthetic oligonucleotide
  Sense strand starting at position 1146 of SEQ ID NO: 318707
gcugucccuccugacagau

SEQ ID NO: 583234 - RNA, 19 nt, Artificial Sequence
  Description of Artificial Sequence: Synthetic oligonucleotide
  Antisense strand to SEQ ID NO: 583233
aucugucaggagggacagc

SEQ ID NO: 583235 - RNA, 19 nt, Artificial Sequence
  Description of Artificial Sequence: Synthetic oligonucleotide
  Sense strand starting at position 1394 of SEQ ID NO: 318707
ccacguaggcaauguauuu

SEQ ID NO: 583236 - RNA, 19 nt, Artificial Sequence
  Description of Artificial Sequence: Synthetic oligonucleotide
  Antisense strand to SEQ ID NO: 583235
aaauacauugccuacgugg

SEQ ID NO: 583237 - RNA, 19 nt, Artificial Sequence
  Description of Artificial Sequence: Synthetic oligonucleotide
  Sense strand starting at position 1404 of SEQ ID NO: 318707
aauguauuuccacgcguga

SEQ ID NO: 583238 - RNA, 19 nt, Artificial Sequence
  Description of Artificial Sequence: Synthetic oligonucleotide
  Antisense strand to SEQ ID NO: 583237
ucacgcguggaaauacauu

SEQ ID NO: 583239 - RNA, 19 nt, Artificial Sequence
  Description of Artificial Sequence: Synthetic oligonucleotide
  Sense strand starting at position 1433 of SEQ ID NO: 318707
gaaugaagaucccgaaggu

SEQ ID NO: 583240 - RNA, 19 nt, Artificial Sequence
  Description of Artificial Sequence: Synthetic oligonucleotide
  Antisense strand to SEQ ID NO: 583239
accuucgggaucuucauuc

SEQ ID NO: 583241 - RNA, 19 nt, Artificial Sequence
  Description of Artificial Sequence: Synthetic oligonucleotide
  Sense strand starting at position 1932 of SEQ ID NO: 318707
gaggauuuguuacguucug

SEQ ID NO: 583242 - RNA, 19 nt, Artificial Sequence
  Description of Artificial Sequence: Synthetic oligonucleotide
  Antisense strand to SEQ ID NO: 583241
cagaacguaacaaauccuc

SEQ ID NO: 583243 - RNA, 19 nt, Artificial Sequence
  Description of Artificial Sequence: Synthetic oligonucleotide
  Sense strand starting at position 2074 of SEQ ID NO: 318707
gagggcugcgccugugaga

SEQ ID NO: 583244 - RNA, 19 nt, Artificial Sequence
  Description of Artificial Sequence: Synthetic oligonucleotide
  Antisense strand to SEQ ID NO: 583243
ucucacaggcgcagcccuc

SEQ ID NO: 583245 - RNA, 19 nt, Artificial Sequence
  Description of Artificial Sequence: Synthetic oligonucleotide
  Sense strand starting at position 2114 of SEQ ID NO: 318707
gcucgugagccguuacuca

SEQ ID NO: 583246 - RNA, 19 nt, Artificial Sequence
  Description of Artificial Sequence: Synthetic oligonucleotide
  Antisense strand to SEQ ID NO: 583245
ugaguaacggcucacgagc

SEQ ID NO: 583247 - RNA, 19 nt, Artificial Sequence
  Description of Artificial Sequence: Synthetic oligonucleotide
  Sense strand starting at position 2122 of SEQ ID NO: 318707
gccguuacucacuggugca

SEQ ID NO: 583248 - RNA, 19 nt, Artificial Sequence
  Description of Artificial Sequence: Synthetic oligonucleotide
  Antisense strand to SEQ ID NO: 583247
ugcaccagugaguaacggc

SEQ ID NO: 583249 - RNA, 19 nt, Artificial Sequence
  Description of Artificial Sequence: Synthetic oligonucleotide
  Sense strand starting at position 2123 of SEQ ID NO: 318707
ccguuacucacuggugcaa

SEQ ID NO: 583250 - RNA, 19 nt, Artificial Sequence
  Description of Artificial Sequence: Synthetic oligonucleotide
  Antisense strand to SEQ ID NO: 583249
uugcaccagugaguaacgg

SEQ ID NO: 583251 - RNA, 19 nt, Artificial Sequence
  Description of Artificial Sequence: Synthetic oligonucleotide
  Sense strand starting at position 2125 of SEQ ID NO: 318707
guuacucacuggugcaaca

SEQ ID NO: 583252 - RNA, 19 nt, Artificial Sequence
  Description of Artificial Sequence: Synthetic oligonucleotide
  Antisense strand to SEQ ID NO: 583251
uguugcaccagugaguaac

SEQ ID NO: 583253 - RNA, 19 nt, Artificial Sequence
  Description of Artificial Sequence: Synthetic oligonucleotide
  Sense strand starting at position 2176 of SEQ ID NO: 318707
cucugagcuucccagagga

SEQ ID NO: 583254 - RNA, 19 nt, Artificial Sequence
  Description of Artificial Sequence: Synthetic oligonucleotide
  Antisense strand to SEQ ID NO: 583253
uccucugggaagcucagag

SEQ ID NO: 583255 - RNA, 19 nt, Artificial Sequence
  Description of Artificial Sequence: Synthetic oligonucleotide
  Sense strand starting at position 2473 of SEQ ID NO: 318707
gaagcuucgccacguuaug

SEQ ID NO: 583256 - RNA, 19 nt, Artificial Sequence
  Description of Artificial Sequence: Synthetic oligonucleotide
  Antisense strand to SEQ ID NO: 583255
cauaacguggcgaagcuuc

SEQ ID NO: 583257 - RNA, 19 nt, Artificial Sequence
  Description of Artificial Sequence: Synthetic oligonucleotide
  Sense strand starting at position 2482 of SEQ ID NO: 318707
ccacguuaugccucgcuca

SEQ ID NO: 583258 - RNA, 19 nt, Artificial Sequence
  Description of Artificial Sequence: Synthetic oligonucleotide
  Antisense strand to SEQ ID NO: 583257
ugagcgaggcauaacgugg

SEQ ID NO: 583259 - RNA, 19 nt, Artificial Sequence
  Description of Artificial Sequence: Synthetic oligonucleotide
  Sense strand starting at position 2483 of SEQ ID NO: 318707
cacguuaugccucgcucaa

SEQ ID NO: 583260 - RNA, 19 nt, Artificial Sequence
  Description of Artificial Sequence: Synthetic oligonucleotide
  Antisense strand to SEQ ID NO: 583259
uugagcgaggcauaacgug

SEQ ID NO: 583261 - RNA, 19 nt, Artificial Sequence
  Description of Artificial Sequence: Synthetic oligonucleotide
  Sense strand starting at position 2484 of SEQ ID NO: 318707
acguuaugccucgcucaaa

SEQ ID NO: 583262 - RNA, 19 nt, Artificial Sequence
  Description of Artificial Sequence: Synthetic oligonucleotide
  Antisense strand to SEQ ID NO: 583261
uuugagcgaggcauaacgu

SEQ ID NO: 583263 - RNA, 19 nt, Artificial Sequence
  Description of Artificial Sequence: Synthetic oligonucleotide
  Sense strand starting at position 2485 of SEQ ID NO: 318707
cguuaugccucgcucaaag

SEQ ID NO: 583264 - RNA, 19 nt, Artificial Sequence
  Description of Artificial Sequence: Synthetic oligonucleotide
  Antisense strand to SEQ ID NO: 583263
cuuugagcgaggcauaacg

SEQ ID NO: 583265 - RNA, 19 nt, Artificial Sequence
  Description of Artificial Sequence: Synthetic oligonucleotide
  Sense strand starting at position 2506 of SEQ ID NO: 318707
cuuguugucucuuugggaa

SEQ ID NO: 583266 - RNA, 19 nt, Artificial Sequence
  Description of Artificial Sequence: Synthetic oligonucleotide
  Antisense strand to SEQ ID NO: 583265
uucccaaagagacaacaag

SEQ ID NO: 583267 - RNA, 19 nt, Artificial Sequence
  Description of Artificial Sequence: Synthetic oligonucleotide
  Sense strand starting at position 2555 of SEQ ID NO: 318707
auguauuucuuugagaaga

SEQ ID NO: 583268 - RNA, 19 nt, Artificial Sequence
  Description of Artificial Sequence: Synthetic oligonucleotide
  Antisense strand to SEQ ID NO: 583267
ucuucucaaagaaauacau

SEQ ID NO: 583269 - RNA, 19 nt, Artificial Sequence
  Description of Artificial Sequence: Synthetic oligonucleotide
  Sense strand starting at position 2557 of SEQ ID NO: 318707
guauuucuuugagaagaga

SEQ ID NO: 583270 - RNA, 19 nt, Artificial Sequence
  Description of Artificial Sequence: Synthetic oligonucleotide
  Antisense strand to SEQ ID NO: 583269
ucucuucucaaagaaauac

SEQ ID NO: 583271 - RNA, 19 nt, Artificial Sequence
  Description of Artificial Sequence: Synthetic oligonucleotide
  Sense strand starting at position 2572 of SEQ ID NO: 318707
gagagacauugagaaauag

SEQ ID NO: 583272 - RNA, 19 nt, Artificial Sequence
  Description of Artificial Sequence: Synthetic oligonucleotide
  Antisense strand to SEQ ID NO: 583271
cuauuucucaaugucucuc

SEQ ID NO: 583273 - RNA, 19 nt, Artificial Sequence
  Description of Artificial Sequence: Synthetic oligonucleotide
  Sense strand starting at position 2602 of SEQ ID NO: 318707
ucguucuugcagucgugaa

SEQ ID NO: 583274 - RNA, 19 nt, Artificial Sequence
  Description of Artificial Sequence: Synthetic oligonucleotide
  Antisense strand to SEQ ID NO: 583273
uucacgacugcaagaacga

SEQ ID NO: 583275 - RNA, 19 nt, Artificial Sequence
  Description of Artificial Sequence: Synthetic oligonucleotide
  Sense strand starting at position 2603 of SEQ ID NO: 318707
cguucuugcagucgugaac

SEQ ID NO: 583276 - RNA, 19 nt, Artificial Sequence
  Description of Artificial Sequence: Synthetic oligonucleotide
  Antisense strand to SEQ ID NO: 583275
guucacgacugcaagaacg

SEQ ID NO: 583277 - RNA, 19 nt, Artificial Sequence
  Description of Artificial Sequence: Synthetic oligonucleotide
  Sense strand starting at position 2615 of SEQ ID NO: 318707
cgugaacguccaugauaca

SEQ ID NO: 583278 - RNA, 19 nt, Artificial Sequence
  Description of Artificial Sequence: Synthetic oligonucleotide
  Antisense strand to SEQ ID NO: 583277
uguaucauggacguucacg

SEQ ID NO: 583279 - RNA, 19 nt, Artificial Sequence
  Description of Artificial Sequence: Synthetic oligonucleotide
  Sense strand starting at position 2714 of SEQ ID NO: 318707
gggcuugagucacacaaga

SEQ ID NO: 583280 - RNA, 19 nt, Artificial Sequence
  Description of Artificial Sequence: Synthetic oligonucleotide
  Antisense strand to SEQ ID NO: 583279
ucuugugugacucaagccc

SEQ ID NO: 583281 - RNA, 19 nt, Artificial Sequence
  Description of Artificial Sequence: Synthetic oligonucleotide
  Sense strand starting at position 2729 of SEQ ID NO: 318707
aagaaugucucugggagac

SEQ ID NO: 583282 - RNA, 19 nt, Artificial Sequence
  Description of Artificial Sequence: Synthetic oligonucleotide
  Antisense strand to SEQ ID NO: 583281
gucucccagagacauucuu

SEQ ID NO: 583283 - RNA, 19 nt, Artificial Sequence
  Description of Artificial Sequence: Synthetic oligonucleotide
  Sense strand starting at position 2748 of SEQ ID NO: 318707
ccgagagacucacaguuau

SEQ ID NO: 583284 - RNA, 19 nt, Artificial Sequence
  Description of Artificial Sequence: Synthetic oligonucleotide
  Antisense strand to SEQ ID NO: 583283
auaacugugagucucucgg

SEQ ID NO: 583285 - RNA, 19 nt, Artificial Sequence
  Description of Artificial Sequence: Synthetic oligonucleotide
  Sense strand starting at position 3096 of SEQ ID NO: 318707
agucaaaguuaccaaggaa

SEQ ID NO: 583286 - RNA, 19 nt, Artificial Sequence
  Description of Artificial Sequence: Synthetic oligonucleotide
  Antisense strand to SEQ ID NO: 583285
uuccuugguaacuuugacu

SEQ ID NO: 583287 - RNA, 19 nt, Artificial Sequence
  Description of Artificial Sequence: Synthetic oligonucleotide
  Sense strand starting at position 3204 of SEQ ID NO: 318707
aaaugaugucgccaaguca

SEQ ID NO: 583288 - RNA, 19 nt, Artificial Sequence
  Description of Artificial Sequence: Synthetic oligonucleotide
  Antisense strand to SEQ ID NO: 583287
ugacuuggcgacaucauuu

SEQ ID NO: 583289 - RNA, 19 nt, Artificial Sequence
  Description of Artificial Sequence: Synthetic oligonucleotide
  Sense strand starting at position 3356 of SEQ ID NO: 318707
agguggagagucugugaga

SEQ ID NO: 583290 - RNA, 19 nt, Artificial Sequence
  Description of Artificial Sequence: Synthetic oligonucleotide
  Antisense strand to SEQ ID NO: 583289
ucucacagacucuccaccu

SEQ ID NO: 583291 - RNA, 19 nt, Artificial Sequence
  Description of Artificial Sequence: Synthetic oligonucleotide
  Sense strand starting at position 3358 of SEQ ID NO: 318707
guggagagucugugagaga

SEQ ID NO: 583292 - RNA, 19 nt, Artificial Sequence
  Description of Artificial Sequence: Synthetic oligonucleotide
  Antisense strand to SEQ ID NO: 583291
ucucucacagacucuccac

SEQ ID NO: 583293 - RNA, 19 nt, Artificial Sequence
  Description of Artificial Sequence: Synthetic oligonucleotide
  Sense strand starting at position 3391 of SEQ ID NO: 318707
gaagaacuuugagaagacu

SEQ ID NO: 583294 - RNA, 19 nt, Artificial Sequence
  Description of Artificial Sequence: Synthetic oligonucleotide
  Antisense strand to SEQ ID NO: 583293
agucuucucaaaguucuuc

SEQ ID NO: 583295 - RNA, 19 nt, Artificial Sequence
  Description of Artificial Sequence: Synthetic oligonucleotide
  Sense strand starting at position 66 of SEQ ID NO: 318708
ccagauacauuguugacca

SEQ ID NO: 583296 - RNA, 19 nt, Artificial Sequence
  Description of Artificial Sequence: Synthetic oligonucleotide
  Antisense strand to SEQ ID NO: 583295
uggucaacaauguaucugg

SEQ ID NO: 583297 - RNA, 19 nt, Artificial Sequence
  Description of Artificial Sequence: Synthetic oligonucleotide
  Sense strand starting at position 120 of SEQ ID NO: 318708
gguggauacagcuguaaau

SEQ ID NO: 583298 - RNA, 19 nt, Artificial Sequence
  Description of Artificial Sequence: Synthetic oligonucleotide
  Antisense strand to SEQ ID NO: 583297
auuuacagcuguauccacc

SEQ ID NO: 583299 - RNA, 19 nt, Artificial Sequence
  Description of Artificial Sequence: Synthetic oligonucleotide
  Sense strand starting at position 144 of SEQ ID NO: 318708
agauaaacucuccgcaauc

SEQ ID NO: 583300 - RNA, 19 nt, Artificial Sequence
  Description of Artificial Sequence: Synthetic oligonucleotide
  Antisense strand to SEQ ID NO: 583299
gauugcggagaguuuaucu

SEQ ID NO: 583301 - RNA, 19 nt, Artificial Sequence
  Description of Artificial Sequence: Synthetic oligonucleotide
  Sense strand starting at position 154 of SEQ ID NO: 318708
uccgcaaucauggauguua

SEQ ID NO: 583302 - RNA, 19 nt, Artificial Sequence
  Description of Artificial Sequence: Synthetic oligonucleotide
  Antisense strand to SEQ ID NO: 583301
uaacauccaugauugcgga

SEQ ID NO: 583303 - RNA, 19 nt, Artificial Sequence
  Description of Artificial Sequence: Synthetic oligonucleotide
  Sense strand starting at position 156 of SEQ ID NO: 318708
cgcaaucauggauguuaua

SEQ ID NO: 583304 - RNA, 19 nt, Artificial Sequence
  Description of Artificial Sequence: Synthetic oligonucleotide
  Antisense strand to SEQ ID NO: 583303
uauaacauccaugauugcg

SEQ ID NO: 583305 - RNA, 19 nt, Artificial Sequence
  Description of Artificial Sequence: Synthetic oligonucleotide
  Sense strand starting at position 165 of SEQ ID NO: 318708
ggauguuauagccgaacag

SEQ ID NO: 583306 - RNA, 19 nt, Artificial Sequence
  Description of Artificial Sequence: Synthetic oligonucleotide
  Antisense strand to SEQ ID NO: 583305
cuguucggcuauaacaucc

SEQ ID NO: 583307 - RNA, 19 nt, Artificial Sequence
  Description of Artificial Sequence: Synthetic oligonucleotide
  Sense strand starting at position 336 of SEQ ID NO: 318708
guaacaaaggcuuaccauu

SEQ ID NO: 583308 - RNA, 19 nt, Artificial Sequence
  Description of Artificial Sequence: Synthetic oligonucleotide
  Antisense strand to SEQ ID NO: 583307
aaugguaagccuuuguuac

SEQ ID NO: 583309 - RNA, 19 nt, Artificial Sequence
  Description of Artificial Sequence: Synthetic oligonucleotide
  Sense strand starting at position 414 of SEQ ID NO: 318708
uuguaaucucgugggacag

SEQ ID NO: 583310 - RNA, 19 nt, Artificial Sequence
  Description of Artificial Sequence: Synthetic oligonucleotide
  Antisense strand to SEQ ID NO: 583309
cugucccacgagauuacaa

SEQ ID NO: 583311 - RNA, 19 nt, Artificial Sequence
  Description of Artificial Sequence: Synthetic oligonucleotide
  Sense strand starting at position 415 of SEQ ID NO: 318708
uguaaucucgugggacaga

SEQ ID NO: 583312 - RNA, 19 nt, Artificial Sequence
  Description of Artificial Sequence: Synthetic oligonucleotide
  Antisense strand to SEQ ID NO: 583311
ucugucccacgagauuaca

SEQ ID NO: 583313 - RNA, 19 nt, Artificial Sequence
  Description of Artificial Sequence: Synthetic oligonucleotide
  Sense strand starting at position 436 of SEQ ID NO: 318708
gcuucucugccagugaugu

SEQ ID NO: 583314 - RNA, 19 nt, Artificial Sequence
  Description of Artificial Sequence: Synthetic oligonucleotide
  Antisense strand to SEQ ID NO: 583313
acaucacuggcagagaagc

SEQ ID NO: 583315 - RNA, 19 nt, Artificial Sequence
  Description of Artificial Sequence: Synthetic oligonucleotide
  Sense strand starting at position 523 of SEQ ID NO: 318708
caggaaacaugcuuaugua

SEQ ID NO: 583316 - RNA, 19 nt, Artificial Sequence
  Description of Artificial Sequence: Synthetic oligonucleotide
  Antisense strand to SEQ ID NO: 583315
uacauaagcauguuuccug

SEQ ID NO: 583317 - RNA, 19 nt, Artificial Sequence
  Description of Artificial Sequence: Synthetic oligonucleotide
  Sense strand starting at position 524 of SEQ ID NO: 318708
aggaaacaugcuuauguau

SEQ ID NO: 583318 - RNA, 19 nt, Artificial Sequence
  Description of Artificial Sequence: Synthetic oligonucleotide
  Antisense strand to SEQ ID NO: 583317
auacauaagcauguuuccu

SEQ ID NO: 583319 - RNA, 19 nt, Artificial Sequence
  Description of Artificial Sequence: Synthetic oligonucleotide
  Sense strand starting at position 564 of SEQ ID NO: 318708
aaaugcaaacugcgugaaa

SEQ ID NO: 583320 - RNA, 19 nt, Artificial Sequence
  Description of Artificial Sequence: Synthetic oligonucleotide
  Antisense strand to SEQ ID NO: 583319
uuucacgcaguuugcauuu

SEQ ID NO: 583321 - RNA, 19 nt, Artificial Sequence
  Description of Artificial Sequence: Synthetic oligonucleotide
  Sense strand starting at position 664 of SEQ ID NO: 318708
acaguugguguggguaaau

SEQ ID NO: 583322 - RNA, 19 nt, Artificial Sequence
  Description of Artificial Sequence: Synthetic oligonucleotide
  Antisense strand to SEQ ID NO: 583321
auuuacccacaccaacugu

SEQ ID NO: 583323 - RNA, 19 nt, Artificial Sequence
  Description of Artificial Sequence: Synthetic oligonucleotide
  Sense strand starting at position 686 of SEQ ID NO: 318708
gcacucuuacacugcaagu

SEQ ID NO: 583324 - RNA, 19 nt, Artificial Sequence
  Description of Artificial Sequence: Synthetic oligonucleotide
  Antisense strand to SEQ ID NO: 583323
acuugcaguguaagagugc

SEQ ID NO: 583325 - RNA, 19 nt, Artificial Sequence
  Description of Artificial Sequence: Synthetic oligonucleotide
  Sense strand starting at position 696 of SEQ ID NO: 318708
acugcaaguguuuauauaa

SEQ ID NO: 583326 - RNA, 19 nt, Artificial Sequence
  Description of Artificial Sequence: Synthetic oligonucleotide
  Antisense strand to SEQ ID NO: 583325
uuauauaaacacuugcagu

SEQ ID NO: 583327 - RNA, 19 nt, Artificial Sequence
  Description of Artificial Sequence: Synthetic oligonucleotide
  Sense strand starting at position 822 of SEQ ID NO: 318708
agauguauguagccagaug

SEQ ID NO: 583328 - RNA, 19 nt, Artificial Sequence
  Description of Artificial Sequence: Synthetic oligonucleotide
  Antisense strand to SEQ ID NO: 583327
caucuggcuacauacaucu

SEQ ID NO: 583329 - RNA, 19 nt, Artificial Sequence
  Description of Artificial Sequence: Synthetic oligonucleotide
  Sense strand starting at position 840 of SEQ ID NO: 318708
ggccuauacuguuuauaau

SEQ ID NO: 583330 - RNA, 19 nt, Artificial Sequence
  Description of Artificial Sequence: Synthetic oligonucleotide
  Antisense strand to SEQ ID NO: 583329
auuauaaacaguauaggcc

SEQ ID NO: 583331 - RNA, 19 nt, Artificial Sequence
  Description of Artificial Sequence: Synthetic oligonucleotide
  Sense strand starting at position 1017 of SEQ ID NO: 318708
ucagauguauucucuaucu

SEQ ID NO: 583332 - RNA, 19 nt, Artificial Sequence
  Description of Artificial Sequence: Synthetic oligonucleotide
  Antisense strand to SEQ ID NO: 583331
agauagagaauacaucuga

SEQ ID NO: 583333 - RNA, 19 nt, Artificial Sequence
  Description of Artificial Sequence: Synthetic oligonucleotide
  Sense strand starting at position 1019 of SEQ ID NO: 318708
agauguauucucuaucuuc

SEQ ID NO: 583334 - RNA, 19 nt, Artificial Sequence
  Description of Artificial Sequence: Synthetic oligonucleotide
  Antisense strand to SEQ ID NO: 583333
gaagauagagaauacaucu

SEQ ID NO: 583335 - RNA, 19 nt, Artificial Sequence
  Description of Artificial Sequence: Synthetic oligonucleotide
  Sense strand starting at position 1041 of SEQ ID NO: 318708
ggguguuuaggccaguaaa

SEQ ID NO: 583336 - RNA, 19 nt, Artificial Sequence
  Description of Artificial Sequence: Synthetic oligonucleotide
  Antisense strand to SEQ ID NO: 583335
uuuacuggccuaaacaccc

SEQ ID NO: 583337 - RNA, 19 nt, Artificial Sequence
  Description of Artificial Sequence: Synthetic oligonucleotide
  Sense strand starting at position 1069 of SEQ ID NO: 318708
ggcuuaagauuugugcacu

SEQ ID NO: 583338 - RNA, 19 nt, Artificial Sequence
  Description of Artificial Sequence: Synthetic oligonucleotide
  Antisense strand to SEQ ID NO: 583337
agugcacaaaucuuaagcc

SEQ ID NO: 583339 - RNA, 19 nt, Artificial Sequence
  Description of Artificial Sequence: Synthetic oligonucleotide
  Sense strand starting at position 1187 of SEQ ID NO: 318708
guguuucuaugcuuauaca

SEQ ID NO: 583340 - RNA, 19 nt, Artificial Sequence
  Description of Artificial Sequence: Synthetic oligonucleotide
  Antisense strand to SEQ ID NO: 583339
uguauaagcauagaaacac

SEQ ID NO: 583341 - RNA, 19 nt, Artificial Sequence
  Description of Artificial Sequence: Synthetic oligonucleotide
  Sense strand starting at position 1280 of SEQ ID NO: 318708
agugaaaucgcuuaaggaa

SEQ ID NO: 583342 - RNA, 19 nt, Artificial Sequence
  Description of Artificial Sequence: Synthetic oligonucleotide
  Antisense strand to SEQ ID NO: 583341
uuccuuaagcgauuucacu

SEQ ID NO: 583343 - RNA, 19 nt, Artificial Sequence
  Description of Artificial Sequence: Synthetic oligonucleotide
  Sense strand starting at position 1384 of SEQ ID NO: 318708
gcgcucucggaaugagauc

SEQ ID NO: 583344 - RNA, 19 nt, Artificial Sequence
  Description of Artificial Sequence: Synthetic oligonucleotide
  Antisense strand to SEQ ID NO: 583343
gaucucauuccgagagcgc

SEQ ID NO: 583345 - RNA, 19 nt, Artificial Sequence
  Description of Artificial Sequence: Synthetic oligonucleotide
  Sense strand starting at position 2463 of SEQ ID NO: 318708
agagcaagagagugucuua

SEQ ID NO: 583346 - RNA, 19 nt, Artificial Sequence
  Description of Artificial Sequence: Synthetic oligonucleotide
  Antisense strand to SEQ ID NO: 583345
uaagacacucucuugcucu

SEQ ID NO: 583347 - RNA, 19 nt, Artificial Sequence
  Description of Artificial Sequence: Synthetic oligonucleotide
  Sense strand starting at position 2910 of SEQ ID NO: 318708
aucucauacuagucuguaa

SEQ ID NO: 583348 - RNA, 19 nt, Artificial Sequence
  Description of Artificial Sequence: Synthetic oligonucleotide
  Antisense strand to SEQ ID NO: 583347
uuacagacuaguaugagau

SEQ ID NO: 583349 - RNA, 19 nt, Artificial Sequence
  Description of Artificial Sequence: Synthetic oligonucleotide
  Sense strand starting at position 2912 of SEQ ID NO: 318708
cucauacuagucuguaaag

SEQ ID NO: 583350 - RNA, 19 nt, Artificial Sequence
  Description of Artificial Sequence: Synthetic oligonucleotide
  Antisense strand to SEQ ID NO: 583349
cuuuacagacuaguaugag

SEQ ID NO: 583351 - RNA, 19 nt, Artificial Sequence
  Description of Artificial Sequence: Synthetic oligonucleotide
  Sense strand starting at position 2913 of SEQ ID NO: 318708
ucauacuagucuguaaagu

SEQ ID NO: 583352 - RNA, 19 nt, Artificial Sequence
  Description of Artificial Sequence: Synthetic oligonucleotide
  Antisense strand to SEQ ID NO: 583351
acuuuacagacuaguauga

SEQ ID NO: 583353 - RNA, 19 nt, Artificial Sequence
  Description of Artificial Sequence: Synthetic oligonucleotide
  Sense strand starting at position 3270 of SEQ ID NO: 318708
ggaagaauuuccuaacguc

SEQ ID NO: 583354 - RNA, 19 nt, Artificial Sequence
  Description of Artificial Sequence: Synthetic oligonucleotide
  Antisense strand to SEQ ID NO: 583353
gacguuaggaaauucuucc

SEQ ID NO: 583355 - RNA, 19 nt, Artificial Sequence
  Description of Artificial Sequence: Synthetic oligonucleotide
  Sense strand starting at position 3306 of SEQ ID NO: 318708
agauucucaugugagauuu

SEQ ID NO: 583356 - RNA, 19 nt, Artificial Sequence
  Description of Artificial Sequence: Synthetic oligonucleotide
  Antisense strand to SEQ ID NO: 583355
aaaucucacaugagaaucu

SEQ ID NO: 583357 - RNA, 19 nt, Artificial Sequence
  Description of Artificial Sequence: Synthetic oligonucleotide
  Sense strand starting at position 3340 of SEQ ID NO: 318708
ggaggaaaguaacaucuuu

SEQ ID NO: 583358 - RNA, 19 nt, Artificial Sequence
  Description of Artificial Sequence: Synthetic oligonucleotide
  Antisense strand to SEQ ID NO: 583357
aaagauguuacuuuccucc

SEQ ID NO: 583359 - RNA, 19 nt, Artificial Sequence
  Description of Artificial Sequence: Synthetic oligonucleotide
  Sense strand starting at position 3348 of SEQ ID NO: 318708
guaacaucuuuauugcuga

SEQ ID NO: 583360 - RNA, 19 nt, Artificial Sequence
  Description of Artificial Sequence: Synthetic oligonucleotide
  Antisense strand to SEQ ID NO: 583359
ucagcaauaaagauguuac

SEQ ID NO: 583361 - RNA, 19 nt, Artificial Sequence
  Description of Artificial Sequence: Synthetic oligonucleotide
  Sense strand starting at position 3351 of SEQ ID NO: 318708
acaucuuuauugcugaaga

SEQ ID NO: 583362 - RNA, 19 nt, Artificial Sequence
  Description of Artificial Sequence: Synthetic oligonucleotide
  Antisense strand to SEQ ID NO: 583361
ucuucagcaauaaagaugu

SEQ ID NO: 583363 - RNA, 19 nt, Artificial Sequence
  Description of Artificial Sequence: Synthetic oligonucleotide
  Sense strand starting at position 3353 of SEQ ID NO: 318708
aucuuuauugcugaagaca

SEQ ID NO: 583364 - RNA, 19 nt, Artificial Sequence
  Description of Artificial Sequence: Synthetic oligonucleotide
  Antisense strand to SEQ ID NO: 583363
ugucuucagcaauaaagau

SEQ ID NO: 583365 - RNA, 19 nt, Artificial Sequence
  Description of Artificial Sequence: Synthetic oligonucleotide
  Sense strand starting at position 3540 of SEQ ID NO: 318708
uaggcugcugugucaugua

SEQ ID NO: 583366 - RNA, 19 nt, Artificial Sequence
  Description of Artificial Sequence: Synthetic oligonucleotide
  Antisense strand to SEQ ID NO: 583365
uacaugacacagcagccua

SEQ ID NO: 583367 - RNA, 19 nt, Artificial Sequence
  Description of Artificial Sequence: Synthetic oligonucleotide
  Sense strand starting at position 3685 of SEQ ID NO: 318708
aauguaacagauuguuuga

SEQ ID NO: 583368 - RNA, 19 nt, Artificial Sequence
  Description of Artificial Sequence: Synthetic oligonucleotide
  Antisense strand to SEQ ID NO: 583367
ucaaacaaucuguuacauu

SEQ ID NO: 583369 - RNA, 19 nt, Artificial Sequence
  Description of Artificial Sequence: Synthetic oligonucleotide
  Sense strand starting at position 3687 of SEQ ID NO: 318708
uguaacagauuguuugaaa

SEQ ID NO: 583370 - RNA, 19 nt, Artificial Sequence
  Description of Artificial Sequence: Synthetic oligonucleotide
  Antisense strand to SEQ ID NO: 583369
uuucaaacaaucuguuaca

SEQ ID NO: 583371 - RNA, 19 nt, Artificial Sequence
  Description of Artificial Sequence: Synthetic oligonucleotide
  Sense strand starting at position 3765 of SEQ ID NO: 318708
cuuggaaacggauguuauu

SEQ ID NO: 583372 - RNA, 19 nt, Artificial Sequence
  Description of Artificial Sequence: Synthetic oligonucleotide
  Antisense strand to SEQ ID NO: 583371
aauaacauccguuuccaag

SEQ ID NO: 583373 - RNA, 19 nt, Artificial Sequence
  Description of Artificial Sequence: Synthetic oligonucleotide
  Sense strand starting at position 3811 of SEQ ID NO: 318708
aucccagagagcuguaaga

SEQ ID NO: 583374 - RNA, 19 nt, Artificial Sequence
  Description of Artificial Sequence: Synthetic oligonucleotide
  Antisense strand to SEQ ID NO: 583373
ucuuacagcucucugggau

SEQ ID NO: 583375 - RNA, 19 nt, Artificial Sequence
  Description of Artificial Sequence: Synthetic oligonucleotide
  Sense strand starting at position 111 of SEQ ID NO: 318709
agagaagugauaugcagau

SEQ ID NO: 583376 - RNA, 19 nt, Artificial Sequence
  Description of Artificial Sequence: Synthetic oligonucleotide
  Antisense strand to SEQ ID NO: 583375
aucugcauaucacuucucu

SEQ ID NO: 583377 - RNA, 19 nt, Artificial Sequence
  Description of Artificial Sequence: Synthetic oligonucleotide
  Sense strand starting at position 117 of SEQ ID NO: 318709
gugauaugcagaugagaag

SEQ ID NO: 583378 - RNA, 19 nt, Artificial Sequence
  Description of Artificial Sequence: Synthetic oligonucleotide
  Antisense strand to SEQ ID NO: 583377
cuucucaucugcauaucac

SEQ ID NO: 583379 - RNA, 19 nt, Artificial Sequence
  Description of Artificial Sequence: Synthetic oligonucleotide
  Sense strand starting at position 133 of SEQ ID NO: 318709
aagagaauaugguuugugu

SEQ ID NO: 583380 - RNA, 19 nt, Artificial Sequence
  Description of Artificial Sequence: Synthetic oligonucleotide
  Antisense strand to SEQ ID NO: 583379
acacaaaccauauucucuu

SEQ ID NO: 583381 - RNA, 19 nt, Artificial Sequence
  Description of Artificial Sequence: Synthetic oligonucleotide
  Sense strand starting at position 161 of SEQ ID NO: 318709
uguugcauuugucuuauga

SEQ ID NO: 583382 - RNA, 19 nt, Artificial Sequence
  Description of Artificial Sequence: Synthetic oligonucleotide
  Antisense strand to SEQ ID NO: 583381
ucauaagacaaaugcaaca

SEQ ID NO: 583383 - RNA, 19 nt, Artificial Sequence
  Description of Artificial Sequence: Synthetic oligonucleotide
  Sense strand starting at position 187 of SEQ ID NO: 318709
gaauguauaugauuaacgu

SEQ ID NO: 583384 - RNA, 19 nt, Artificial Sequence
  Description of Artificial Sequence: Synthetic oligonucleotide
  Antisense strand to SEQ ID NO: 583383
acguuaaucauauacauuc

SEQ ID NO: 583385 - RNA, 19 nt, Artificial Sequence
  Description of Artificial Sequence: Synthetic oligonucleotide
  Sense strand starting at position 211 of SEQ ID NO: 318709
gguucuauugcuuaaauau

SEQ ID NO: 583386 - RNA, 19 nt, Artificial Sequence
  Description of Artificial Sequence: Synthetic oligonucleotide
  Antisense strand to SEQ ID NO: 583385
auauuuaagcaauagaacc

SEQ ID NO: 583387 - RNA, 19 nt, Artificial Sequence
  Description of Artificial Sequence: Synthetic oligonucleotide
  Sense strand starting at position 306 of SEQ ID NO: 318709
agagauuucuaguugucgu

SEQ ID NO: 583388 - RNA, 19 nt, Artificial Sequence
  Description of Artificial Sequence: Synthetic oligonucleotide
  Antisense strand to SEQ ID NO: 583387
acgacaacuagaaaucucu

SEQ ID NO: 583389 - RNA, 19 nt, Artificial Sequence
  Description of Artificial Sequence: Synthetic oligonucleotide
  Sense strand starting at position 307 of SEQ ID NO: 318709
gagauuucuaguugucgua

SEQ ID NO: 583390 - RNA, 19 nt, Artificial Sequence
  Description of Artificial Sequence: Synthetic oligonucleotide
  Antisense strand to SEQ ID NO: 583389
uacgacaacuagaaaucuc

SEQ ID NO: 583391 - RNA, 19 nt, Artificial Sequence
  Description of Artificial Sequence: Synthetic oligonucleotide
  Sense strand starting at position 337 of SEQ ID NO: 318709
gagcaaaggcgauacuaaa

SEQ ID NO: 583392 - RNA, 19 nt, Artificial Sequence
  Description of Artificial Sequence: Synthetic oligonucleotide
  Antisense strand to SEQ ID NO: 583391
uuuaguaucgccuuugcuc

SEQ ID NO: 583393 - RNA, 19 nt, Artificial Sequence
  Description of Artificial Sequence: Synthetic oligonucleotide
  Sense strand starting at position 465 of SEQ ID NO: 318709
ggaagaacuacuuacgucu

SEQ ID NO: 583394 - RNA, 19 nt, Artificial Sequence
  Description of Artificial Sequence: Synthetic oligonucleotide
  Antisense strand to SEQ ID NO: 583393
agacguaaguaguucuucc

SEQ ID NO: 583395 - RNA, 19 nt, Artificial Sequence
  Description of Artificial Sequence: Synthetic oligonucleotide
  Sense strand starting at position 478 of SEQ ID NO: 318709
acgucuuauuuguucuuua

SEQ ID NO: 583396 - RNA, 19 nt, Artificial Sequence
  Description of Artificial Sequence: Synthetic oligonucleotide
  Antisense strand to SEQ ID NO: 583395
uaaagaacaaauaagacgu

SEQ ID NO: 583397 - RNA, 19 nt, Artificial Sequence
  Description of Artificial Sequence: Synthetic oligonucleotide
  Sense strand starting at position 479 of SEQ ID NO: 318709
cgucuuauuuguucuuuaa

SEQ ID NO: 583398 - RNA, 19 nt, Artificial Sequence
  Description of Artificial Sequence: Synthetic oligonucleotide
  Antisense strand to SEQ ID NO: 583397
uuaaagaacaaauaagacg

SEQ ID NO: 583399 - RNA, 19 nt, Artificial Sequence
  Description of Artificial Sequence: Synthetic oligonucleotide
  Sense strand starting at position 519 of SEQ ID NO: 318709
gauaacgacuugucauaug

SEQ ID NO: 583400 - RNA, 19 nt, Artificial Sequence
  Description of Artificial Sequence: Synthetic oligonucleotide
  Antisense strand to SEQ ID NO: 583399
cauaugacaagucguuauc

SEQ ID NO: 583401 - RNA, 19 nt, Artificial Sequence
  Description of Artificial Sequence: Synthetic oligonucleotide
  Sense strand starting at position 548 of SEQ ID NO: 318709
ccaauaacugguugaguua

SEQ ID NO: 583402 - RNA, 19 nt, Artificial Sequence
  Description of Artificial Sequence: Synthetic oligonucleotide
  Antisense strand to SEQ ID NO: 583401
uaacucaaccaguuauugg

SEQ ID NO: 583403 - RNA, 19 nt, Artificial Sequence
  Description of Artificial Sequence: Synthetic oligonucleotide
  Sense strand starting at position 631 of SEQ ID NO: 318709
cuguauugaguauaccauu

SEQ ID NO: 583404 - RNA, 19 nt, Artificial Sequence
  Description of Artificial Sequence: Synthetic oligonucleotide
  Antisense strand to SEQ ID NO: 583403
aaugguauacucaauacag

SEQ ID NO: 583405 - RNA, 19 nt, Artificial Sequence
  Description of Artificial Sequence: Synthetic oligonucleotide
  Sense strand starting at position 637 of SEQ ID NO: 318709
ugaguauaccauuguuuga

SEQ ID NO: 583406 - RNA, 19 nt, Artificial Sequence
  Description of Artificial Sequence: Synthetic oligonucleotide
  Antisense strand to SEQ ID NO: 583405
ucaaacaaugguauacuca

SEQ ID NO: 583407 - RNA, 19 nt, Artificial Sequence
  Description of Artificial Sequence: Synthetic oligonucleotide
  Sense strand starting at position 639 of SEQ ID NO: 318709
aguauaccauuguuugaag

SEQ ID NO: 583408 - RNA, 19 nt, Artificial Sequence
  Description of Artificial Sequence: Synthetic oligonucleotide
  Antisense strand to SEQ ID NO: 583407
cuucaaacaaugguauacu

SEQ ID NO: 583409 - RNA, 19 nt, Artificial Sequence
  Description of Artificial Sequence: Synthetic oligonucleotide
  Sense strand starting at position 795 of SEQ ID NO: 318709
uguucugacauguagagac

SEQ ID NO: 583410 - RNA, 19 nt, Artificial Sequence
  Description of Artificial Sequence: Synthetic oligonucleotide
  Antisense strand to SEQ ID NO: 583409
gucucuacaugucagaaca

SEQ ID NO: 583411 - RNA, 19 nt, Artificial Sequence
  Description of Artificial Sequence: Synthetic oligonucleotide
  Sense strand starting at position 878 of SEQ ID NO: 318709
ggaacuaacuaguuauauu

SEQ ID NO: 583412 - RNA, 19 nt, Artificial Sequence
  Description of Artificial Sequence: Synthetic oligonucleotide
  Antisense strand to SEQ ID NO: 583411
aauauaacuaguuaguucc

SEQ ID NO: 583413 - RNA, 19 nt, Artificial Sequence
  Description of Artificial Sequence: Synthetic oligonucleotide
  Sense strand starting at position 886 of SEQ ID NO: 318709
cuaguuauauuugccagua

SEQ ID NO: 583414 - RNA, 19 nt, Artificial Sequence
  Description of Artificial Sequence: Synthetic oligonucleotide
  Antisense strand to SEQ ID NO: 583413
uacuggcaaauauaacuag

SEQ ID NO: 583415 - RNA, 19 nt, Artificial Sequence
  Description of Artificial Sequence: Synthetic oligonucleotide
  Sense strand starting at position 896 of SEQ ID NO: 318709
uugccaguauuugcagaaa

SEQ ID NO: 583416 - RNA, 19 nt, Artificial Sequence
  Description of Artificial Sequence: Synthetic oligonucleotide
  Antisense strand to SEQ ID NO: 583415
uuucugcaaauacuggcaa

SEQ ID NO: 583417 - RNA, 19 nt, Artificial Sequence
  Description of Artificial Sequence: Synthetic oligonucleotide
  Sense strand starting at position 1109 of SEQ ID NO: 318709
ggccaacuacuuuaaaugu

SEQ ID NO: 583418 - RNA, 19 nt, Artificial Sequence
  Description of Artificial Sequence: Synthetic oligonucleotide
  Antisense strand to SEQ ID NO: 583417
acauuuaaaguaguuggcc

SEQ ID NO: 583419 - RNA, 19 nt, Artificial Sequence
  Description of Artificial Sequence: Synthetic oligonucleotide
  Sense strand starting at position 1211 of SEQ ID NO: 318709
cuaagaaacucuucgaccu

SEQ ID NO: 583420 - RNA, 19 nt, Artificial Sequence
  Description of Artificial Sequence: Synthetic oligonucleotide
  Antisense strand to SEQ ID NO: 583419
aggucgaagaguuucuuag

SEQ ID NO: 583421 - RNA, 19 nt, Artificial Sequence
  Description of Artificial Sequence: Synthetic oligonucleotide
  Sense strand starting at position 1377 of SEQ ID NO: 318709
ggagcuuaucaucaucacu

SEQ ID NO: 583422 - RNA, 19 nt, Artificial Sequence
  Description of Artificial Sequence: Synthetic oligonucleotide
  Antisense strand to SEQ ID NO: 583421
agugaugaugauaagcucc

SEQ ID NO: 583423 - RNA, 19 nt, Artificial Sequence
  Description of Artificial Sequence: Synthetic oligonucleotide
  Sense strand starting at position 1643 of SEQ ID NO: 318709
gaacguugagcagaccuaa

SEQ ID NO: 583424 - RNA, 19 nt, Artificial Sequence
  Description of Artificial Sequence: Synthetic oligonucleotide
  Antisense strand to SEQ ID NO: 583423
uuaggucugcucaacguuc

SEQ ID NO: 583425 - RNA, 19 nt, Artificial Sequence
  Description of Artificial Sequence: Synthetic oligonucleotide
  Sense strand starting at position 1686 of SEQ ID NO: 318709
cgcaguuguggcccacaca

SEQ ID NO: 583426 - RNA, 19 nt, Artificial Sequence
  Description of Artificial Sequence: Synthetic oligonucleotide
  Antisense strand to SEQ ID NO: 583425
ugugugggccacaacugcg

SEQ ID NO: 583427 - RNA, 19 nt, Artificial Sequence
  Description of Artificial Sequence: Synthetic oligonucleotide
  Sense strand starting at position 2102 of SEQ ID NO: 318709
cgccuccucggcuauuuau

SEQ ID NO: 583428 - RNA, 19 nt, Artificial Sequence
  Description of Artificial Sequence: Synthetic oligonucleotide
  Antisense strand to SEQ ID NO: 583427
auaaauagccgaggaggcg

SEQ ID NO: 583429 - RNA, 19 nt, Artificial Sequence
  Description of Artificial Sequence: Synthetic oligonucleotide
  Sense strand starting at position 2180 of SEQ ID NO: 318709
ucuguuuccgugcccauua

SEQ ID NO: 583430 - RNA, 19 nt, Artificial Sequence
  Description of Artificial Sequence: Synthetic oligonucleotide
  Antisense strand to SEQ ID NO: 583429
uaaugggcacggaaacaga

SEQ ID NO: 583431 - RNA, 19 nt, Artificial Sequence
  Description of Artificial Sequence: Synthetic oligonucleotide
  Sense strand starting at position 2567 of SEQ ID NO: 318709
gccggugucggcuuccaaa

SEQ ID NO: 583432 - RNA, 19 nt, Artificial Sequence
  Description of Artificial Sequence: Synthetic oligonucleotide
  Antisense strand to SEQ ID NO: 583431
uuuggaagccgacaccggc

SEQ ID NO: 583433 - RNA, 19 nt, Artificial Sequence
  Description of Artificial Sequence: Synthetic oligonucleotide
  Sense strand starting at position 2656 of SEQ ID NO: 318709
ugucccuauuugucgagua

SEQ ID NO: 583434 - RNA, 19 nt, Artificial Sequence
  Description of Artificial Sequence: Synthetic oligonucleotide
  Antisense strand to SEQ ID NO: 583433
uacucgacaaauagggaca

SEQ ID NO: 583435 - RNA, 19 nt, Artificial Sequence
  Description of Artificial Sequence: Synthetic oligonucleotide
  Sense strand starting at position 2661 of SEQ ID NO: 318709
cuauuugucgaguacguga

SEQ ID NO: 583436 - RNA, 19 nt, Artificial Sequence
  Description of Artificial Sequence: Synthetic oligonucleotide
  Antisense strand to SEQ ID NO: 583435
ucacguacucgacaaauag

SEQ ID NO: 583437 - RNA, 19 nt, Artificial Sequence
  Description of Artificial Sequence: Synthetic oligonucleotide
  Sense strand starting at position 2663 of SEQ ID NO: 318709
auuugucgaguacgugaga

SEQ ID NO: 583438 - RNA, 19 nt, Artificial Sequence
  Description of Artificial Sequence: Synthetic oligonucleotide
  Antisense strand to SEQ ID NO: 583437
ucucacguacucgacaaau

SEQ ID NO: 583439 - RNA, 19 nt, Artificial Sequence
  Description of Artificial Sequence: Synthetic oligonucleotide
  Sense strand starting at position 2810 of SEQ ID NO: 318709
uaaguuauuggcuauaguc

SEQ ID NO: 583440 - RNA, 19 nt, Artificial Sequence
  Description of Artificial Sequence: Synthetic oligonucleotide
  Antisense strand to SEQ ID NO: 583439
gacuauagccaauaacuua

SEQ ID NO: 583441 - RNA, 19 nt, Artificial Sequence
  Description of Artificial Sequence: Synthetic oligonucleotide
  Sense strand starting at position 2937 of SEQ ID NO: 318709
aaguguauccaauggaauc

SEQ ID NO: 583442 - RNA, 19 nt, Artificial Sequence
  Description of Artificial Sequence: Synthetic oligonucleotide
  Antisense strand to SEQ ID NO: 583441
gauuccauuggauacacuu

SEQ ID NO: 583443 - RNA, 19 nt, Artificial Sequence
  Description of Artificial Sequence: Synthetic oligonucleotide
  Sense strand starting at position 3080 of SEQ ID NO: 318709
uucuaugugccucauugaa

SEQ ID NO: 583444 - RNA, 19 nt, Artificial Sequence
  Description of Artificial Sequence: Synthetic oligonucleotide
  Antisense strand to SEQ ID NO: 583443
uucaaugaggcacauagaa

SEQ ID NO: 583445 - RNA, 19 nt, Artificial Sequence
  Description of Artificial Sequence: Synthetic oligonucleotide
  Sense strand starting at position 3157 of SEQ ID NO: 318709
cauauauguccguaacgaa

SEQ ID NO: 583446 - RNA, 19 nt, Artificial Sequence
  Description of Artificial Sequence: Synthetic oligonucleotide
  Antisense strand to SEQ ID NO: 583445
uucguuacggacauauaug

SEQ ID NO: 583447 - RNA, 19 nt, Artificial Sequence
  Description of Artificial Sequence: Synthetic oligonucleotide
  Sense strand starting at position 3807 of SEQ ID NO: 318709
cucacaggccuccagaauu

SEQ ID NO: 583448 - RNA, 19 nt, Artificial Sequence
  Description of Artificial Sequence: Synthetic oligonucleotide
  Antisense strand to SEQ ID NO: 583447
aauucuggaggccugugag

SEQ ID NO: 583449 - RNA, 19 nt, Artificial Sequence
  Description of Artificial Sequence: Synthetic oligonucleotide
  Sense strand starting at position 3841 of SEQ ID NO: 318709
gguucaugguaggcaaaga

SEQ ID NO: 583450 - RNA, 19 nt, Artificial Sequence
  Description of Artificial Sequence: Synthetic oligonucleotide
  Antisense strand to SEQ ID NO: 583449
ucuuugccuaccaugaacc

SEQ ID NO: 583451 - RNA, 19 nt, Artificial Sequence
  Description of Artificial Sequence: Synthetic oligonucleotide
  Sense strand starting at position 3870 of SEQ ID NO: 318709
accucuaggcagcaagaua

SEQ ID NO: 583452 - RNA, 19 nt, Artificial Sequence
  Description of Artificial Sequence: Synthetic oligonucleotide
  Antisense strand to SEQ ID NO: 583451
uaucuugcugccuagaggu

SEQ ID NO: 583453 - RNA, 19 nt, Artificial Sequence
  Description of Artificial Sequence: Synthetic oligonucleotide
  Sense strand starting at position 3898 of SEQ ID NO: 318709
ucauaucuggguuggaaca

SEQ ID NO: 583454 - RNA, 19 nt, Artificial Sequence
  Description of Artificial Sequence: Synthetic oligonucleotide
  Antisense strand to SEQ ID NO: 583453
uguuccaacccagauauga

SEQ ID NO: 583455 - RNA, 19 nt, Artificial Sequence
  Description of Artificial Sequence: Synthetic oligonucleotide
  Sense strand starting at position 52 of SEQ ID NO: 318710
acaguaacuugguuucuca

SEQ ID NO: 583456 - RNA, 19 nt, Artificial Sequence
  Description of Artificial Sequence: Synthetic oligonucleotide
  Antisense strand to SEQ ID NO: 583455
ugagaaaccaaguuacugu

SEQ ID NO: 583457 - RNA, 19 nt, Artificial Sequence
  Description of Artificial Sequence: Synthetic oligonucleotide
  Sense strand starting at position 93 of SEQ ID NO: 318710
aagauaguuugcccagcau

SEQ ID NO: 583458 - RNA, 19 nt, Artificial Sequence
  Description of Artificial Sequence: Synthetic oligonucleotide
  Antisense strand to SEQ ID NO: 583457
augcugggcaaacuaucuu

SEQ ID NO: 583459 - RNA, 19 nt, Artificial Sequence
  Description of Artificial Sequence: Synthetic oligonucleotide
  Sense strand starting at position 150 of SEQ ID NO: 318710
ugauguucccaacgucaua

SEQ ID NO: 583460 - RNA, 19 nt, Artificial Sequence
  Description of Artificial Sequence: Synthetic oligonucleotide
  Antisense strand to SEQ ID NO: 583459
uaugacguugggaacauca

SEQ ID NO: 583461 - RNA, 19 nt, Artificial Sequence
  Description of Artificial Sequence: Synthetic oligonucleotide
  Sense strand starting at position 280 of SEQ ID NO: 318710
gguccuuucucucuaagaa

SEQ ID NO: 583462 - RNA, 19 nt, Artificial Sequence
  Description of Artificial Sequence: Synthetic oligonucleotide
  Antisense strand to SEQ ID NO: 583461
uucuuagagagaaaggacc

SEQ ID NO: 583463 - RNA, 19 nt, Artificial Sequence
  Description of Artificial Sequence: Synthetic oligonucleotide
  Sense strand starting at position 480 of SEQ ID NO: 318710
cgcuuauggccugaaucaa

SEQ ID NO: 583464 - RNA, 19 nt, Artificial Sequence
  Description of Artificial Sequence: Synthetic oligonucleotide
  Antisense strand to SEQ ID NO: 583463
uugauucaggccauaagcg

SEQ ID NO: 583465 - RNA, 19 nt, Artificial Sequence
  Description of Artificial Sequence: Synthetic oligonucleotide
  Sense strand starting at position 622 of SEQ ID NO: 318710
ggugcauuacaaugacuca

SEQ ID NO: 583466 - RNA, 19 nt, Artificial Sequence
  Description of Artificial Sequence: Synthetic oligonucleotide
  Antisense strand to SEQ ID NO: 583465
ugagucauuguaaugcacc

SEQ ID NO: 583467 - RNA, 19 nt, Artificial Sequence
  Description of Artificial Sequence: Synthetic oligonucleotide
  Sense strand starting at position 625 of SEQ ID NO: 318710
gcauuacaaugacucagua

SEQ ID NO: 583468 - RNA, 19 nt, Artificial Sequence
  Description of Artificial Sequence: Synthetic oligonucleotide
  Antisense strand to SEQ ID NO: 583467
uacugagucauuguaaugc

SEQ ID NO: 583469 - RNA, 19 nt, Artificial Sequence
  Description of Artificial Sequence: Synthetic oligonucleotide
  Sense strand starting at position 776 of SEQ ID NO: 318710
agaaacuucgcacaucuuu

SEQ ID NO: 583470 - RNA, 19 nt, Artificial Sequence
  Description of Artificial Sequence: Synthetic oligonucleotide
  Antisense strand to SEQ ID NO: 583469
aaagaugugcgaaguuucu

SEQ ID NO: 583471 - RNA, 19 nt, Artificial Sequence
  Description of Artificial Sequence: Synthetic oligonucleotide
  Sense strand starting at position 822 of SEQ ID NO: 318710
ggugguugguaugugaauc

SEQ ID NO: 583472 - RNA, 19 nt, Artificial Sequence
  Description of Artificial Sequence: Synthetic oligonucleotide
  Antisense strand to SEQ ID NO: 583471
gauucacauaccaaccacc

SEQ ID NO: 583473 - RNA, 19 nt, Artificial Sequence
  Description of Artificial Sequence: Synthetic oligonucleotide
  Sense strand starting at position 823 of SEQ ID NO: 318710
gugguugguaugugaaucu

SEQ ID NO: 583474 - RNA, 19 nt, Artificial Sequence
  Description of Artificial Sequence: Synthetic oligonucleotide
  Antisense strand to SEQ ID NO: 583473
agauucacauaccaaccac

SEQ ID NO: 583475 - RNA, 19 nt, Artificial Sequence
  Description of Artificial Sequence: Synthetic oligonucleotide
  Sense strand starting at position 891 of SEQ ID NO: 318710
gcaguuugucagcaggacu

SEQ ID NO: 583476 - RNA, 19 nt, Artificial Sequence
  Description of Artificial Sequence: Synthetic oligonucleotide
  Antisense strand to SEQ ID NO: 583475
aguccugcugacaaacugc

SEQ ID NO: 583477 - RNA, 19 nt, Artificial Sequence
  Description of Artificial Sequence: Synthetic oligonucleotide
  Sense strand starting at position 1476 of SEQ ID NO: 318710
gcaggaugccguuaccuau

SEQ ID NO: 583478 - RNA, 19 nt, Artificial Sequence
  Description of Artificial Sequence: Synthetic oligonucleotide
  Antisense strand to SEQ ID NO: 583477
auagguaacggcauccugc

SEQ ID NO: 583479 - RNA, 19 nt, Artificial Sequence
  Description of Artificial Sequence: Synthetic oligonucleotide
  Sense strand starting at position 1479 of SEQ ID NO: 318710
ggaugccguuaccuauauu

SEQ ID NO: 583480 - RNA, 19 nt, Artificial Sequence
  Description of Artificial Sequence: Synthetic oligonucleotide
  Antisense strand to SEQ ID NO: 583479
aauauagguaacggcaucc

SEQ ID NO: 583481 - RNA, 19 nt, Artificial Sequence
  Description of Artificial Sequence: Synthetic oligonucleotide
  Sense strand starting at position 2335 of SEQ ID NO: 318710
gucuuccucgcucauuaau

SEQ ID NO: 583482 - RNA, 19 nt, Artificial Sequence
  Description of Artificial Sequence: Synthetic oligonucleotide
  Antisense strand to SEQ ID NO: 583481
auuaaugagcgaggaagac

SEQ ID NO: 583483 - RNA, 19 nt, Artificial Sequence
  Description of Artificial Sequence: Synthetic oligonucleotide
  Sense strand starting at position 2361 of SEQ ID NO: 318710
uggaauucgagcugggcaa

SEQ ID NO: 583484 - RNA, 19 nt, Artificial Sequence
  Description of Artificial Sequence: Synthetic oligonucleotide
  Antisense strand to SEQ ID NO: 583483
uugcccagcucgaauucca

SEQ ID NO: 583485 - RNA, 19 nt, Artificial Sequence
  Description of Artificial Sequence: Synthetic oligonucleotide
  Sense strand starting at position 2362 of SEQ ID NO: 318710
ggaauucgagcugggcaau

SEQ ID NO: 583486 - RNA, 19 nt, Artificial Sequence
  Description of Artificial Sequence: Synthetic oligonucleotide
  Antisense strand to SEQ ID NO: 583485
auugcccagcucgaauucc

SEQ ID NO: 583487 - RNA, 19 nt, Artificial Sequence
  Description of Artificial Sequence: Synthetic oligonucleotide
  Sense strand starting at position 2363 of SEQ ID NO: 318710
gaauucgagcugggcaauu

SEQ ID NO: 583488 - RNA, 19 nt, Artificial Sequence
  Description of Artificial Sequence: Synthetic oligonucleotide
  Antisense strand to SEQ ID NO: 583487
aauugcccagcucgaauuc

SEQ ID NO: 583489 - RNA, 19 nt, Artificial Sequence
  Description of Artificial Sequence: Synthetic oligonucleotide
  Sense strand starting at position 2572 of SEQ ID NO: 318710
cugagccauccggcguaua

SEQ ID NO: 583490 - RNA, 19 nt, Artificial Sequence
  Description of Artificial Sequence: Synthetic oligonucleotide
  Antisense strand to SEQ ID NO: 583489
uauacgccggauggcucag

SEQ ID NO: 583491 - RNA, 19 nt, Artificial Sequence
  Description of Artificial Sequence: Synthetic oligonucleotide
  Sense strand starting at position 2574 of SEQ ID NO: 318710
gagccauccggcguauauc

SEQ ID NO: 583492 - RNA, 19 nt, Artificial Sequence
  Description of Artificial Sequence: Synthetic oligonucleotide
  Antisense strand to SEQ ID NO: 583491
gauauacgccggauggcuc

SEQ ID NO: 583493 - RNA, 19 nt, Artificial Sequence
  Description of Artificial Sequence: Synthetic oligonucleotide
  Sense strand starting at position 2619 of SEQ ID NO: 318710
guuguaggugcuggagaua

SEQ ID NO: 583494 - RNA, 19 nt, Artificial Sequence
  Description of Artificial Sequence: Synthetic oligonucleotide
  Antisense strand to SEQ ID NO: 583493
uaucuccagcaccuacaac

SEQ ID NO: 583495 - RNA, 19 nt, Artificial Sequence
  Description of Artificial Sequence: Synthetic oligonucleotide
  Sense strand starting at position 2660 of SEQ ID NO: 318710
ccuguucccguggaguuua

SEQ ID NO: 583496 - RNA, 19 nt, Artificial Sequence
  Description of Artificial Sequence: Synthetic oligonucleotide
  Antisense strand to SEQ ID NO: 583495
uaaacuccacgggaacagg

SEQ ID NO: 583497 - RNA, 19 nt, Artificial Sequence
  Description of Artificial Sequence: Synthetic oligonucleotide
  Sense strand starting at position 2680 of SEQ ID NO: 318710
guucuaggagcggguauau

SEQ ID NO: 583498 - RNA, 19 nt, Artificial Sequence
  Description of Artificial Sequence: Synthetic oligonucleotide
  Antisense strand to SEQ ID NO: 583497
auauacccgcuccuagaac

SEQ ID NO: 583499 - RNA, 19 nt, Artificial Sequence
  Description of Artificial Sequence: Synthetic oligonucleotide
  Sense strand starting at position 2691 of SEQ ID NO: 318710
ggguauaugucagccaaca

SEQ ID NO: 583500 - RNA, 19 nt, Artificial Sequence
  Description of Artificial Sequence: Synthetic oligonucleotide
  Antisense strand to SEQ ID NO: 583499
uguuggcugacauauaccc

SEQ ID NO: 583501 - RNA, 19 nt, Artificial Sequence
  Description of Artificial Sequence: Synthetic oligonucleotide
  Sense strand starting at position 2727 of SEQ ID NO: 318710
agaaauucugucugauggu

SEQ ID NO: 583502 - RNA, 19 nt, Artificial Sequence
  Description of Artificial Sequence: Synthetic oligonucleotide
  Antisense strand to SEQ ID NO: 583501
accaucagacagaauuucu

SEQ ID NO: 583503 - RNA, 19 nt, Artificial Sequence
  Description of Artificial Sequence: Synthetic oligonucleotide
  Sense strand starting at position 2789 of SEQ ID NO: 318710
ggguaagggaggugcuauu

SEQ ID NO: 583504 - RNA, 19 nt, Artificial Sequence
  Description of Artificial Sequence: Synthetic oligonucleotide
  Antisense strand to SEQ ID NO: 583503
aauagcaccucccuuaccc

SEQ ID NO: 583505 - RNA, 19 nt, Artificial Sequence
  Description of Artificial Sequence: Synthetic oligonucleotide
  Sense strand starting at position 2886 of SEQ ID NO: 318710
guggaaggguccagaugaa

SEQ ID NO: 583506 - RNA, 19 nt, Artificial Sequence
  Description of Artificial Sequence: Synthetic oligonucleotide
  Antisense strand to SEQ ID NO: 583505
uucaucuggacccuuccac

SEQ ID NO: 583507 - RNA, 19 nt, Artificial Sequence
  Description of Artificial Sequence: Synthetic oligonucleotide
  Sense strand starting at position 2928 of SEQ ID NO: 318710
agaucagucuggcuggagu

SEQ ID NO: 583508 - RNA, 19 nt, Artificial Sequence
  Description of Artificial Sequence: Synthetic oligonucleotide
  Antisense strand to SEQ ID NO: 583507
acuccagccagacugaucu

SEQ ID NO: 583509 - RNA, 19 nt, Artificial Sequence
  Description of Artificial Sequence: Synthetic oligonucleotide
  Sense strand starting at position 2965 of SEQ ID NO: 318710
gaucacgugccagaucuuu

SEQ ID NO: 583510 - RNA, 19 nt, Artificial Sequence
  Description of Artificial Sequence: Synthetic oligonucleotide
  Antisense strand to SEQ ID NO: 583509
aaagaucuggcacgugauc

SEQ ID NO: 583511 - RNA, 19 nt, Artificial Sequence
  Description of Artificial Sequence: Synthetic oligonucleotide
  Sense strand starting at position 2971 of SEQ ID NO: 318710
gugccagaucuuuaguggu

SEQ ID NO: 583512 - RNA, 19 nt, Artificial Sequence
  Description of Artificial Sequence: Synthetic oligonucleotide
  Antisense strand to SEQ ID NO: 583511
accacuaaagaucuggcac

SEQ ID NO: 583513 - RNA, 19 nt, Artificial Sequence
  Description of Artificial Sequence: Synthetic oligonucleotide
  Sense strand starting at position 2973 of SEQ ID NO: 318710
gccagaucuuuagugguaa

SEQ ID NO: 583514 - RNA, 19 nt, Artificial Sequence
  Description of Artificial Sequence: Synthetic oligonucleotide
  Antisense strand to SEQ ID NO: 583513
uuaccacuaaagaucuggc

SEQ ID NO: 583515 - RNA, 19 nt, Artificial Sequence
  Description of Artificial Sequence: Synthetic oligonucleotide
  Sense strand starting at position 3046 of SEQ ID NO: 318710
cgcuuucuucccuuuaguu

SEQ ID NO: 583516 - RNA, 19 nt, Artificial Sequence
  Description of Artificial Sequence: Synthetic oligonucleotide
  Antisense strand to SEQ ID NO: 583515
aacuaaagggaagaaagcg

SEQ ID NO: 583517 - RNA, 19 nt, Artificial Sequence
  Description of Artificial Sequence: Synthetic oligonucleotide
  Sense strand starting at position 3059 of SEQ ID NO: 318710
uuaguuucucaguucguuu

SEQ ID NO: 583518 - RNA, 19 nt, Artificial Sequence
  Description of Artificial Sequence: Synthetic oligonucleotide
  Antisense strand to SEQ ID NO: 583517
aaacgaacugagaaacuaa

SEQ ID NO: 583519 - RNA, 19 nt, Artificial Sequence
  Description of Artificial Sequence: Synthetic oligonucleotide
  Sense strand starting at position 3134 of SEQ ID NO: 318710
uuauguuucgugucuucca

SEQ ID NO: 583520 - RNA, 19 nt, Artificial Sequence
  Description of Artificial Sequence: Synthetic oligonucleotide
  Antisense strand to SEQ ID NO: 583519
uggaagacacgaaacauaa

SEQ ID NO: 583521 - RNA, 19 nt, Artificial Sequence
  Description of Artificial Sequence: Synthetic oligonucleotide
  Sense strand starting at position 3142 of SEQ ID NO: 318710
cgugucuuccaucaaguac

SEQ ID NO: 583522 - RNA, 19 nt, Artificial Sequence
  Description of Artificial Sequence: Synthetic oligonucleotide
  Antisense strand to SEQ ID NO: 583521
guacuugauggaagacacg

SEQ ID NO: 583523 - RNA, 19 nt, Artificial Sequence
  Description of Artificial Sequence: Synthetic oligonucleotide
  Sense strand starting at position 3161 of SEQ ID NO: 318710
auauguacugccugcauuu

SEQ ID NO: 583524 - RNA, 19 nt, Artificial Sequence
  Description of Artificial Sequence: Synthetic oligonucleotide
  Antisense strand to SEQ ID NO: 583523
aaaugcaggcaguacauau

SEQ ID NO: 583525 - RNA, 19 nt, Artificial Sequence
  Description of Artificial Sequence: Synthetic oligonucleotide
  Sense strand starting at position 3232 of SEQ ID NO: 318710
cucuccucauuguuggaua

SEQ ID NO: 583526 - RNA, 19 nt, Artificial Sequence
  Description of Artificial Sequence: Synthetic oligonucleotide
  Antisense strand to SEQ ID NO: 583525
uauccaacaaugaggagag

SEQ ID NO: 583527 - RNA, 19 nt, Artificial Sequence
  Description of Artificial Sequence: Synthetic oligonucleotide
  Sense strand starting at position 3630 of SEQ ID NO: 318710
uuucuugugccagagcaga

SEQ ID NO: 583528 - RNA, 19 nt, Artificial Sequence
  Description of Artificial Sequence: Synthetic oligonucleotide
  Antisense strand to SEQ ID NO: 583527
ucugcucuggcacaagaaa

SEQ ID NO: 583529 - RNA, 19 nt, Artificial Sequence
  Description of Artificial Sequence: Synthetic oligonucleotide
  Sense strand starting at position 3721 of SEQ ID NO: 318710
cugucugauuuguccuguu

SEQ ID NO: 583530 - RNA, 19 nt, Artificial Sequence
  Description of Artificial Sequence: Synthetic oligonucleotide
  Antisense strand to SEQ ID NO: 583529
aacaggacaaaucagacag

SEQ ID NO: 583531 - RNA, 19 nt, Artificial Sequence
  Description of Artificial Sequence: Synthetic oligonucleotide
  Sense strand starting at position 3946 of SEQ ID NO: 318710
gacuguaacugcuuugaug

SEQ ID NO: 583532 - RNA, 19 nt, Artificial Sequence
  Description of Artificial Sequence: Synthetic oligonucleotide
  Antisense strand to SEQ ID NO: 583531
caucaaagcaguuacaguc

SEQ ID NO: 583533 - RNA, 19 nt, Artificial Sequence
  Description of Artificial Sequence: Synthetic oligonucleotide
  Sense strand starting at position 3948 of SEQ ID NO: 318710
cuguaacugcuuugaugaa

SEQ ID NO: 583534 - RNA, 19 nt, Artificial Sequence
  Description of Artificial Sequence: Synthetic oligonucleotide
  Antisense strand to SEQ ID NO: 583533
uucaucaaagcaguuacag

SEQ ID NO: 583535 - RNA, 19 nt, Artificial Sequence
  Description of Artificial Sequence: Synthetic oligonucleotide
  Sense strand starting at position 254 of SEQ ID NO: 318711
gcuuguaagauccucgcuu

SEQ ID NO: 583536 - RNA, 19 nt, Artificial Sequence
  Description of Artificial Sequence: Synthetic oligonucleotide
  Antisense strand to SEQ ID NO: 583535
aagcgaggaucuuacaagc

SEQ ID NO: 583537 - RNA, 19 nt, Artificial Sequence
  Description of Artificial Sequence: Synthetic oligonucleotide
  Sense strand starting at position 392 of SEQ ID NO: 318711
acauuaaagugauucgcaa

SEQ ID NO: 583538 - RNA, 19 nt, Artificial Sequence
  Description of Artificial Sequence: Synthetic oligonucleotide
  Antisense strand to SEQ ID NO: 583537
uugcgaaucacuuuaaugu

SEQ ID NO: 583539 - RNA, 19 nt, Artificial Sequence
  Description of Artificial Sequence: Synthetic oligonucleotide
  Sense strand starting at position 486 of SEQ ID NO: 318711
aauacaugagucugugauu

SEQ ID NO: 583540 - RNA, 19 nt, Artificial Sequence
  Description of Artificial Sequence: Synthetic oligonucleotide
  Antisense strand to SEQ ID NO: 583539
aaucacagacucauguauu

SEQ ID NO: 583541 - RNA, 19 nt, Artificial Sequence
  Description of Artificial Sequence: Synthetic oligonucleotide
  Sense strand starting at position 555 of SEQ ID NO: 318711
guaaauauacugcagcauu

SEQ ID NO: 583542 - RNA, 19 nt, Artificial Sequence
  Description of Artificial Sequence: Synthetic oligonucleotide
  Antisense strand to SEQ ID NO: 583541
aaugcugcaguauauuuac

SEQ ID NO: 583543 - RNA, 19 nt, Artificial Sequence
  Description of Artificial Sequence: Synthetic oligonucleotide
  Sense strand starting at position 693 of SEQ ID NO: 318711
cggauuuggcuuuaucugu

SEQ ID NO: 583544 - RNA, 19 nt, Artificial Sequence
  Description of Artificial Sequence: Synthetic oligonucleotide
  Antisense strand to SEQ ID NO: 583543
acagauaaagccaaauccg

SEQ ID NO: 583545 - RNA, 19 nt, Artificial Sequence
  Description of Artificial Sequence: Synthetic oligonucleotide
  Sense strand starting at position 698 of SEQ ID NO: 318711
uuggcuuuaucuguaauau

SEQ ID NO: 583546 - RNA, 19 nt, Artificial Sequence
  Description of Artificial Sequence: Synthetic oligonucleotide
  Antisense strand to SEQ ID NO: 583545
auauuacagauaaagccaa

SEQ ID NO: 583547 - RNA, 19 nt, Artificial Sequence
  Description of Artificial Sequence: Synthetic oligonucleotide
  Sense strand starting at position 699 of SEQ ID NO: 318711
uggcuuuaucuguaauaua

SEQ ID NO: 583548 - RNA, 19 nt, Artificial Sequence
  Description of Artificial Sequence: Synthetic oligonucleotide
  Antisense strand to SEQ ID NO: 583547
uauauuacagauaaagcca

SEQ ID NO: 583549 - RNA, 19 nt, Artificial Sequence
  Description of Artificial Sequence: Synthetic oligonucleotide
  Sense strand starting at position 729 of SEQ ID NO: 318711
agauacuuugcucauguau

SEQ ID NO: 583550 - RNA, 19 nt, Artificial Sequence
  Description of Artificial Sequence: Synthetic oligonucleotide
  Antisense strand to SEQ ID NO: 583549
auacaugagcaaaguaucu

SEQ ID NO: 583551 - RNA, 19 nt, Artificial Sequence
  Description of Artificial Sequence: Synthetic oligonucleotide
  Sense strand starting at position 738 of SEQ ID NO: 318711
gcucauguauaaucaagaa

SEQ ID NO: 583552 - RNA, 19 nt, Artificial Sequence
  Description of Artificial Sequence: Synthetic oligonucleotide
  Antisense strand to SEQ ID NO: 583551
uucuugauuauacaugagc

SEQ ID NO: 583553 - RNA, 19 nt, Artificial Sequence
  Description of Artificial Sequence: Synthetic oligonucleotide
  Sense strand starting at position 917 of SEQ ID NO: 318711
uuacuauuacaugguggaa

SEQ ID NO: 583554 - RNA, 19 nt, Artificial Sequence
  Description of Artificial Sequence: Synthetic oligonucleotide
  Antisense strand to SEQ ID NO: 583553
uuccaccauguaauaguaa

SEQ ID NO: 583555 - RNA, 19 nt, Artificial Sequence
  Description of Artificial Sequence: Synthetic oligonucleotide
  Sense strand starting at position 920 of SEQ ID NO: 318711
cuauuacaugguggaauua

SEQ ID NO: 583556 - RNA, 19 nt, Artificial Sequence
  Description of Artificial Sequence: Synthetic oligonucleotide
  Antisense strand to SEQ ID NO: 583555
uaauuccaccauguaauag

SEQ ID NO: 583557 - RNA, 19 nt, Artificial Sequence
  Description of Artificial Sequence: Synthetic oligonucleotide
  Sense strand starting at position 930 of SEQ ID NO: 318711
guggaauuaugauugauca

SEQ ID NO: 583558 - RNA, 19 nt, Artificial Sequence
  Description of Artificial Sequence: Synthetic oligonucleotide
  Antisense strand to SEQ ID NO: 583557
ugaucaaucauaauuccac

SEQ ID NO: 583559 - RNA, 19 nt, Artificial Sequence
  Description of Artificial Sequence: Synthetic oligonucleotide
  Sense strand starting at position 1226 of SEQ ID NO: 318711
gaacauccuuagucuggaa

SEQ ID NO: 583560 - RNA, 19 nt, Artificial Sequence
  Description of Artificial Sequence: Synthetic oligonucleotide
  Antisense strand to SEQ ID NO: 583559
uuccagacuaaggauguuc

SEQ ID NO: 583561 - RNA, 19 nt, Artificial Sequence
  Description of Artificial Sequence: Synthetic oligonucleotide
  Sense strand starting at position 1228 of SEQ ID NO: 318711
acauccuuagucuggaaca

SEQ ID NO: 583562 - RNA, 19 nt, Artificial Sequence
  Description of Artificial Sequence: Synthetic oligonucleotide
  Antisense strand to SEQ ID NO: 583561
uguuccagacuaaggaugu

SEQ ID NO: 583563 - RNA, 19 nt, Artificial Sequence
  Description of Artificial Sequence: Synthetic oligonucleotide
  Sense strand starting at position 1253 of SEQ ID NO: 318711
uugcaaucacgauaguaca

SEQ ID NO: 583564 - RNA, 19 nt, Artificial Sequence
  Description of Artificial Sequence: Synthetic oligonucleotide
  Antisense strand to SEQ ID NO: 583563
uguacuaucgugauugcaa

SEQ ID NO: 583565 - RNA, 19 nt, Artificial Sequence
  Description of Artificial Sequence: Synthetic oligonucleotide
  Sense strand starting at position 2326 of SEQ ID NO: 318711
ccggucucuacuggacaga

SEQ ID NO: 583566 - RNA, 19 nt, Artificial Sequence
  Description of Artificial Sequence: Synthetic oligonucleotide
  Antisense strand to SEQ ID NO: 583565
ucuguccaguagagaccgg

SEQ ID NO: 583567 - RNA, 19 nt, Artificial Sequence
  Description of Artificial Sequence: Synthetic oligonucleotide
  Sense strand starting at position 2672 of SEQ ID NO: 318711
ugucacucacuugauguau

SEQ ID NO: 583568 - RNA, 19 nt, Artificial Sequence
  Description of Artificial Sequence: Synthetic oligonucleotide
  Antisense strand to SEQ ID NO: 583567
auacaucaagugagugaca

SEQ ID NO: 583569 - RNA, 19 nt, Artificial Sequence
  Description of Artificial Sequence: Synthetic oligonucleotide
  Sense strand starting at position 2683 of SEQ ID NO: 318711
ugauguauauuugcuuguu

SEQ ID NO: 583570 - RNA, 19 nt, Artificial Sequence
  Description of Artificial Sequence: Synthetic oligonucleotide
  Antisense strand to SEQ ID NO: 583569
aacaagcaaauauacauca

SEQ ID NO: 583571 - RNA, 19 nt, Artificial Sequence
  Description of Artificial Sequence: Synthetic oligonucleotide
  Sense strand starting at position 2685 of SEQ ID NO: 318711
auguauauuugcuuguuga

SEQ ID NO: 583572 - RNA, 19 nt, Artificial Sequence
  Description of Artificial Sequence: Synthetic oligonucleotide
  Antisense strand to SEQ ID NO: 583571
ucaacaagcaaauauacau

SEQ ID NO: 583573 - RNA, 19 nt, Artificial Sequence
  Description of Artificial Sequence: Synthetic oligonucleotide
  Sense strand starting at position 2686 of SEQ ID NO: 318711
uguauauuugcuuguugag

SEQ ID NO: 583574 - RNA, 19 nt, Artificial Sequence
  Description of Artificial Sequence: Synthetic oligonucleotide
  Antisense strand to SEQ ID NO: 583573
cucaacaagcaaauauaca

SEQ ID NO: 583575 - RNA, 19 nt, Artificial Sequence
  Description of Artificial Sequence: Synthetic oligonucleotide
  Sense strand starting at position 2688 of SEQ ID NO: 318711
uauauuugcuuguugaguu

SEQ ID NO: 583576 - RNA, 19 nt, Artificial Sequence
  Description of Artificial Sequence: Synthetic oligonucleotide
  Antisense strand to SEQ ID NO: 583575
aacucaacaagcaaauaua

SEQ ID NO: 583577 - RNA, 19 nt, Artificial Sequence
  Description of Artificial Sequence: Synthetic oligonucleotide
  Sense strand starting at position 2979 of SEQ ID NO: 318711
gugagcucugauggcaaca

SEQ ID NO: 583578 - RNA, 19 nt, Artificial Sequence
  Description of Artificial Sequence: Synthetic oligonucleotide
  Antisense strand to SEQ ID NO: 583577
uguugccaucagagcucac

SEQ ID NO: 583579 - RNA, 19 nt, Artificial Sequence
  Description of Artificial Sequence: Synthetic oligonucleotide
  Sense strand starting at position 3022 of SEQ ID NO: 318711
accagaccgugucucuaaa

SEQ ID NO: 583580 - RNA, 19 nt, Artificial Sequence
  Description of Artificial Sequence: Synthetic oligonucleotide
  Antisense strand to SEQ ID NO: 583579
uuuagagacacggucuggu

SEQ ID NO: 583581 - RNA, 19 nt, Artificial Sequence
  Description of Artificial Sequence: Synthetic oligonucleotide
  Sense strand starting at position 3107 of SEQ ID NO: 318711
aaagcaguuccucaaaggu

SEQ ID NO: 583582 - RNA, 19 nt, Artificial Sequence
  Description of Artificial Sequence: Synthetic oligonucleotide
  Antisense strand to SEQ ID NO: 583581
accuuugaggaacugcuuu

SEQ ID NO: 583583 - RNA, 19 nt, Artificial Sequence
  Description of Artificial Sequence: Synthetic oligonucleotide
  Sense strand starting at position 3123 of SEQ ID NO: 318711
gguuaaacagcucacaguu

SEQ ID NO: 583584 - RNA, 19 nt, Artificial Sequence
  Description of Artificial Sequence: Synthetic oligonucleotide
  Antisense strand to SEQ ID NO: 583583
aacugugagcuguuuaacc

SEQ ID NO: 583585 - RNA, 19 nt, Artificial Sequence
  Description of Artificial Sequence: Synthetic oligonucleotide
  Sense strand starting at position 3519 of SEQ ID NO: 318711
ugugauuugugaugaaaga

SEQ ID NO: 583586 - RNA, 19 nt, Artificial Sequence
  Description of Artificial Sequence: Synthetic oligonucleotide
  Antisense strand to SEQ ID NO: 583585
ucuuucaucacaaaucaca

SEQ ID NO: 583587 - RNA, 19 nt, Artificial Sequence
  Description of Artificial Sequence: Synthetic oligonucleotide
  Sense strand starting at position 3543 of SEQ ID NO: 318711
gaaucaggguucgcaucuu

SEQ ID NO: 583588 - RNA, 19 nt, Artificial Sequence
  Description of Artificial Sequence: Synthetic oligonucleotide
  Antisense strand to SEQ ID NO: 583587
aagaugcgaacccugauuc

SEQ ID NO: 583589 - RNA, 19 nt, Artificial Sequence
  Description of Artificial Sequence: Synthetic oligonucleotide
  Sense strand starting at position 3578 of SEQ ID NO: 318711
acuauaguuccugaucuuu

SEQ ID NO: 583590 - RNA, 19 nt, Artificial Sequence
  Description of Artificial Sequence: Synthetic oligonucleotide
  Antisense strand to SEQ ID NO: 583589
aaagaucaggaacuauagu

SEQ ID NO: 583591 - RNA, 19 nt, Artificial Sequence
  Description of Artificial Sequence: Synthetic oligonucleotide
  Sense strand starting at position 3583 of SEQ ID NO: 318711
aguuccugaucuuugaaag

SEQ ID NO: 583592 - RNA, 19 nt, Artificial Sequence
  Description of Artificial Sequence: Synthetic oligonucleotide
  Antisense strand to SEQ ID NO: 583591
cuuucaaagaucaggaacu

SEQ ID NO: 583593 - RNA, 19 nt, Artificial Sequence
  Description of Artificial Sequence: Synthetic oligonucleotide
  Sense strand starting at position 3584 of SEQ ID NO: 318711
guuccugaucuuugaaaga

SEQ ID NO: 583594 - RNA, 19 nt, Artificial Sequence
  Description of Artificial Sequence: Synthetic oligonucleotide
  Antisense strand to SEQ ID NO: 583593
ucuuucaaagaucaggaac

SEQ ID NO: 583595 - RNA, 19 nt, Artificial Sequence
  Description of Artificial Sequence: Synthetic oligonucleotide
  Sense strand starting at position 3664 of SEQ ID NO: 318711
ccuaaaguaauguguguau

SEQ ID NO: 583596 - RNA, 19 nt, Artificial Sequence
  Description of Artificial Sequence: Synthetic oligonucleotide
  Antisense strand to SEQ ID NO: 583595
auacacacauuacuuuagg

SEQ ID NO: 583597 - RNA, 19 nt, Artificial Sequence
  Description of Artificial Sequence: Synthetic oligonucleotide
  Sense strand starting at position 3666 of SEQ ID NO: 318711
uaaaguaauguguguauug

SEQ ID NO: 583598 - RNA, 19 nt, Artificial Sequence
  Description of Artificial Sequence: Synthetic oligonucleotide
  Antisense strand to SEQ ID NO: 583597
caauacacacauuacuuua

SEQ ID NO: 583599 - RNA, 19 nt, Artificial Sequence
  Description of Artificial Sequence: Synthetic oligonucleotide
  Sense strand starting at position 3667 of SEQ ID NO: 318711
aaaguaauguguguauuga

SEQ ID NO: 583600 - RNA, 19 nt, Artificial Sequence
  Description of Artificial Sequence: Synthetic oligonucleotide
  Antisense strand to SEQ ID NO: 583599
ucaauacacacauuacuuu

SEQ ID NO: 583601 - RNA, 19 nt, Artificial Sequence
  Description of Artificial Sequence: Synthetic oligonucleotide
  Sense strand starting at position 3668 of SEQ ID NO: 318711
aaguaauguguguauugag

SEQ ID NO: 583602 - RNA, 19 nt, Artificial Sequence
  Description of Artificial Sequence: Synthetic oligonucleotide
  Antisense strand to SEQ ID NO: 583601
cucaauacacacauuacuu

SEQ ID NO: 583603 - RNA, 19 nt, Artificial Sequence
  Description of Artificial Sequence: Synthetic oligonucleotide
  Sense strand starting at position 3691 of SEQ ID NO: 318711
ugcuuugugacaguguguu

SEQ ID NO: 583604 - RNA, 19 nt, Artificial Sequence
  Description of Artificial Sequence: Synthetic oligonucleotide
  Antisense strand to SEQ ID NO: 583603
aacacacugucacaaagca

SEQ ID NO: 583605 - RNA, 19 nt, Artificial Sequence
  Description of Artificial Sequence: Synthetic oligonucleotide
  Sense strand starting at position 3695 of SEQ ID NO: 318711
uugugacaguguguuagau

SEQ ID NO: 583606 - RNA, 19 nt, Artificial Sequence
  Description of Artificial Sequence: Synthetic oligonucleotide
  Antisense strand to SEQ ID NO: 583605
aucuaacacacugucacaa

SEQ ID NO: 583607 - RNA, 19 nt, Artificial Sequence
  Description of Artificial Sequence: Synthetic oligonucleotide
  Sense strand starting at position 3703 of SEQ ID NO: 318711
guguguuagaugcuuugcu

SEQ ID NO: 583608 - RNA, 19 nt, Artificial Sequence
  Description of Artificial Sequence: Synthetic oligonucleotide
  Antisense strand to SEQ ID NO: 583607
agcaaagcaucuaacacac

SEQ ID NO: 583609 - RNA, 19 nt, Artificial Sequence
  Description of Artificial Sequence: Synthetic oligonucleotide
  Sense strand starting at position 3718 of SEQ ID NO: 318711
ugcuuacguuaucucauuu

SEQ ID NO: 583610 - RNA, 19 nt, Artificial Sequence
  Description of Artificial Sequence: Synthetic oligonucleotide
  Antisense strand to SEQ ID NO: 583609
aaaugagauaacguaagca

SEQ ID NO: 583611 - RNA, 19 nt, Artificial Sequence
  Description of Artificial Sequence: Synthetic oligonucleotide
  Sense strand starting at position 3906 of SEQ ID NO: 318711
gugugaggguaaagagaau

SEQ ID NO: 583612 - RNA, 19 nt, Artificial Sequence
  Description of Artificial Sequence: Synthetic oligonucleotide
  Antisense strand to SEQ ID NO: 583611
auucucuuuacccucacac

SEQ ID NO: 583613 - RNA, 19 nt, Artificial Sequence
  Description of Artificial Sequence: Synthetic oligonucleotide
  Sense strand starting at position 3965 of SEQ ID NO: 318711
aguauauacaauggucagu

SEQ ID NO: 583614 - RNA, 19 nt, Artificial Sequence
  Description of Artificial Sequence: Synthetic oligonucleotide
  Antisense strand to SEQ ID NO: 583613
acugaccauuguauauacu

SEQ ID NO: 583615 - RNA, 19 nt, Artificial Sequence
  Description of Artificial Sequence: Synthetic oligonucleotide
  Sense strand starting at position 205 of SEQ ID NO: 318712
gcaagaaggacguaauccu

SEQ ID NO: 583616 - RNA, 19 nt, Artificial Sequence
  Description of Artificial Sequence: Synthetic oligonucleotide
  Antisense strand to SEQ ID NO: 583615
aggauuacguccuucuugc

SEQ ID NO: 583617 - RNA, 19 nt, Artificial Sequence
  Description of Artificial Sequence: Synthetic oligonucleotide
  Sense strand starting at position 278 of SEQ ID NO: 318712
augcauucuuggcugcaga

SEQ ID NO: 583618 - RNA, 19 nt, Artificial Sequence
  Description of Artificial Sequence: Synthetic oligonucleotide
  Antisense strand to SEQ ID NO: 583617
ucugcagccaagaaugcau

SEQ ID NO: 583619 - RNA, 19 nt, Artificial Sequence
  Description of Artificial Sequence: Synthetic oligonucleotide
  Sense strand starting at position 783 of SEQ ID NO: 318712
gcagauacccuaggcauaa

SEQ ID NO: 583620 - RNA, 19 nt, Artificial Sequence
  Description of Artificial Sequence: Synthetic oligonucleotide
  Antisense strand to SEQ ID NO: 583619
uuaugccuaggguaucugc

SEQ ID NO: 583621 - RNA, 19 nt, Artificial Sequence
  Description of Artificial Sequence: Synthetic oligonucleotide
  Sense strand starting at position 853 of SEQ ID NO: 318712
cuaggaaaugccuguuaca

SEQ ID NO: 583622 - RNA, 19 nt, Artificial Sequence
  Description of Artificial Sequence: Synthetic oligonucleotide
  Antisense strand to SEQ ID NO: 583621
uguaacaggcauuuccuag

SEQ ID NO: 583623 - RNA, 19 nt, Artificial Sequence
  Description of Artificial Sequence: Synthetic oligonucleotide
  Sense strand starting at position 957 of SEQ ID NO: 318712
aauguacacguuugaaaca

SEQ ID NO: 583624 - RNA, 19 nt, Artificial Sequence
  Description of Artificial Sequence: Synthetic oligonucleotide
  Antisense strand to SEQ ID NO: 583623
uguuucaaacguguacauu

SEQ ID NO: 583625 - RNA, 19 nt, Artificial Sequence
  Description of Artificial Sequence: Synthetic oligonucleotide
  Sense strand starting at position 1025 of SEQ ID NO: 318712
gcaccaacucccugaugua

SEQ ID NO: 583626 - RNA, 19 nt, Artificial Sequence
  Description of Artificial Sequence: Synthetic oligonucleotide
  Antisense strand to SEQ ID NO: 583625
uacaucagggaguuggugc

SEQ ID NO: 583627 - RNA, 19 nt, Artificial Sequence
  Description of Artificial Sequence: Synthetic oligonucleotide
  Sense strand starting at position 1063 of SEQ ID NO: 318712
acuacuaagcucuagcuga

SEQ ID NO: 583628 - RNA, 19 nt, Artificial Sequence
  Description of Artificial Sequence: Synthetic oligonucleotide
  Antisense strand to SEQ ID NO: 583627
ucagcuagagcuuaguagu

SEQ ID NO: 583629 - RNA, 19 nt, Artificial Sequence
  Description of Artificial Sequence: Synthetic oligonucleotide
  Sense strand starting at position 1136 of SEQ ID NO: 318712
ucuugauugggccaggaau

SEQ ID NO: 583630 - RNA, 19 nt, Artificial Sequence
  Description of Artificial Sequence: Synthetic oligonucleotide
  Antisense strand to SEQ ID NO: 583629
auuccuggcccaaucaaga

SEQ ID NO: 583631 - RNA, 19 nt, Artificial Sequence
  Description of Artificial Sequence: Synthetic oligonucleotide
  Sense strand starting at position 1138 of SEQ ID NO: 318712
uugauugggccaggaaugu

SEQ ID NO: 583632 - RNA, 19 nt, Artificial Sequence
  Description of Artificial Sequence: Synthetic oligonucleotide
  Antisense strand to SEQ ID NO: 583631
acauuccuggcccaaucaa

SEQ ID NO: 583633 - RNA, 19 nt, Artificial Sequence
  Description of Artificial Sequence: Synthetic oligonucleotide
  Sense strand starting at position 1147 of SEQ ID NO: 318712
ccaggaauguucucucccu

SEQ ID NO: 583634 - RNA, 19 nt, Artificial Sequence
  Description of Artificial Sequence: Synthetic oligonucleotide
  Antisense strand to SEQ ID NO: 583633
agggagagaacauuccugg

SEQ ID NO: 583635 - RNA, 19 nt, Artificial Sequence
  Description of Artificial Sequence: Synthetic oligonucleotide
  Sense strand starting at position 1192 of SEQ ID NO: 318712
gucacugauagcgguaaug

SEQ ID NO: 583636 - RNA, 19 nt, Artificial Sequence
  Description of Artificial Sequence: Synthetic oligonucleotide
  Antisense strand to SEQ ID NO: 583635
cauuaccgcuaucagugac

SEQ ID NO: 583637 - RNA, 19 nt, Artificial Sequence
  Description of Artificial Sequence: Synthetic oligonucleotide
  Sense strand starting at position 1194 of SEQ ID NO: 318712
cacugauagcgguaaugca

SEQ ID NO: 583638 - RNA, 19 nt, Artificial Sequence
  Description of Artificial Sequence: Synthetic oligonucleotide
  Antisense strand to SEQ ID NO: 583637
ugcauuaccgcuaucagug

SEQ ID NO: 583639 - RNA, 19 nt, Artificial Sequence
  Description of Artificial Sequence: Synthetic oligonucleotide
  Sense strand starting at position 1251 of SEQ ID NO: 318712
uaaggaugccguuaucuuc

SEQ ID NO: 583640 - RNA, 19 nt, Artificial Sequence
  Description of Artificial Sequence: Synthetic oligonucleotide
  Antisense strand to SEQ ID NO: 583639
gaagauaacggcauccuua

SEQ ID NO: 583641 - RNA, 19 nt, Artificial Sequence
  Description of Artificial Sequence: Synthetic oligonucleotide
  Sense strand starting at position 1257 of SEQ ID NO: 318712
ugccguuaucuucucugua

SEQ ID NO: 583642 - RNA, 19 nt, Artificial Sequence
  Description of Artificial Sequence: Synthetic oligonucleotide
  Antisense strand to SEQ ID NO: 583641
uacagagaagauaacggca

SEQ ID NO: 583643 - RNA, 19 nt, Artificial Sequence
  Description of Artificial Sequence: Synthetic oligonucleotide
  Sense strand starting at position 1259 of SEQ ID NO: 318712
ccguuaucuucucuguacu

SEQ ID NO: 583644 - RNA, 19 nt, Artificial Sequence
  Description of Artificial Sequence: Synthetic oligonucleotide
  Antisense strand to SEQ ID NO: 583643
aguacagagaagauaacgg

SEQ ID NO: 583645 - RNA, 19 nt, Artificial Sequence
  Description of Artificial Sequence: Synthetic oligonucleotide
  Sense strand starting at position 1260 of SEQ ID NO: 318712
cguuaucuucucuguacuu

SEQ ID NO: 583646 - RNA, 19 nt, Artificial Sequence
  Description of Artificial Sequence: Synthetic oligonucleotide
  Antisense strand to SEQ ID NO: 583645
aaguacagagaagauaacg

SEQ ID NO: 583647 - RNA, 19 nt, Artificial Sequence
  Description of Artificial Sequence: Synthetic oligonucleotide
  Sense strand starting at position 1420 of SEQ ID NO: 318712
agcacucugccagagcuua

SEQ ID NO: 583648 - RNA, 19 nt, Artificial Sequence
  Description of Artificial Sequence: Synthetic oligonucleotide
  Antisense strand to SEQ ID NO: 583647
uaagcucuggcagagugcu

SEQ ID NO: 583649 - RNA, 19 nt, Artificial Sequence
  Description of Artificial Sequence: Synthetic oligonucleotide
  Sense strand starting at position 1486 of SEQ ID NO: 318712
aucgcaucgccucugugau

SEQ ID NO: 583650 - RNA, 19 nt, Artificial Sequence
  Description of Artificial Sequence: Synthetic oligonucleotide
  Antisense strand to SEQ ID NO: 583649
aucacagaggcgaugcgau

SEQ ID NO: 583651 - RNA, 19 nt, Artificial Sequence
  Description of Artificial Sequence: Synthetic oligonucleotide
  Sense strand starting at position 1505 of SEQ ID NO: 318712
acccuuagcccuugaugua

SEQ ID NO: 583652 - RNA, 19 nt, Artificial Sequence
  Description of Artificial Sequence: Synthetic oligonucleotide
  Antisense strand to SEQ ID NO: 583651
uacaucaagggcuaagggu

SEQ ID NO: 583653 - RNA, 19 nt, Artificial Sequence
  Description of Artificial Sequence: Synthetic oligonucleotide
  Sense strand starting at position 1740 of SEQ ID NO: 318712
cucuuuggacuguacgaga

SEQ ID NO: 583654 - RNA, 19 nt, Artificial Sequence
  Description of Artificial Sequence: Synthetic oligonucleotide
  Antisense strand to SEQ ID NO: 583653
ucucguacaguccaaagag

SEQ ID NO: 583655 - RNA, 19 nt, Artificial Sequence
  Description of Artificial Sequence: Synthetic oligonucleotide
  Sense strand starting at position 1751 of SEQ ID NO: 318712
guacgagaagacugaggua

SEQ ID NO: 583656 - RNA, 19 nt, Artificial Sequence
  Description of Artificial Sequence: Synthetic oligonucleotide
  Antisense strand to SEQ ID NO: 583655
uaccucagucuucucguac

SEQ ID NO: 583657 - RNA, 19 nt, Artificial Sequence
  Description of Artificial Sequence: Synthetic oligonucleotide
  Sense strand starting at position 1786 of SEQ ID NO: 318712
ccgagaaaccuccgcgauu

SEQ ID NO: 583658 - RNA, 19 nt, Artificial Sequence
  Description of Artificial Sequence: Synthetic oligonucleotide
  Antisense strand to SEQ ID NO: 583657
aaucgcggagguuucucgg

SEQ ID NO: 583659 - RNA, 19 nt, Artificial Sequence
  Description of Artificial Sequence: Synthetic oligonucleotide
  Sense strand starting at position 1787 of SEQ ID NO: 318712
cgagaaaccuccgcgauuc

SEQ ID NO: 583660 - RNA, 19 nt, Artificial Sequence
  Description of Artificial Sequence: Synthetic oligonucleotide
  Antisense strand to SEQ ID NO: 583659
gaaucgcggagguuucucg

SEQ ID NO: 583661 - RNA, 19 nt, Artificial Sequence
  Description of Artificial Sequence: Synthetic oligonucleotide
  Sense strand starting at position 1788 of SEQ ID NO: 318712
gagaaaccuccgcgauucu

SEQ ID NO: 583662 - RNA, 19 nt, Artificial Sequence
  Description of Artificial Sequence: Synthetic oligonucleotide
  Antisense strand to SEQ ID NO: 583661
agaaucgcggagguuucuc

SEQ ID NO: 583663 - RNA, 19 nt, Artificial Sequence
  Description of Artificial Sequence: Synthetic oligonucleotide
  Sense strand starting at position 1789 of SEQ ID NO: 318712
agaaaccuccgcgauucua

SEQ ID NO: 583664 - RNA, 19 nt, Artificial Sequence
  Description of Artificial Sequence: Synthetic oligonucleotide
  Antisense strand to SEQ ID NO: 583663
uagaaucgcggagguuucu

SEQ ID NO: 583665 - RNA, 19 nt, Artificial Sequence
  Description of Artificial Sequence: Synthetic oligonucleotide
  Sense strand starting at position 1856 of SEQ ID NO: 318712
cugggaucucgaggagaua

SEQ ID NO: 583666 - RNA, 19 nt, Artificial Sequence
  Description of Artificial Sequence: Synthetic oligonucleotide
  Antisense strand to SEQ ID NO: 583665
uaucuccucgagaucccag

SEQ ID NO: 583667 - RNA, 19 nt, Artificial Sequence
  Description of Artificial Sequence: Synthetic oligonucleotide
  Sense strand starting at position 1893 of SEQ ID NO: 318712
gcaggaguuugucucuauu

SEQ ID NO: 583668 - RNA, 19 nt, Artificial Sequence
  Description of Artificial Sequence: Synthetic oligonucleotide
  Antisense strand to SEQ ID NO: 583667
aauagagacaaacuccugc

SEQ ID NO: 583669 - RNA, 19 nt, Artificial Sequence
  Description of Artificial Sequence: Synthetic oligonucleotide
  Sense strand starting at position 2073 of SEQ ID NO: 318712
ggagucuuguguucuaaac

SEQ ID NO: 583670 - RNA, 19 nt, Artificial Sequence
  Description of Artificial Sequence: Synthetic oligonucleotide
  Antisense strand to SEQ ID NO: 583669
guuuagaacacaagacucc

SEQ ID NO: 583671 - RNA, 19 nt, Artificial Sequence
  Description of Artificial Sequence: Synthetic oligonucleotide
  Sense strand starting at position 2079 of SEQ ID NO: 318712
uuguguucuaaacgagcua

SEQ ID NO: 583672 - RNA, 19 nt, Artificial Sequence
  Description of Artificial Sequence: Synthetic oligonucleotide
  Antisense strand to SEQ ID NO: 583671
uagcucguuuagaacacaa

SEQ ID NO: 583673 - RNA, 19 nt, Artificial Sequence
  Description of Artificial Sequence: Synthetic oligonucleotide
  Sense strand starting at position 2080 of SEQ ID NO: 318712
uguguucuaaacgagcuaa

SEQ ID NO: 583674 - RNA, 19 nt, Artificial Sequence
  Description of Artificial Sequence: Synthetic oligonucleotide
  Antisense strand to SEQ ID NO: 583673
uuagcucguuuagaacaca

SEQ ID NO: 583675 - RNA, 19 nt, Artificial Sequence
  Description of Artificial Sequence: Synthetic oligonucleotide
  Sense strand starting at position 2294 of SEQ ID NO: 318712
aacaguggucucugaucua

SEQ ID NO: 583676 - RNA, 19 nt, Artificial Sequence
  Description of Artificial Sequence: Synthetic oligonucleotide
  Antisense strand to SEQ ID NO: 583675
uagaucagagaccacuguu

SEQ ID NO: 583677 - RNA, 19 nt, Artificial Sequence
  Description of Artificial Sequence: Synthetic oligonucleotide
  Sense strand starting at position 2404 of SEQ ID NO: 318712
gcaugcacuagggauauga

SEQ ID NO: 583678 - RNA, 19 nt, Artificial Sequence
  Description of Artificial Sequence: Synthetic oligonucleotide
  Antisense strand to SEQ ID NO: 583677
ucauaucccuagugcaugc

SEQ ID NO: 583679 - RNA, 19 nt, Artificial Sequence
  Description of Artificial Sequence: Synthetic oligonucleotide
  Sense strand starting at position 2433 of SEQ ID NO: 318712
cacugaaacguuugcaaca

SEQ ID NO: 583680 - RNA, 19 nt, Artificial Sequence
  Description of Artificial Sequence: Synthetic oligonucleotide
  Antisense strand to SEQ ID NO: 583679
uguugcaaacguuucagug

SEQ ID NO: 583681 - RNA, 19 nt, Artificial Sequence
  Description of Artificial Sequence: Synthetic oligonucleotide
  Sense strand starting at position 2558 of SEQ ID NO: 318712
ggaacuuuauaguagaaca

SEQ ID NO: 583682 - RNA, 19 nt, Artificial Sequence
  Description of Artificial Sequence: Synthetic oligonucleotide
  Antisense strand to SEQ ID NO: 583681
uguucuacuauaaaguucc

SEQ ID NO: 583683 - RNA, 19 nt, Artificial Sequence
  Description of Artificial Sequence: Synthetic oligonucleotide
  Sense strand starting at position 2631 of SEQ ID NO: 318712
agugaagcacuguggcaua

SEQ ID NO: 583684 - RNA, 19 nt, Artificial Sequence
  Description of Artificial Sequence: Synthetic oligonucleotide
  Antisense strand to SEQ ID NO: 583683
uaugccacagugcuucacu

SEQ ID NO: 583685 - RNA, 19 nt, Artificial Sequence
  Description of Artificial Sequence: Synthetic oligonucleotide
  Sense strand starting at position 2644 of SEQ ID NO: 318712
ggcauaccggcucacuaua

SEQ ID NO: 583686 - RNA, 19 nt, Artificial Sequence
  Description of Artificial Sequence: Synthetic oligonucleotide
  Antisense strand to SEQ ID NO: 583685
uauagugagccgguaugcc

SEQ ID NO: 583687 - RNA, 19 nt, Artificial Sequence
  Description of Artificial Sequence: Synthetic oligonucleotide
  Sense strand starting at position 2652 of SEQ ID NO: 318712
ggcucacuauauguugauu

SEQ ID NO: 583688 - RNA, 19 nt, Artificial Sequence
  Description of Artificial Sequence: Synthetic oligonucleotide
  Antisense strand to SEQ ID NO: 583687
aaucaacauauagugagcc

SEQ ID NO: 583689 - RNA, 19 nt, Artificial Sequence
  Description of Artificial Sequence: Synthetic oligonucleotide
  Sense strand starting at position 3003 of SEQ ID NO: 318712
ggcugcucaucacugaaua

SEQ ID NO: 583690 - RNA, 19 nt, Artificial Sequence
  Description of Artificial Sequence: Synthetic oligonucleotide
  Antisense strand to SEQ ID NO: 583689
uauucagugaugagcagcc

SEQ ID NO: 583691 - RNA, 19 nt, Artificial Sequence
  Description of Artificial Sequence: Synthetic oligonucleotide
  Sense strand starting at position 3087 of SEQ ID NO: 318712
uucuauggucuaugcaaac

SEQ ID NO: 583692 - RNA, 19 nt, Artificial Sequence
  Description of Artificial Sequence: Synthetic oligonucleotide
  Antisense strand to SEQ ID NO: 583691
guuugcauagaccauagaa

SEQ ID NO: 583693 - RNA, 19 nt, Artificial Sequence
  Description of Artificial Sequence: Synthetic oligonucleotide
  Sense strand starting at position 3963 of SEQ ID NO: 318712
auaagagaauccucaugug

SEQ ID NO: 583694 - RNA, 19 nt, Artificial Sequence
  Description of Artificial Sequence: Synthetic oligonucleotide
  Antisense strand to SEQ ID NO: 583693
cacaugaggauucucuuau

SEQ ID NO: 583695 - RNA, 19 nt, Artificial Sequence
  Description of Artificial Sequence: Synthetic oligonucleotide
  Sense strand starting at position 67 of SEQ ID NO: 318713
uuccuauggugucuugaua

SEQ ID NO: 583696 - RNA, 19 nt, Artificial Sequence
  Description of Artificial Sequence: Synthetic oligonucleotide
  Antisense strand to SEQ ID NO: 583695
uaucaagacaccauaggaa

SEQ ID NO: 583697 - RNA, 19 nt, Artificial Sequence
  Description of Artificial Sequence: Synthetic oligonucleotide
  Sense strand starting at position 105 of SEQ ID NO: 318713
accaauuguuugcuaagua

SEQ ID NO: 583698 - RNA, 19 nt, Artificial Sequence
  Description of Artificial Sequence: Synthetic oligonucleotide
  Antisense strand to SEQ ID NO: 583697
uacuuagcaaacaauuggu

SEQ ID NO: 583699 - RNA, 19 nt, Artificial Sequence
  Description of Artificial Sequence: Synthetic oligonucleotide
  Sense strand starting at position 110 of SEQ ID NO: 318713
uuguuugcuaaguauugua

SEQ ID NO: 583700 - RNA, 19 nt, Artificial Sequence
  Description of Artificial Sequence: Synthetic oligonucleotide
  Antisense strand to SEQ ID NO: 583699
uacaauacuuagcaaacaa

SEQ ID NO: 583701 - RNA, 19 nt, Artificial Sequence
  Description of Artificial Sequence: Synthetic oligonucleotide
  Sense strand starting at position 453 of SEQ ID NO: 318713
ggcagcuaucuuggcaaau

SEQ ID NO: 583702 - RNA, 19 nt, Artificial Sequence
  Description of Artificial Sequence: Synthetic oligonucleotide
  Antisense strand to SEQ ID NO: 583701
auuugccaagauagcugcc

SEQ ID NO: 583703 - RNA, 19 nt, Artificial Sequence
  Description of Artificial Sequence: Synthetic oligonucleotide
  Sense strand starting at position 454 of SEQ ID NO: 318713
gcagcuaucuuggcaaaug

SEQ ID NO: 583704 - RNA, 19 nt, Artificial Sequence
  Description of Artificial Sequence: Synthetic oligonucleotide
  Antisense strand to SEQ ID NO: 583703
cauuugccaagauagcugc

SEQ ID NO: 583705 - RNA, 19 nt, Artificial Sequence
  Description of Artificial Sequence: Synthetic oligonucleotide
  Sense strand starting at position 465 of SEQ ID NO: 318713
ggcaaauguuaaucucaau

SEQ ID NO: 583706 - RNA, 19 nt, Artificial Sequence
  Description of Artificial Sequence: Synthetic oligonucleotide
  Antisense strand to SEQ ID NO: 583705
auugagauuaacauuugcc

SEQ ID NO: 583707 - RNA, 19 nt, Artificial Sequence
  Description of Artificial Sequence: Synthetic oligonucleotide
  Sense strand starting at position 689 of SEQ ID NO: 318713
gcuggauaugucugcuaug

SEQ ID NO: 583708 - RNA, 19 nt, Artificial Sequence
  Description of Artificial Sequence: Synthetic oligonucleotide
  Antisense strand to SEQ ID NO: 583707
cauagcagacauauccagc

SEQ ID NO: 583709 - RNA, 19 nt, Artificial Sequence
  Description of Artificial Sequence: Synthetic oligonucleotide
  Sense strand starting at position 690 of SEQ ID NO: 318713
cuggauaugucugcuauga

SEQ ID NO: 583710 - RNA, 19 nt, Artificial Sequence
  Description of Artificial Sequence: Synthetic oligonucleotide
  Antisense strand to SEQ ID NO: 583709
ucauagcagacauauccag

SEQ ID NO: 583711 - RNA, 19 nt, Artificial Sequence
  Description of Artificial Sequence: Synthetic oligonucleotide
  Sense strand starting at position 735 of SEQ ID NO: 318713
ggaagcuccaucuauggua

SEQ ID NO: 583712 - RNA, 19 nt, Artificial Sequence
  Description of Artificial Sequence: Synthetic oligonucleotide
  Antisense strand to SEQ ID NO: 583711
uaccauagauggagcuucc

SEQ ID NO: 583713 - RNA, 19 nt, Artificial Sequence
  Description of Artificial Sequence: Synthetic oligonucleotide
  Sense strand starting at position 737 of SEQ ID NO: 318713
aagcuccaucuaugguaga

SEQ ID NO: 583714 - RNA, 19 nt, Artificial Sequence
  Description of Artificial Sequence: Synthetic oligonucleotide
  Antisense strand to SEQ ID NO: 583713
ucuaccauagauggagcuu

SEQ ID NO: 583715 - RNA, 19 nt, Artificial Sequence
  Description of Artificial Sequence: Synthetic oligonucleotide
  Sense strand starting at position 898 of SEQ ID NO: 318713
guaugagugcugcaaugga

SEQ ID NO: 583716 - RNA, 19 nt, Artificial Sequence
  Description of Artificial Sequence: Synthetic oligonucleotide
  Antisense strand to SEQ ID NO: 583715
uccauugcagcacucauac

SEQ ID NO: 583717 - RNA, 19 nt, Artificial Sequence
  Description of Artificial Sequence: Synthetic oligonucleotide
  Sense strand starting at position 1175 of SEQ ID NO: 318713
agugcaaucuggucccagu

SEQ ID NO: 583718 - RNA, 19 nt, Artificial Sequence
  Description of Artificial Sequence: Synthetic oligonucleotide
  Antisense strand to SEQ ID NO: 583717
acugggaccagauugcacu

SEQ ID NO: 583719 - RNA, 19 nt, Artificial Sequence
  Description of Artificial Sequence: Synthetic oligonucleotide
  Sense strand starting at position 1680 of SEQ ID NO: 318713
ccuaauuggagucgggaga

SEQ ID NO: 583720 - RNA, 19 nt, Artificial Sequence
  Description of Artificial Sequence: Synthetic oligonucleotide
  Antisense strand to SEQ ID NO: 583719
ucucccgacuccaauuagg

SEQ ID NO: 583721 - RNA, 19 nt, Artificial Sequence
  Description of Artificial Sequence: Synthetic oligonucleotide
  Sense strand starting at position 2128 of SEQ ID NO: 318713
agggcuugcucucugagaa

SEQ ID NO: 583722 - RNA, 19 nt, Artificial Sequence
  Description of Artificial Sequence: Synthetic oligonucleotide
  Antisense strand to SEQ ID NO: 583721
uucucagagagcaagcccu

SEQ ID NO: 583723 - RNA, 19 nt, Artificial Sequence
  Description of Artificial Sequence: Synthetic oligonucleotide
  Sense strand starting at position 2129 of SEQ ID NO: 318713
gggcuugcucucugagaag

SEQ ID NO: 583724 - RNA, 19 nt, Artificial Sequence
  Description of Artificial Sequence: Synthetic oligonucleotide
  Antisense strand to SEQ ID NO: 583723
cuucucagagagcaagccc

SEQ ID NO: 583725 - RNA, 19 nt, Artificial Sequence
  Description of Artificial Sequence: Synthetic oligonucleotide
  Sense strand starting at position 2282 of SEQ ID NO: 318713
gaaugaacucgccaaccgu

SEQ ID NO: 583726 - RNA, 19 nt, Artificial Sequence
  Description of Artificial Sequence: Synthetic oligonucleotide
  Antisense strand to SEQ ID NO: 583725
acgguuggcgaguucauuc

SEQ ID NO: 583727 - RNA, 19 nt, Artificial Sequence
  Description of Artificial Sequence: Synthetic oligonucleotide
  Sense strand starting at position 2636 of SEQ ID NO: 318713
ggaaucuuccuccgcgaag

SEQ ID NO: 583728 - RNA, 19 nt, Artificial Sequence
  Description of Artificial Sequence: Synthetic oligonucleotide
  Antisense strand to SEQ ID NO: 583727
cuucgcggaggaagauucc

SEQ ID NO: 583729 - RNA, 19 nt, Artificial Sequence
  Description of Artificial Sequence: Synthetic oligonucleotide
  Sense strand starting at position 2703 of SEQ ID NO: 318713
ccuggagcugcucagaauu

SEQ ID NO: 583730 - RNA, 19 nt, Artificial Sequence
  Description of Artificial Sequence: Synthetic oligonucleotide
  Antisense strand to SEQ ID NO: 583729
aauucugagcagcuccagg

SEQ ID NO: 583731 - RNA, 19 nt, Artificial Sequence
  Description of Artificial Sequence: Synthetic oligonucleotide
  Sense strand starting at position 3095 of SEQ ID NO: 318713
ugugacugcuuccuuaauu

SEQ ID NO: 583732 - RNA, 19 nt, Artificial Sequence
  Description of Artificial Sequence: Synthetic oligonucleotide
  Antisense strand to SEQ ID NO: 583731
aauuaaggaagcagucaca

SEQ ID NO: 583733 - RNA, 19 nt, Artificial Sequence
  Description of Artificial Sequence: Synthetic oligonucleotide
  Sense strand starting at position 3096 of SEQ ID NO: 318713
gugacugcuuccuuaauuc

SEQ ID NO: 583734 - RNA, 19 nt, Artificial Sequence
  Description of Artificial Sequence: Synthetic oligonucleotide
  Antisense strand to SEQ ID NO: 583733
gaauuaaggaagcagucac

SEQ ID NO: 583735 - RNA, 19 nt, Artificial Sequence
  Description of Artificial Sequence: Synthetic oligonucleotide
  Sense strand starting at position 3220 of SEQ ID NO: 318713
cucaaauagcuauauggua

SEQ ID NO: 583736 - RNA, 19 nt, Artificial Sequence
  Description of Artificial Sequence: Synthetic oligonucleotide
  Antisense strand to SEQ ID NO: 583735
uaccauauagcuauuugag

SEQ ID NO: 583737 - RNA, 19 nt, Artificial Sequence
  Description of Artificial Sequence: Synthetic oligonucleotide
  Sense strand starting at position 3271 of SEQ ID NO: 318713
ugagaauccuaguacuaga

SEQ ID NO: 583738 - RNA, 19 nt, Artificial Sequence
  Description of Artificial Sequence: Synthetic oligonucleotide
  Antisense strand to SEQ ID NO: 583737
ucuaguacuaggauucuca

SEQ ID NO: 583739 - RNA, 19 nt, Artificial Sequence
  Description of Artificial Sequence: Synthetic oligonucleotide
  Sense strand starting at position 3296 of SEQ ID NO: 318713
gaaguccagcugugaacaa

SEQ ID NO: 583740 - RNA, 19 nt, Artificial Sequence
  Description of Artificial Sequence: Synthetic oligonucleotide
  Antisense strand to SEQ ID NO: 583739
uuguucacagcuggacuuc

SEQ ID NO: 583741 - RNA, 19 nt, Artificial Sequence
  Description of Artificial Sequence: Synthetic oligonucleotide
  Sense strand starting at position 3303 of SEQ ID NO: 318713
agcugugaacaagguauau

SEQ ID NO: 583742 - RNA, 19 nt, Artificial Sequence
  Description of Artificial Sequence: Synthetic oligonucleotide
  Antisense strand to SEQ ID NO: 583741
auauaccuuguucacagcu

SEQ ID NO: 583743 - RNA, 19 nt, Artificial Sequence
  Description of Artificial Sequence: Synthetic oligonucleotide
  Sense strand starting at position 3305 of SEQ ID NO: 318713
cugugaacaagguauaugu

SEQ ID NO: 583744 - RNA, 19 nt, Artificial Sequence
  Description of Artificial Sequence: Synthetic oligonucleotide
  Antisense strand to SEQ ID NO: 583743
acauauaccuuguucacag

SEQ ID NO: 583745 - RNA, 19 nt, Artificial Sequence
  Description of Artificial Sequence: Synthetic oligonucleotide
  Sense strand starting at position 3309 of SEQ ID NO: 318713
gaacaagguauaugugguu

SEQ ID NO: 583746 - RNA, 19 nt, Artificial Sequence
  Description of Artificial Sequence: Synthetic oligonucleotide
  Antisense strand to SEQ ID NO: 583745
aaccacauauaccuuguuc

SEQ ID NO: 583747 - RNA, 19 nt, Artificial Sequence
  Description of Artificial Sequence: Synthetic oligonucleotide
  Sense strand starting at position 3336 of SEQ ID NO: 318713
ucugaaucuuaagucuagu

SEQ ID NO: 583748 - RNA, 19 nt, Artificial Sequence
  Description of Artificial Sequence: Synthetic oligonucleotide
  Antisense strand to SEQ ID NO: 583747
acuagacuuaagauucaga

SEQ ID NO: 583749 - RNA, 19 nt, Artificial Sequence
  Description of Artificial Sequence: Synthetic oligonucleotide
  Sense strand starting at position 3349 of SEQ ID NO: 318713
ucuaguagacugcauagau

SEQ ID NO: 583750 - RNA, 19 nt, Artificial Sequence
  Description of Artificial Sequence: Synthetic oligonucleotide
  Antisense strand to SEQ ID NO: 583749
aucuaugcagucuacuaga

SEQ ID NO: 583751 - RNA, 19 nt, Artificial Sequence
  Description of Artificial Sequence: Synthetic oligonucleotide
  Sense strand starting at position 3424 of SEQ ID NO: 318713
cgaaguaacugggugucaa

SEQ ID NO: 583752 - RNA, 19 nt, Artificial Sequence
  Description of Artificial Sequence: Synthetic oligonucleotide
  Antisense strand to SEQ ID NO: 583751
uugacacccaguuacuucg

SEQ ID NO: 583753 - RNA, 19 nt, Artificial Sequence
  Description of Artificial Sequence: Synthetic oligonucleotide
  Sense strand starting at position 3425 of SEQ ID NO: 318713
gaaguaacugggugucaag

SEQ ID NO: 583754 - RNA, 19 nt, Artificial Sequence
  Description of Artificial Sequence: Synthetic oligonucleotide
  Antisense strand to SEQ ID NO: 583753
cuugacacccaguuacuuc

SEQ ID NO: 583755 - RNA, 19 nt, Artificial Sequence
  Description of Artificial Sequence: Synthetic oligonucleotide
  Sense strand starting at position 3534 of SEQ ID NO: 318713
aggaguucagcccaggagu

SEQ ID NO: 583756 - RNA, 19 nt, Artificial Sequence
  Description of Artificial Sequence: Synthetic oligonucleotide
  Antisense strand to SEQ ID NO: 583755
acuccugggcugaacuccu

SEQ ID NO: 583757 - RNA, 19 nt, Artificial Sequence
  Description of Artificial Sequence: Synthetic oligonucleotide
  Sense strand starting at position 3615 of SEQ ID NO: 318713
ugaugugaagucuaagugu

SEQ ID NO: 583758 - RNA, 19 nt, Artificial Sequence
  Description of Artificial Sequence: Synthetic oligonucleotide
  Antisense strand to SEQ ID NO: 583757
acacuuagacuucacauca

SEQ ID NO: 583759 - RNA, 19 nt, Artificial Sequence
  Description of Artificial Sequence: Synthetic oligonucleotide
  Sense strand starting at position 3618 of SEQ ID NO: 318713
ugugaagucuaaguguucu

SEQ ID NO: 583760 - RNA, 19 nt, Artificial Sequence
  Description of Artificial Sequence: Synthetic oligonucleotide
  Antisense strand to SEQ ID NO: 583759
agaacacuuagacuucaca

SEQ ID NO: 583761 - RNA, 19 nt, Artificial Sequence
  Description of Artificial Sequence: Synthetic oligonucleotide
  Sense strand starting at position 3691 of SEQ ID NO: 318713
gaaacaauguugcuggaua

SEQ ID NO: 583762 - RNA, 19 nt, Artificial Sequence
  Description of Artificial Sequence: Synthetic oligonucleotide
  Antisense strand to SEQ ID NO: 583761
uauccagcaacauuguuuc

SEQ ID NO: 583763 - RNA, 19 nt, Artificial Sequence
  Description of Artificial Sequence: Synthetic oligonucleotide
  Sense strand starting at position 3713 of SEQ ID NO: 318713
gcacaagggugccuuauaa

SEQ ID NO: 583764 - RNA, 19 nt, Artificial Sequence
  Description of Artificial Sequence: Synthetic oligonucleotide
  Antisense strand to SEQ ID NO: 583763
uuauaaggcacccuugugc

SEQ ID NO: 583765 - RNA, 19 nt, Artificial Sequence
  Description of Artificial Sequence: Synthetic oligonucleotide
  Sense strand starting at position 3733 of SEQ ID NO: 318713
aaguguugaagaugucaga

SEQ ID NO: 583766 - RNA, 19 nt, Artificial Sequence
  Description of Artificial Sequence: Synthetic oligonucleotide
  Antisense strand to SEQ ID NO: 583765
ucugacaucuucaacacuu

SEQ ID NO: 583767 - RNA, 19 nt, Artificial Sequence
  Description of Artificial Sequence: Synthetic oligonucleotide
  Sense strand starting at position 3736 of SEQ ID NO: 318713
uguugaagaugucagauuu

SEQ ID NO: 583768 - RNA, 19 nt, Artificial Sequence
  Description of Artificial Sequence: Synthetic oligonucleotide
  Antisense strand to SEQ ID NO: 583767
aaaucugacaucuucaaca

SEQ ID NO: 583769 - RNA, 19 nt, Artificial Sequence
  Description of Artificial Sequence: Synthetic oligonucleotide
  Sense strand starting at position 3880 of SEQ ID NO: 318713
gggagacuguuaguaaugu

SEQ ID NO: 583770 - RNA, 19 nt, Artificial Sequence
  Description of Artificial Sequence: Synthetic oligonucleotide
  Antisense strand to SEQ ID NO: 583769
acauuacuaacagucuccc

SEQ ID NO: 583771 - RNA, 19 nt, Artificial Sequence
  Description of Artificial Sequence: Synthetic oligonucleotide
  Sense strand starting at position 3886 of SEQ ID NO: 318713
cuguuaguaauguagauga

SEQ ID NO: 583772 - RNA, 19 nt, Artificial Sequence
  Description of Artificial Sequence: Synthetic oligonucleotide
  Antisense strand to SEQ ID NO: 583771
ucaucuacauuacuaacag

SEQ ID NO: 583773 - RNA, 19 nt, Artificial Sequence
  Description of Artificial Sequence: Synthetic oligonucleotide
  Sense strand starting at position 3922 of SEQ ID NO: 318713
gaauuagagagcuggucag

SEQ ID NO: 583774 - RNA, 19 nt, Artificial Sequence
  Description of Artificial Sequence: Synthetic oligonucleotide
  Antisense strand to SEQ ID NO: 583773
cugaccagcucucuaauuc

SEQ ID NO: 583775 - RNA, 19 nt, Artificial Sequence
  Description of Artificial Sequence: Synthetic oligonucleotide
  Sense strand starting at position 53 of SEQ ID NO: 318714
uuccuauggugucuugaua

SEQ ID NO: 583776 - RNA, 19 nt, Artificial Sequence
  Description of Artificial Sequence: Synthetic oligonucleotide
  Antisense strand to SEQ ID NO: 583775
uaucaagacaccauaggaa

SEQ ID NO: 583777 - RNA, 19 nt, Artificial Sequence
  Description of Artificial Sequence: Synthetic oligonucleotide
  Sense strand starting at position 91 of SEQ ID NO: 318714
accaauuguuugcuaagua

SEQ ID NO: 583778 - RNA, 19 nt, Artificial Sequence
  Description of Artificial Sequence: Synthetic oligonucleotide
  Antisense strand to SEQ ID NO: 583777
uacuuagcaaacaauuggu

SEQ ID NO: 583779 - RNA, 19 nt, Artificial Sequence
  Description of Artificial Sequence: Synthetic oligonucleotide
  Sense strand starting at position 96 of SEQ ID NO: 318714
uuguuugcuaaguauugua

SEQ ID NO: 583780 - RNA, 19 nt, Artificial Sequence
  Description of Artificial Sequence: Synthetic oligonucleotide
  Antisense strand to SEQ ID NO: 583779
uacaauacuuagcaaacaa

SEQ ID NO: 583781 - RNA, 19 nt, Artificial Sequence
  Description of Artificial Sequence: Synthetic oligonucleotide
  Sense strand starting at position 439 of SEQ ID NO: 318714
ggcagcuaucuuggcaaau

SEQ ID NO: 583782 - RNA, 19 nt, Artificial Sequence
  Description of Artificial Sequence: Synthetic oligonucleotide
  Antisense strand to SEQ ID NO: 583781
auuugccaagauagcugcc

SEQ ID NO: 583783 - RNA, 19 nt, Artificial Sequence
  Description of Artificial Sequence: Synthetic oligonucleotide
  Sense strand starting at position 440 of SEQ ID NO: 318714
gcagcuaucuuggcaaaug

SEQ ID NO: 583784 - RNA, 19 nt, Artificial Sequence
  Description of Artificial Sequence: Synthetic oligonucleotide
  Antisense strand to SEQ ID NO: 583783
cauuugccaagauagcugc

SEQ ID NO: 583785 - RNA, 19 nt, Artificial Sequence
  Description of Artificial Sequence: Synthetic oligonucleotide
  Sense strand starting at position 451 of SEQ ID NO: 318714
ggcaaauguuaaucucaau

SEQ ID NO: 583786 - RNA, 19 nt, Artificial Sequence
  Description of Artificial Sequence: Synthetic oligonucleotide
  Antisense strand to SEQ ID NO: 583785
auugagauuaacauuugcc

SEQ ID NO: 583787 - RNA, 19 nt, Artificial Sequence
  Description of Artificial Sequence: Synthetic oligonucleotide
  Sense strand starting at position 675 of SEQ ID NO: 318714
gcuggauaugucugcuaug

SEQ ID NO: 583788 - RNA, 19 nt, Artificial Sequence
  Description of Artificial Sequence: Synthetic oligonucleotide
  Antisense strand to SEQ ID NO: 583787
cauagcagacauauccagc

SEQ ID NO: 583789 - RNA, 19 nt, Artificial Sequence
  Description of Artificial Sequence: Synthetic oligonucleotide
  Sense strand starting at position 676 of SEQ ID NO: 318714
cuggauaugucugcuauga

SEQ ID NO: 583790 - RNA, 19 nt, Artificial Sequence
  Description of Artificial Sequence: Synthetic oligonucleotide
  Antisense strand to SEQ ID NO: 583789
ucauagcagacauauccag

SEQ ID NO: 583791 - RNA, 19 nt, Artificial Sequence
  Description of Artificial Sequence: Synthetic oligonucleotide
  Sense strand starting at position 721 of SEQ ID NO: 318714
ggaagcuccaucuauggua

SEQ ID NO: 583792 - RNA, 19 nt, Artificial Sequence
  Description of Artificial Sequence: Synthetic oligonucleotide
  Antisense strand to SEQ ID NO: 583791
uaccauagauggagcuucc

SEQ ID NO: 583793 - RNA, 19 nt, Artificial Sequence
  Description of Artificial Sequence: Synthetic oligonucleotide
  Sense strand starting at position 723 of SEQ ID NO: 318714
aagcuccaucuaugguaga

SEQ ID NO: 583794 - RNA, 19 nt, Artificial Sequence
  Description of Artificial Sequence: Synthetic oligonucleotide
  Antisense strand to SEQ ID NO: 583793
ucuaccauagauggagcuu

SEQ ID NO: 583795 - RNA, 19 nt, Artificial Sequence
  Description of Artificial Sequence: Synthetic oligonucleotide
  Sense strand starting at position 884 of SEQ ID NO: 318714
guaugagugcugcaaugga

SEQ ID NO: 583796 - RNA, 19 nt, Artificial Sequence
  Description of Artificial Sequence: Synthetic oligonucleotide
  Antisense strand to SEQ ID NO: 583795
uccauugcagcacucauac

SEQ ID NO: 583797 - RNA, 19 nt, Artificial Sequence
  Description of Artificial Sequence: Synthetic oligonucleotide
  Sense strand starting at position 1161 of SEQ ID NO: 318714
agugcaaucuggucccagu

SEQ ID NO: 583798 - RNA, 19 nt, Artificial Sequence
  Description of Artificial Sequence: Synthetic oligonucleotide
  Antisense strand to SEQ ID NO: 583797
acugggaccagauugcacu

SEQ ID NO: 583799 - RNA, 19 nt, Artificial Sequence
  Description of Artificial Sequence: Synthetic oligonucleotide
  Sense strand starting at position 1666 of SEQ ID NO: 318714
ccuaauuggagucgggaga

SEQ ID NO: 583800 - RNA, 19 nt, Artificial Sequence
  Description of Artificial Sequence: Synthetic oligonucleotide
  Antisense strand to SEQ ID NO: 583799
ucucccgacuccaauuagg

SEQ ID NO: 583801 - RNA, 19 nt, Artificial Sequence
  Description of Artificial Sequence: Synthetic oligonucleotide
  Sense strand starting at position 2114 of SEQ ID NO: 318714
agggcuugcucucugagaa

SEQ ID NO: 583802 - RNA, 19 nt, Artificial Sequence
  Description of Artificial Sequence: Synthetic oligonucleotide
  Antisense strand to SEQ ID NO: 583801
uucucagagagcaagcccu

SEQ ID NO: 583803 - RNA, 19 nt, Artificial Sequence
  Description of Artificial Sequence: Synthetic oligonucleotide
  Sense strand starting at position 2115 of SEQ ID NO: 318714
gggcuugcucucugagaag

SEQ ID NO: 583804 - RNA, 19 nt, Artificial Sequence
  Description of Artificial Sequence: Synthetic oligonucleotide
  Antisense strand to SEQ ID NO: 583803
cuucucagagagcaagccc

SEQ ID NO: 583805 - RNA, 19 nt, Artificial Sequence
  Description of Artificial Sequence: Synthetic oligonucleotide
  Sense strand starting at position 2268 of SEQ ID NO: 318714
gaaugaacucgccaaccgu

SEQ ID NO: 583806 - RNA, 19 nt, Artificial Sequence
  Description of Artificial Sequence: Synthetic oligonucleotide
  Antisense strand to SEQ ID NO: 583805
acgguuggcgaguucauuc

SEQ ID NO: 583807 - RNA, 19 nt, Artificial Sequence
  Description of Artificial Sequence: Synthetic oligonucleotide
  Sense strand starting at position 2622 of SEQ ID NO: 318714
ggaaucuuccuccgcgaag

SEQ ID NO: 583808 - RNA, 19 nt, Artificial Sequence
  Description of Artificial Sequence: Synthetic oligonucleotide
  Antisense strand to SEQ ID NO: 583807
cuucgcggaggaagauucc

SEQ ID NO: 583809 - RNA, 19 nt, Artificial Sequence
  Description of Artificial Sequence: Synthetic oligonucleotide
  Sense strand starting at position 2689 of SEQ ID NO: 318714
ccuggagcugcucagaauu

SEQ ID NO: 583810 - RNA, 19 nt, Artificial Sequence
  Description of Artificial Sequence: Synthetic oligonucleotide
  Antisense strand to SEQ ID NO: 583809
aauucugagcagcuccagg

SEQ ID NO: 583811 - RNA, 19 nt, Artificial Sequence
  Description of Artificial Sequence: Synthetic oligonucleotide
  Sense strand starting at position 3081 of SEQ ID NO: 318714
ugugacugcuuccuuaauu

SEQ ID NO: 583812 - RNA, 19 nt, Artificial Sequence
  Description of Artificial Sequence: Synthetic oligonucleotide
  Antisense strand to SEQ ID NO: 583811
aauuaaggaagcagucaca

SEQ ID NO: 583813 - RNA, 19 nt, Artificial Sequence
  Description of Artificial Sequence: Synthetic oligonucleotide
  Sense strand starting at position 3082 of SEQ ID NO: 318714
gugacugcuuccuuaauuc

SEQ ID NO: 583814 - RNA, 19 nt, Artificial Sequence
  Description of Artificial Sequence: Synthetic oligonucleotide
  Antisense strand to SEQ ID NO: 583813
gaauuaaggaagcagucac

SEQ ID NO: 583815 - RNA, 19 nt, Artificial Sequence
  Description of Artificial Sequence: Synthetic oligonucleotide
  Sense strand starting at position 3206 of SEQ ID NO: 318714
cucaaauagcuauauggua

SEQ ID NO: 583816 - RNA, 19 nt, Artificial Sequence
  Description of Artificial Sequence: Synthetic oligonucleotide
  Antisense strand to SEQ ID NO: 583815
uaccauauagcuauuugag

SEQ ID NO: 583817 - RNA, 19 nt, Artificial Sequence
  Description of Artificial Sequence: Synthetic oligonucleotide
  Sense strand starting at position 3257 of SEQ ID NO: 318714
ugagaauccuaguacuaga

SEQ ID NO: 583818 - RNA, 19 nt, Artificial Sequence
  Description of Artificial Sequence: Synthetic oligonucleotide
  Antisense strand to SEQ ID NO: 583817
ucuaguacuaggauucuca

SEQ ID NO: 583819 - RNA, 19 nt, Artificial Sequence
  Description of Artificial Sequence: Synthetic oligonucleotide
  Sense strand starting at position 3282 of SEQ ID NO: 318714
gaaguccagcugugaacaa

SEQ ID NO: 583820 - RNA, 19 nt, Artificial Sequence
  Description of Artificial Sequence: Synthetic oligonucleotide
  Antisense strand to SEQ ID NO: 583819
uuguucacagcuggacuuc

SEQ ID NO: 583821 - RNA, 19 nt, Artificial Sequence
  Description of Artificial Sequence: Synthetic oligonucleotide
  Sense strand starting at position 3289 of SEQ ID NO: 318714
agcugugaacaagguauau

SEQ ID NO: 583822 - RNA, 19 nt, Artificial Sequence
  Description of Artificial Sequence: Synthetic oligonucleotide
  Antisense strand to SEQ ID NO: 583821
auauaccuuguucacagcu

SEQ ID NO: 583823 - RNA, 19 nt, Artificial Sequence
  Description of Artificial Sequence: Synthetic oligonucleotide
  Sense strand starting at position 3291 of SEQ ID NO: 318714
cugugaacaagguauaugu

SEQ ID NO: 583824 - RNA, 19 nt, Artificial Sequence
  Description of Artificial Sequence: Synthetic oligonucleotide
  Antisense strand to SEQ ID NO: 583823
acauauaccuuguucacag

SEQ ID NO: 583825 - RNA, 19 nt, Artificial Sequence
  Description of Artificial Sequence: Synthetic oligonucleotide
  Sense strand starting at position 3295 of SEQ ID NO: 318714
gaacaagguauaugugguu

SEQ ID NO: 583826 - RNA, 19 nt, Artificial Sequence
  Description of Artificial Sequence: Synthetic oligonucleotide
  Antisense strand to SEQ ID NO: 583825
aaccacauauaccuuguuc

SEQ ID NO: 583827 - RNA, 19 nt, Artificial Sequence
  Description of Artificial Sequence: Synthetic oligonucleotide
  Sense strand starting at position 3322 of SEQ ID NO: 318714
ucugaaucuuaagucuagu

SEQ ID NO: 583828 - RNA, 19 nt, Artificial Sequence
  Description of Artificial Sequence: Synthetic oligonucleotide
  Antisense strand to SEQ ID NO: 583827
acuagacuuaagauucaga

SEQ ID NO: 583829 - RNA, 19 nt, Artificial Sequence
  Description of Artificial Sequence: Synthetic oligonucleotide
  Sense strand starting at position 3335 of SEQ ID NO: 318714
ucuaguagacugcauagau

SEQ ID NO: 583830 - RNA, 19 nt, Artificial Sequence
  Description of Artificial Sequence: Synthetic oligonucleotide
  Antisense strand to SEQ ID NO: 583829
aucuaugcagucuacuaga

SEQ ID NO: 583831 - RNA, 19 nt, Artificial Sequence
  Description of Artificial Sequence: Synthetic oligonucleotide
  Sense strand starting at position 3410 of SEQ ID NO: 318714
cgaaguaacugggugucaa

SEQ ID NO: 583832 - RNA, 19 nt, Artificial Sequence
  Description of Artificial Sequence: Synthetic oligonucleotide
  Antisense strand to SEQ ID NO: 583831
uugacacccaguuacuucg

SEQ ID NO: 583833 - RNA, 19 nt, Artificial Sequence
  Description of Artificial Sequence: Synthetic oligonucleotide
  Sense strand starting at position 3411 of SEQ ID NO: 318714
gaaguaacugggugucaag

SEQ ID NO: 583834 - RNA, 19 nt, Artificial Sequence
  Description of Artificial Sequence: Synthetic oligonucleotide
  Antisense strand to SEQ ID NO: 583833
cuugacacccaguuacuuc

SEQ ID NO: 583835 - RNA, 19 nt, Artificial Sequence
  Description of Artificial Sequence: Synthetic oligonucleotide
  Sense strand starting at position 3520 of SEQ ID NO: 318714
aggaguucagcccaggagu

SEQ ID NO: 583836 - RNA, 19 nt, Artificial Sequence
  Description of Artificial Sequence: Synthetic oligonucleotide
  Antisense strand to SEQ ID NO: 583835
acuccugggcugaacuccu

SEQ ID NO: 583837 - RNA, 19 nt, Artificial Sequence
  Description of Artificial Sequence: Synthetic oligonucleotide
  Sense strand starting at position 3601 of SEQ ID NO: 318714
ugaugugaagucuaagugu

SEQ ID NO: 583838 - RNA, 19 nt, Artificial Sequence
  Description of Artificial Sequence: Synthetic oligonucleotide
  Antisense strand to SEQ ID NO: 583837
acacuuagacuucacauca

SEQ ID NO: 583839 - RNA, 19 nt, Artificial Sequence
  Description of Artificial Sequence: Synthetic oligonucleotide
  Sense strand starting at position 3604 of SEQ ID NO: 318714
ugugaagucuaaguguucu

SEQ ID NO: 583840 - RNA, 19 nt, Artificial Sequence
  Description of Artificial Sequence: Synthetic oligonucleotide
  Antisense strand to SEQ ID NO: 583839
agaacacuuagacuucaca

SEQ ID NO: 583841 - RNA, 19 nt, Artificial Sequence
  Description of Artificial Sequence: Synthetic oligonucleotide
  Sense strand starting at position 3677 of SEQ ID NO: 318714
gaaacaauguugcuggaua

SEQ ID NO: 583842 - RNA, 19 nt, Artificial Sequence
  Description of Artificial Sequence: Synthetic oligonucleotide
  Antisense strand to SEQ ID NO: 583841
uauccagcaacauuguuuc

SEQ ID NO: 583843 - RNA, 19 nt, Artificial Sequence
  Description of Artificial Sequence: Synthetic oligonucleotide
  Sense strand starting at position 3699 of SEQ ID NO: 318714
gcacaagggugccuuauaa

SEQ ID NO: 583844 - RNA, 19 nt, Artificial Sequence
  Description of Artificial Sequence: Synthetic oligonucleotide
  Antisense strand to SEQ ID NO: 583843
uuauaaggcacccuugugc

SEQ ID NO: 583845 - RNA, 19 nt, Artificial Sequence
  Description of Artificial Sequence: Synthetic oligonucleotide
  Sense strand starting at position 3719 of SEQ ID NO: 318714
aaguguugaagaugucaga

SEQ ID NO: 583846 - RNA, 19 nt, Artificial Sequence
  Description of Artificial Sequence: Synthetic oligonucleotide
  Antisense strand to SEQ ID NO: 583845
ucugacaucuucaacacuu

SEQ ID NO: 583847 - RNA, 19 nt, Artificial Sequence
  Description of Artificial Sequence: Synthetic oligonucleotide
  Sense strand starting at position 3722 of SEQ ID NO: 318714
uguugaagaugucagauuu

SEQ ID NO: 583848 - RNA, 19 nt, Artificial Sequence
  Description of Artificial Sequence: Synthetic oligonucleotide
  Antisense strand to SEQ ID NO: 583847
aaaucugacaucuucaaca

SEQ ID NO: 583849 - RNA, 19 nt, Artificial Sequence
  Description of Artificial Sequence: Synthetic oligonucleotide
  Sense strand starting at position 3866 of SEQ ID NO: 318714
gggagacuguuaguaaugu

SEQ ID NO: 583850 - RNA, 19 nt, Artificial Sequence
  Description of Artificial Sequence: Synthetic oligonucleotide
  Antisense strand to SEQ ID NO: 583849
acauuacuaacagucuccc

SEQ ID NO: 583851 - RNA, 19 nt, Artificial Sequence
  Description of Artificial Sequence: Synthetic oligonucleotide
  Sense strand starting at position 3872 of SEQ ID NO: 318714
cuguuaguaauguagauga

SEQ ID NO: 583852 - RNA, 19 nt, Artificial Sequence
  Description of Artificial Sequence: Synthetic oligonucleotide
  Antisense strand to SEQ ID NO: 583851
ucaucuacauuacuaacag

SEQ ID NO: 583853 - RNA, 19 nt, Artificial Sequence
  Description of Artificial Sequence: Synthetic oligonucleotide
  Sense strand starting at position 3908 of SEQ ID NO: 318714
gaauuagagagcuggucag

SEQ ID NO: 583854 - RNA, 19 nt, Artificial Sequence
  Description of Artificial Sequence: Synthetic oligonucleotide
  Antisense strand to SEQ ID NO: 583853
cugaccagcucucuaauuc

SEQ ID NO: 583855 - RNA, 19 nt, Artificial Sequence
  Description of Artificial Sequence: Synthetic oligonucleotide
  Sense strand starting at position 98 of SEQ ID NO: 318715
uccauuugauuguaugaaa

SEQ ID NO: 583856 - RNA, 19 nt, Artificial Sequence
  Description of Artificial Sequence: Synthetic oligonucleotide
  Antisense strand to SEQ ID NO: 583855
uuucauacaaucaaaugga

SEQ ID NO: 583857 - RNA, 19 nt, Artificial Sequence
  Description of Artificial Sequence: Synthetic oligonucleotide
  Sense strand starting at position 320 of SEQ ID NO: 318715
gugggauaagguuguuuga

SEQ ID NO: 583858 - RNA, 19 nt, Artificial Sequence
  Description of Artificial Sequence: Synthetic oligonucleotide
  Antisense strand to SEQ ID NO: 583857
ucaaacaaccuuaucccac

SEQ ID NO: 583859 - RNA, 19 nt, Artificial Sequence
  Description of Artificial Sequence: Synthetic oligonucleotide
  Sense strand starting at position 331 of SEQ ID NO: 318715
uuguuugagccuuacagaa

SEQ ID NO: 583860 - RNA, 19 nt, Artificial Sequence
  Description of Artificial Sequence: Synthetic oligonucleotide
  Antisense strand to SEQ ID NO: 583859
uucuguaaggcucaaacaa

SEQ ID NO: 583861 - RNA, 19 nt, Artificial Sequence
  Description of Artificial Sequence: Synthetic oligonucleotide
  Sense strand starting at position 373 of SEQ ID NO: 318715
gagggaucauucuuuacuc

SEQ ID NO: 583862 - RNA, 19 nt, Artificial Sequence
  Description of Artificial Sequence: Synthetic oligonucleotide
  Antisense strand to SEQ ID NO: 583861
gaguaaagaaugaucccuc

SEQ ID NO: 583863 - RNA, 19 nt, Artificial Sequence
  Description of Artificial Sequence: Synthetic oligonucleotide
  Sense strand starting at position 449 of SEQ ID NO: 318715
augugaagauauguuucca

SEQ ID NO: 583864 - RNA, 19 nt, Artificial Sequence
  Description of Artificial Sequence: Synthetic oligonucleotide
  Antisense strand to SEQ ID NO: 583863
uggaaacauaucuucacau

SEQ ID NO: 583865 - RNA, 19 nt, Artificial Sequence
  Description of Artificial Sequence: Synthetic oligonucleotide
  Sense strand starting at position 453 of SEQ ID NO: 318715
gaagauauguuuccaguug

SEQ ID NO: 583866 - RNA, 19 nt, Artificial Sequence
  Description of Artificial Sequence: Synthetic oligonucleotide
  Antisense strand to SEQ ID NO: 583865
caacuggaaacauaucuuc

SEQ ID NO: 583867 - RNA, 19 nt, Artificial Sequence
  Description of Artificial Sequence: Synthetic oligonucleotide
  Sense strand starting at position 581 of SEQ ID NO: 318715
gcuccuuggcaguaagaau

SEQ ID NO: 583868 - RNA, 19 nt, Artificial Sequence
  Description of Artificial Sequence: Synthetic oligonucleotide
  Antisense strand to SEQ ID NO: 583867
auucuuacugccaaggagc

SEQ ID NO: 583869 - RNA, 19 nt, Artificial Sequence
  Description of Artificial Sequence: Synthetic oligonucleotide
  Sense strand starting at position 720 of SEQ ID NO: 318715
cuaaaucaaugugcaugaa

SEQ ID NO: 583870 - RNA, 19 nt, Artificial Sequence
  Description of Artificial Sequence: Synthetic oligonucleotide
  Antisense strand to SEQ ID NO: 583869
uucaugcacauugauuuag

SEQ ID NO: 583871 - RNA, 19 nt, Artificial Sequence
  Description of Artificial Sequence: Synthetic oligonucleotide
  Sense strand starting at position 797 of SEQ ID NO: 318715
cucuauugucuguauacaa

SEQ ID NO: 583872 - RNA, 19 nt, Artificial Sequence
  Description of Artificial Sequence: Synthetic oligonucleotide
  Antisense strand to SEQ ID NO: 583871
uuguauacagacaauagag

SEQ ID NO: 583873 - RNA, 19 nt, Artificial Sequence
  Description of Artificial Sequence: Synthetic oligonucleotide
  Sense strand starting at position 819 of SEQ ID NO: 318715
uggugauagguuggaacca

SEQ ID NO: 583874 - RNA, 19 nt, Artificial Sequence
  Description of Artificial Sequence: Synthetic oligonucleotide
  Antisense strand to SEQ ID NO: 583873
ugguuccaaccuaucacca

SEQ ID NO: 583875 - RNA, 19 nt, Artificial Sequence
  Description of Artificial Sequence: Synthetic oligonucleotide
  Sense strand starting at position 869 of SEQ ID NO: 318715
gaagguaaauaccugguaa

SEQ ID NO: 583876 - RNA, 19 nt, Artificial Sequence
  Description of Artificial Sequence: Synthetic oligonucleotide
  Antisense strand to SEQ ID NO: 583875
uuaccagguauuuaccuuc

SEQ ID NO: 583877 - RNA, 19 nt, Artificial Sequence
  Description of Artificial Sequence: Synthetic oligonucleotide
  Sense strand starting at position 871 of SEQ ID NO: 318715
agguaaauaccugguaaau

SEQ ID NO: 583878 - RNA, 19 nt, Artificial Sequence
  Description of Artificial Sequence: Synthetic oligonucleotide
  Antisense strand to SEQ ID NO: 583877
auuuaccagguauuuaccu

SEQ ID NO: 583879 - RNA, 19 nt, Artificial Sequence
  Description of Artificial Sequence: Synthetic oligonucleotide
  Sense strand starting at position 1038 of SEQ ID NO: 318715
cccgcagaugcucaauaaa

SEQ ID NO: 583880 - RNA, 19 nt, Artificial Sequence
  Description of Artificial Sequence: Synthetic oligonucleotide
  Antisense strand to SEQ ID NO: 583879
uuuauugagcaucugcggg

SEQ ID NO: 583881 - RNA, 19 nt, Artificial Sequence
  Description of Artificial Sequence: Synthetic oligonucleotide
  Sense strand starting at position 1145 of SEQ ID NO: 318715
ugauuuguuuggucuuguu

SEQ ID NO: 583882 - RNA, 19 nt, Artificial Sequence
  Description of Artificial Sequence: Synthetic oligonucleotide
  Antisense strand to SEQ ID NO: 583881
aacaagaccaaacaaauca

SEQ ID NO: 583883 - RNA, 19 nt, Artificial Sequence
  Description of Artificial Sequence: Synthetic oligonucleotide
  Sense strand starting at position 1473 of SEQ ID NO: 318715
aucacugauuccucagagu

SEQ ID NO: 583884 - RNA, 19 nt, Artificial Sequence
  Description of Artificial Sequence: Synthetic oligonucleotide
  Antisense strand to SEQ ID NO: 583883
acucugaggaaucagugau

SEQ ID NO: 583885 - RNA, 19 nt, Artificial Sequence
  Description of Artificial Sequence: Synthetic oligonucleotide
  Sense strand starting at position 2156 of SEQ ID NO: 318715
agugaaccuuccucuauug

SEQ ID NO: 583886 - RNA, 19 nt, Artificial Sequence
  Description of Artificial Sequence: Synthetic oligonucleotide
  Antisense strand to SEQ ID NO: 583885
caauagaggaagguucacu

SEQ ID NO: 583887 - RNA, 19 nt, Artificial Sequence
  Description of Artificial Sequence: Synthetic oligonucleotide
  Sense strand starting at position 2222 of SEQ ID NO: 318715
acguguuugugaaugguac

SEQ ID NO: 583888 - RNA, 19 nt, Artificial Sequence
  Description of Artificial Sequence: Synthetic oligonucleotide
  Antisense strand to SEQ ID NO: 583887
guaccauucacaaacacgu

SEQ ID NO: 583889 - RNA, 19 nt, Artificial Sequence
  Description of Artificial Sequence: Synthetic oligonucleotide
  Sense strand starting at position 2252 of SEQ ID NO: 318715
gggagauucgacugcucag

SEQ ID NO: 583890 - RNA, 19 nt, Artificial Sequence
  Description of Artificial Sequence: Synthetic oligonucleotide
  Antisense strand to SEQ ID NO: 583889
cugagcagucgaaucuccc

SEQ ID NO: 583891 - RNA, 19 nt, Artificial Sequence
  Description of Artificial Sequence: Synthetic oligonucleotide
  Sense strand starting at position 2292 of SEQ ID NO: 318715
gguccucuccagggagauu

SEQ ID NO: 583892 - RNA, 19 nt, Artificial Sequence
  Description of Artificial Sequence: Synthetic oligonucleotide
  Antisense strand to SEQ ID NO: 583891
aaucucccuggagaggacc

SEQ ID NO: 583893 - RNA, 19 nt, Artificial Sequence
  Description of Artificial Sequence: Synthetic oligonucleotide
  Sense strand starting at position 2347 of SEQ ID NO: 318715
acaaucauuguguacugua

SEQ ID NO: 583894 - RNA, 19 nt, Artificial Sequence
  Description of Artificial Sequence: Synthetic oligonucleotide
  Antisense strand to SEQ ID NO: 583893
uacaguacacaaugauugu

SEQ ID NO: 583895 - RNA, 19 nt, Artificial Sequence
  Description of Artificial Sequence: Synthetic oligonucleotide
  Sense strand starting at position 2399 of SEQ ID NO: 318715
aagggaauuugauauugca

SEQ ID NO: 583896 - RNA, 19 nt, Artificial Sequence
  Description of Artificial Sequence: Synthetic oligonucleotide
  Antisense strand to SEQ ID NO: 583895
ugcaauaucaaauucccuu

SEQ ID NO: 583897 - RNA, 19 nt, Artificial Sequence
  Description of Artificial Sequence: Synthetic oligonucleotide
  Sense strand starting at position 2407 of SEQ ID NO: 318715
uugauauugcaguaauaag

SEQ ID NO: 583898 - RNA, 19 nt, Artificial Sequence
  Description of Artificial Sequence: Synthetic oligonucleotide
  Antisense strand to SEQ ID NO: 583897
cuuauuacugcaauaucaa

SEQ ID NO: 583899 - RNA, 19 nt, Artificial Sequence
  Description of Artificial Sequence: Synthetic oligonucleotide
  Sense strand starting at position 2425 of SEQ ID NO: 318715
guaauaagaggucgacuga

SEQ ID NO: 583900 - RNA, 19 nt, Artificial Sequence
  Description of Artificial Sequence: Synthetic oligonucleotide
  Antisense strand to SEQ ID NO: 583899
ucagucgaccucuuauuac

SEQ ID NO: 583901 - RNA, 19 nt, Artificial Sequence
  Description of Artificial Sequence: Synthetic oligonucleotide
  Sense strand starting at position 3197 of SEQ ID NO: 318715
cugagaauaagcgguuaag

SEQ ID NO: 583902 - RNA, 19 nt, Artificial Sequence
  Description of Artificial Sequence: Synthetic oligonucleotide
  Antisense strand to SEQ ID NO: 583901
cuuaaccgcuuauucucag

SEQ ID NO: 583903 - RNA, 19 nt, Artificial Sequence
  Description of Artificial Sequence: Synthetic oligonucleotide
  Sense strand starting at position 3227 of SEQ ID NO: 318715
ugaaucauagugcauuagu

SEQ ID NO: 583904 - RNA, 19 nt, Artificial Sequence
  Description of Artificial Sequence: Synthetic oligonucleotide
  Antisense strand to SEQ ID NO: 583903
acuaaugcacuaugauuca

SEQ ID NO: 583905 - RNA, 19 nt, Artificial Sequence
  Description of Artificial Sequence: Synthetic oligonucleotide
  Sense strand starting at position 3303 of SEQ ID NO: 318715
cugacuaaagguuggucaa

SEQ ID NO: 583906 - RNA, 19 nt, Artificial Sequence
  Description of Artificial Sequence: Synthetic oligonucleotide
  Antisense strand to SEQ ID NO: 583905
uugaccaaccuuuagucag

SEQ ID NO: 583907 - RNA, 19 nt, Artificial Sequence
  Description of Artificial Sequence: Synthetic oligonucleotide
  Sense strand starting at position 3305 of SEQ ID NO: 318715
gacuaaagguuggucaaga

SEQ ID NO: 583908 - RNA, 19 nt, Artificial Sequence
  Description of Artificial Sequence: Synthetic oligonucleotide
  Antisense strand to SEQ ID NO: 583907
ucuugaccaaccuuuaguc

SEQ ID NO: 583909 - RNA, 19 nt, Artificial Sequence
  Description of Artificial Sequence: Synthetic oligonucleotide
  Sense strand starting at position 3332 of SEQ ID NO: 318715
auaagaaauaguugguugu

SEQ ID NO: 583910 - RNA, 19 nt, Artificial Sequence
  Description of Artificial Sequence: Synthetic oligonucleotide
  Antisense strand to SEQ ID NO: 583909
acaaccaacuauuucuuau

SEQ ID NO: 583911 - RNA, 19 nt, Artificial Sequence
  Description of Artificial Sequence: Synthetic oligonucleotide
  Sense strand starting at position 3336 of SEQ ID NO: 318715
gaaauaguugguugugaac

SEQ ID NO: 583912 - RNA, 19 nt, Artificial Sequence
  Description of Artificial Sequence: Synthetic oligonucleotide
  Antisense strand to SEQ ID NO: 583911
guucacaaccaacuauuuc

SEQ ID NO: 583913 - RNA, 19 nt, Artificial Sequence
  Description of Artificial Sequence: Synthetic oligonucleotide
  Sense strand starting at position 3342 of SEQ ID NO: 318715
guugguugugaacacuuaa

SEQ ID NO: 583914 - RNA, 19 nt, Artificial Sequence
  Description of Artificial Sequence: Synthetic oligonucleotide
  Antisense strand to SEQ ID NO: 583913
uuaaguguucacaaccaac

SEQ ID NO: 583915 - RNA, 19 nt, Artificial Sequence
  Description of Artificial Sequence: Synthetic oligonucleotide
  Sense strand starting at position 3375 of SEQ ID NO: 318715
uuuagacuuccacaguuau

SEQ ID NO: 583916 - RNA, 19 nt, Artificial Sequence
  Description of Artificial Sequence: Synthetic oligonucleotide
  Antisense strand to SEQ ID NO: 583915
auaacuguggaagucuaaa

SEQ ID NO: 583917 - RNA, 19 nt, Artificial Sequence
  Description of Artificial Sequence: Synthetic oligonucleotide
  Sense strand starting at position 3427 of SEQ ID NO: 318715
aguguagacacugaguuua

SEQ ID NO: 583918 - RNA, 19 nt, Artificial Sequence
  Description of Artificial Sequence: Synthetic oligonucleotide
  Antisense strand to SEQ ID NO: 583917
uaaacucagugucuacacu

SEQ ID NO: 583919 - RNA, 19 nt, Artificial Sequence
  Description of Artificial Sequence: Synthetic oligonucleotide
  Sense strand starting at position 3442 of SEQ ID NO: 318715
uuuagugguaaagguauau

SEQ ID NO: 583920 - RNA, 19 nt, Artificial Sequence
  Description of Artificial Sequence: Synthetic oligonucleotide
  Antisense strand to SEQ ID NO: 583919
auauaccuuuaccacuaaa

SEQ ID NO: 583921 - RNA, 19 nt, Artificial Sequence
  Description of Artificial Sequence: Synthetic oligonucleotide
  Sense strand starting at position 3446 of SEQ ID NO: 318715
gugguaaagguauauagua

SEQ ID NO: 583922 - RNA, 19 nt, Artificial Sequence
  Description of Artificial Sequence: Synthetic oligonucleotide
  Antisense strand to SEQ ID NO: 583921
uacuauauaccuuuaccac

SEQ ID NO: 583923 - RNA, 19 nt, Artificial Sequence
  Description of Artificial Sequence: Synthetic oligonucleotide
  Sense strand starting at position 3609 of SEQ ID NO: 318715
gaaagcuguccuuauguag

SEQ ID NO: 583924 - RNA, 19 nt, Artificial Sequence
  Description of Artificial Sequence: Synthetic oligonucleotide
  Antisense strand to SEQ ID NO: 583923
cuacauaaggacagcuuuc

SEQ ID NO: 583925 - RNA, 19 nt, Artificial Sequence
  Description of Artificial Sequence: Synthetic oligonucleotide
  Sense strand starting at position 3661 of SEQ ID NO: 318715
ggaagccucccucauaaug

SEQ ID NO: 583926 - RNA, 19 nt, Artificial Sequence
  Description of Artificial Sequence: Synthetic oligonucleotide
  Antisense strand to SEQ ID NO: 583925
cauuaugagggaggcuucc

SEQ ID NO: 583927 - RNA, 19 nt, Artificial Sequence
  Description of Artificial Sequence: Synthetic oligonucleotide
  Sense strand starting at position 3758 of SEQ ID NO: 318715
acuguuaggccaugggaaa

SEQ ID NO: 583928 - RNA, 19 nt, Artificial Sequence
  Description of Artificial Sequence: Synthetic oligonucleotide
  Antisense strand to SEQ ID NO: 583927
uuucccauggccuaacagu

SEQ ID NO: 583929 - RNA, 19 nt, Artificial Sequence
  Description of Artificial Sequence: Synthetic oligonucleotide
  Sense strand starting at position 3759 of SEQ ID NO: 318715
cuguuaggccaugggaaau

SEQ ID NO: 583930 - RNA, 19 nt, Artificial Sequence
  Description of Artificial Sequence: Synthetic oligonucleotide
  Antisense strand to SEQ ID NO: 583929
auuucccauggccuaacag

SEQ ID NO: 583931 - RNA, 19 nt, Artificial Sequence
  Description of Artificial Sequence: Synthetic oligonucleotide
  Sense strand starting at position 3920 of SEQ ID NO: 318715
ugucgcauaguuucuguga

SEQ ID NO: 583932 - RNA, 19 nt, Artificial Sequence
  Description of Artificial Sequence: Synthetic oligonucleotide
  Antisense strand to SEQ ID NO: 583931
ucacagaaacuaugcgaca

SEQ ID NO: 583933 - RNA, 19 nt, Artificial Sequence
  Description of Artificial Sequence: Synthetic oligonucleotide
  Sense strand starting at position 3979 of SEQ ID NO: 318715
gucucucgugauguugcaa

SEQ ID NO: 583934 - RNA, 19 nt, Artificial Sequence
  Description of Artificial Sequence: Synthetic oligonucleotide
  Antisense strand to SEQ ID NO: 583933
uugcaacaucacgagagac

SEQ ID NO: 583935 - RNA, 19 nt, Artificial Sequence
  Description of Artificial Sequence: Synthetic oligonucleotide
  Sense strand starting at position 18 of SEQ ID NO: 318716
gucugcuuccuggacuaga

SEQ ID NO: 583936 - RNA, 19 nt, Artificial Sequence
  Description of Artificial Sequence: Synthetic oligonucleotide
  Antisense strand to SEQ ID NO: 583935
ucuaguccaggaagcagac

SEQ ID NO: 583937 - RNA, 19 nt, Artificial Sequence
  Description of Artificial Sequence: Synthetic oligonucleotide
  Sense strand starting at position 59 of SEQ ID NO: 318716
ggcaguaucuuccucugau

SEQ ID NO: 583938 - RNA, 19 nt, Artificial Sequence
  Description of Artificial Sequence: Synthetic oligonucleotide
  Antisense strand to SEQ ID NO: 583937
aucagaggaagauacugcc

SEQ ID NO: 583939 - RNA, 19 nt, Artificial Sequence
  Description of Artificial Sequence: Synthetic oligonucleotide
  Sense strand starting at position 60 of SEQ ID NO: 318716
gcaguaucuuccucugaua

SEQ ID NO: 583940 - RNA, 19 nt, Artificial Sequence
  Description of Artificial Sequence: Synthetic oligonucleotide
  Antisense strand to SEQ ID NO: 583939
uaucagaggaagauacugc

SEQ ID NO: 583941 - RNA, 19 nt, Artificial Sequence
  Description of Artificial Sequence: Synthetic oligonucleotide
  Sense strand starting at position 62 of SEQ ID NO: 318716
aguaucuuccucugauacu

SEQ ID NO: 583942 - RNA, 19 nt, Artificial Sequence
  Description of Artificial Sequence: Synthetic oligonucleotide
  Antisense strand to SEQ ID NO: 583941
aguaucagaggaagauacu

SEQ ID NO: 583943 - RNA, 19 nt, Artificial Sequence
  Description of Artificial Sequence: Synthetic oligonucleotide
  Sense strand starting at position 121 of SEQ ID NO: 318716
aucagugaguguuugucaa

SEQ ID NO: 583944 - RNA, 19 nt, Artificial Sequence
  Description of Artificial Sequence: Synthetic oligonucleotide
  Antisense strand to SEQ ID NO: 583943
uugacaaacacucacugau

SEQ ID NO: 583945 - RNA, 19 nt, Artificial Sequence
  Description of Artificial Sequence: Synthetic oligonucleotide
  Sense strand starting at position 176 of SEQ ID NO: 318716
accaaacaagugugaaagu

SEQ ID NO: 583946 - RNA, 19 nt, Artificial Sequence
  Description of Artificial Sequence: Synthetic oligonucleotide
  Antisense strand to SEQ ID NO: 583945
acuuucacacuuguuuggu

SEQ ID NO: 583947 - RNA, 19 nt, Artificial Sequence
  Description of Artificial Sequence: Synthetic oligonucleotide
  Sense strand starting at position 386 of SEQ ID NO: 318716
gcaguauagaauugcuuga

SEQ ID NO: 583948 - RNA, 19 nt, Artificial Sequence
  Description of Artificial Sequence: Synthetic oligonucleotide
  Antisense strand to SEQ ID NO: 583947
ucaagcaauucuauacugc

SEQ ID NO: 583949 - RNA, 19 nt, Artificial Sequence
  Description of Artificial Sequence: Synthetic oligonucleotide
  Sense strand starting at position 388 of SEQ ID NO: 318716
aguauagaauugcuugaac

SEQ ID NO: 583950 - RNA, 19 nt, Artificial Sequence
  Description of Artificial Sequence: Synthetic oligonucleotide
  Antisense strand to SEQ ID NO: 583949
guucaagcaauucuauacu

SEQ ID NO: 583951 - RNA, 19 nt, Artificial Sequence
  Description of Artificial Sequence: Synthetic oligonucleotide
  Sense strand starting at position 750 of SEQ ID NO: 318716
aaguauauaccaggguaua

SEQ ID NO: 583952 - RNA, 19 nt, Artificial Sequence
  Description of Artificial Sequence: Synthetic oligonucleotide
  Antisense strand to SEQ ID NO: 583951
uauacccugguauauacuu

SEQ ID NO: 583953 - RNA, 19 nt, Artificial Sequence
  Description of Artificial Sequence: Synthetic oligonucleotide
  Sense strand starting at position 761 of SEQ ID NO: 318716
aggguauaggucuguguac

SEQ ID NO: 583954 - RNA, 19 nt, Artificial Sequence
  Description of Artificial Sequence: Synthetic oligonucleotide
  Antisense strand to SEQ ID NO: 583953
guacacagaccuauacccu

SEQ ID NO: 583955 - RNA, 19 nt, Artificial Sequence
  Description of Artificial Sequence: Synthetic oligonucleotide
  Sense strand starting at position 772 of SEQ ID NO: 318716
cuguguaccuuccuuagau

SEQ ID NO: 583956 - RNA, 19 nt, Artificial Sequence
  Description of Artificial Sequence: Synthetic oligonucleotide
  Antisense strand to SEQ ID NO: 583955
aucuaaggaagguacacag

SEQ ID NO: 583957 - RNA, 19 nt, Artificial Sequence
  Description of Artificial Sequence: Synthetic oligonucleotide
  Sense strand starting at position 773 of SEQ ID NO: 318716
uguguaccuuccuuagaua

SEQ ID NO: 583958 - RNA, 19 nt, Artificial Sequence
  Description of Artificial Sequence: Synthetic oligonucleotide
  Antisense strand to SEQ ID NO: 583957
uaucuaaggaagguacaca

SEQ ID NO: 583959 - RNA, 19 nt, Artificial Sequence
  Description of Artificial Sequence: Synthetic oligonucleotide
  Sense strand starting at position 774 of SEQ ID NO: 318716
guguaccuuccuuagauau

SEQ ID NO: 583960 - RNA, 19 nt, Artificial Sequence
  Description of Artificial Sequence: Synthetic oligonucleotide
  Antisense strand to SEQ ID NO: 583959
auaucuaaggaagguacac

SEQ ID NO: 583961 - RNA, 19 nt, Artificial Sequence
  Description of Artificial Sequence: Synthetic oligonucleotide
  Sense strand starting at position 863 of SEQ ID NO: 318716
agacaagucugcucagcaa

SEQ ID NO: 583962 - RNA, 19 nt, Artificial Sequence
  Description of Artificial Sequence: Synthetic oligonucleotide
  Antisense strand to SEQ ID NO: 583961
uugcugagcagacuugucu

SEQ ID NO: 583963 - RNA, 19 nt, Artificial Sequence
  Description of Artificial Sequence: Synthetic oligonucleotide
  Sense strand starting at position 946 of SEQ ID NO: 318716
cagauagaguucuuguaca

SEQ ID NO: 583964 - RNA, 19 nt, Artificial Sequence
  Description of Artificial Sequence: Synthetic oligonucleotide
  Antisense strand to SEQ ID NO: 583963
uguacaagaacucuaucug

SEQ ID NO: 583965 - RNA, 19 nt, Artificial Sequence
  Description of Artificial Sequence: Synthetic oligonucleotide
  Sense strand starting at position 1157 of SEQ ID NO: 318716
gcaacuuugggucaagugu

SEQ ID NO: 583966 - RNA, 19 nt, Artificial Sequence
  Description of Artificial Sequence: Synthetic oligonucleotide
  Antisense strand to SEQ ID NO: 583965
acacuugacccaaaguugc

SEQ ID NO: 583967 - RNA, 19 nt, Artificial Sequence
  Description of Artificial Sequence: Synthetic oligonucleotide
  Sense strand starting at position 1293 of SEQ ID NO: 318716
agggcucagucaucaagac

SEQ ID NO: 583968 - RNA, 19 nt, Artificial Sequence
  Description of Artificial Sequence: Synthetic oligonucleotide
  Antisense strand to SEQ ID NO: 583967
gucuugaugacugagcccu

SEQ ID NO: 583969 - RNA, 19 nt, Artificial Sequence
  Description of Artificial Sequence: Synthetic oligonucleotide
  Sense strand starting at position 1496 of SEQ ID NO: 318716
cgaguauagggaugacagu

SEQ ID NO: 583970 - RNA, 19 nt, Artificial Sequence
  Description of Artificial Sequence: Synthetic oligonucleotide
  Antisense strand to SEQ ID NO: 583969
acugucaucccuauacucg

SEQ ID NO: 583971 - RNA, 19 nt, Artificial Sequence
  Description of Artificial Sequence: Synthetic oligonucleotide
  Sense strand starting at position 1505 of SEQ ID NO: 318716
ggaugacaguccucgaaug

SEQ ID NO: 583972 - RNA, 19 nt, Artificial Sequence
  Description of Artificial Sequence: Synthetic oligonucleotide
  Antisense strand to SEQ ID NO: 583971
cauucgaggacugucaucc

SEQ ID NO: 583973 - RNA, 19 nt, Artificial Sequence
  Description of Artificial Sequence: Synthetic oligonucleotide
  Sense strand starting at position 1506 of SEQ ID NO: 318716
gaugacaguccucgaaugu

SEQ ID NO: 583974 - RNA, 19 nt, Artificial Sequence
  Description of Artificial Sequence: Synthetic oligonucleotide
  Antisense strand to SEQ ID NO: 583973
acauucgaggacugucauc

SEQ ID NO: 583975 - RNA, 19 nt, Artificial Sequence
  Description of Artificial Sequence: Synthetic oligonucleotide
  Sense strand starting at position 1512 of SEQ ID NO: 318716
aguccucgaaugugggaaa

SEQ ID NO: 583976 - RNA, 19 nt, Artificial Sequence
  Description of Artificial Sequence: Synthetic oligonucleotide
  Antisense strand to SEQ ID NO: 583975
uuucccacauucgaggacu

SEQ ID NO: 583977 - RNA, 19 nt, Artificial Sequence
  Description of Artificial Sequence: Synthetic oligonucleotide
  Sense strand starting at position 1536 of SEQ ID NO: 318716
cgcuguagugaaugaugaa

SEQ ID NO: 583978 - RNA, 19 nt, Artificial Sequence
  Description of Artificial Sequence: Synthetic oligonucleotide
  Antisense strand to SEQ ID NO: 583977
uucaucauucacuacagcg

SEQ ID NO: 583979 - RNA, 19 nt, Artificial Sequence
  Description of Artificial Sequence: Synthetic oligonucleotide
  Sense strand starting at position 1537 of SEQ ID NO: 318716
gcuguagugaaugaugaag

SEQ ID NO: 583980 - RNA, 19 nt, Artificial Sequence
  Description of Artificial Sequence: Synthetic oligonucleotide
  Antisense strand to SEQ ID NO: 583979
cuucaucauucacuacagc

SEQ ID NO: 583981 - RNA, 19 nt, Artificial Sequence
  Description of Artificial Sequence: Synthetic oligonucleotide
  Sense strand starting at position 1997 of SEQ ID NO: 318716
cgccuagguaucgcgagau

SEQ ID NO: 583982 - RNA, 19 nt, Artificial Sequence
  Description of Artificial Sequence: Synthetic oligonucleotide
  Antisense strand to SEQ ID NO: 583981
aucucgcgauaccuaggcg

SEQ ID NO: 583983 - RNA, 19 nt, Artificial Sequence
  Description of Artificial Sequence: Synthetic oligonucleotide
  Sense strand starting at position 2009 of SEQ ID NO: 318716
gcgagauuugguggguggu

SEQ ID NO: 583984 - RNA, 19 nt, Artificial Sequence
  Description of Artificial Sequence: Synthetic oligonucleotide
  Antisense strand to SEQ ID NO: 583983
accacccaccaaaucucgc

SEQ ID NO: 583985 - RNA, 19 nt, Artificial Sequence
  Description of Artificial Sequence: Synthetic oligonucleotide
  Sense strand starting at position 2010 of SEQ ID NO: 318716
cgagauuugguggguggua

SEQ ID NO: 583986 - RNA, 19 nt, Artificial Sequence
  Description of Artificial Sequence: Synthetic oligonucleotide
  Antisense strand to SEQ ID NO: 583985
uaccacccaccaaaucucg

SEQ ID NO: 583987 - RNA, 19 nt, Artificial Sequence
  Description of Artificial Sequence: Synthetic oligonucleotide
  Sense strand starting at position 2041 of SEQ ID NO: 318716
aacaaaucucgcgagguuu

SEQ ID NO: 583988 - RNA, 19 nt, Artificial Sequence
  Description of Artificial Sequence: Synthetic oligonucleotide
  Antisense strand to SEQ ID NO: 583987
aaaccucgcgagauuuguu

SEQ ID NO: 583989 - RNA, 19 nt, Artificial Sequence
  Description of Artificial Sequence: Synthetic oligonucleotide
  Sense strand starting at position 2157 of SEQ ID NO: 318716
gcugauuccgcagcaguga

SEQ ID NO: 583990 - RNA, 19 nt, Artificial Sequence
  Description of Artificial Sequence: Synthetic oligonucleotide
  Antisense strand to SEQ ID NO: 583989
ucacugcugcggaaucagc

SEQ ID NO: 583991 - RNA, 19 nt, Artificial Sequence
  Description of Artificial Sequence: Synthetic oligonucleotide
  Sense strand starting at position 2232 of SEQ ID NO: 318716
cggucagcccuugauacuu

SEQ ID NO: 583992 - RNA, 19 nt, Artificial Sequence
  Description of Artificial Sequence: Synthetic oligonucleotide
  Antisense strand to SEQ ID NO: 583991
aaguaucaagggcugaccg

SEQ ID NO: 583993 - RNA, 19 nt, Artificial Sequence
  Description of Artificial Sequence: Synthetic oligonucleotide
  Sense strand starting at position 2271 of SEQ ID NO: 318716
ccguuaugugggaguguuu

SEQ ID NO: 583994 - RNA, 19 nt, Artificial Sequence
  Description of Artificial Sequence: Synthetic oligonucleotide
  Antisense strand to SEQ ID NO: 583993
aaacacucccacauaacgg

SEQ ID NO: 583995 - RNA, 19 nt, Artificial Sequence
  Description of Artificial Sequence: Synthetic oligonucleotide
  Sense strand starting at position 2342 of SEQ ID NO: 318716
ucaagagcucgcuacuagu

SEQ ID NO: 583996 - RNA, 19 nt, Artificial Sequence
  Description of Artificial Sequence: Synthetic oligonucleotide
  Antisense strand to SEQ ID NO: 583995
acuaguagcgagcucuuga

SEQ ID NO: 583997 - RNA, 19 nt, Artificial Sequence
  Description of Artificial Sequence: Synthetic oligonucleotide
  Sense strand starting at position 2379 of SEQ ID NO: 318716
gguuccauauuacugcuaa

SEQ ID NO: 583998 - RNA, 19 nt, Artificial Sequence
  Description of Artificial Sequence: Synthetic oligonucleotide
  Antisense strand to SEQ ID NO: 583997
uuagcaguaauauggaacc

SEQ ID NO: 583999 - RNA, 19 nt, Artificial Sequence
  Description of Artificial Sequence: Synthetic oligonucleotide
  Sense strand starting at position 2507 of SEQ ID NO: 318716
cuaauaggcuucuccaaug

SEQ ID NO: 584000 - RNA, 19 nt, Artificial Sequence
  Description of Artificial Sequence: Synthetic oligonucleotide
  Antisense strand to SEQ ID NO: 583999
cauuggagaagccuauuag

SEQ ID NO: 584001 - RNA, 19 nt, Artificial Sequence
  Description of Artificial Sequence: Synthetic oligonucleotide
  Sense strand starting at position 2593 of SEQ ID NO: 318716
ccaucucuugccuagguua

SEQ ID NO: 584002 - RNA, 19 nt, Artificial Sequence
  Description of Artificial Sequence: Synthetic oligonucleotide
  Antisense strand to SEQ ID NO: 584001
uaaccuaggcaagagaugg

SEQ ID NO: 584003 - RNA, 19 nt, Artificial Sequence
  Description of Artificial Sequence: Synthetic oligonucleotide
  Sense strand starting at position 2595 of SEQ ID NO: 318716
aucucuugccuagguuauu

SEQ ID NO: 584004 - RNA, 19 nt, Artificial Sequence
  Description of Artificial Sequence: Synthetic oligonucleotide
  Antisense strand to SEQ ID NO: 584003
aauaaccuaggcaagagau

SEQ ID NO: 584005 - RNA, 19 nt, Artificial Sequence
  Description of Artificial Sequence: Synthetic oligonucleotide
  Sense strand starting at position 2684 of SEQ ID NO: 318716
acgcuuagguucucaaauc

SEQ ID NO: 584006 - RNA, 19 nt, Artificial Sequence
  Description of Artificial Sequence: Synthetic oligonucleotide
  Antisense strand to SEQ ID NO: 584005
gauuugagaaccuaagcgu

SEQ ID NO: 584007 - RNA, 19 nt, Artificial Sequence
  Description of Artificial Sequence: Synthetic oligonucleotide
  Sense strand starting at position 3130 of SEQ ID NO: 318716
cuuaauuccugucccaguu

SEQ ID NO: 584008 - RNA, 19 nt, Artificial Sequence
  Description of Artificial Sequence: Synthetic oligonucleotide
  Antisense strand to SEQ ID NO: 584007
aacugggacaggaauuaag

SEQ ID NO: 584009 - RNA, 19 nt, Artificial Sequence
  Description of Artificial Sequence: Synthetic oligonucleotide
  Sense strand starting at position 3751 of SEQ ID NO: 318716
ggacccuccuagguauaua

SEQ ID NO: 584010 - RNA, 19 nt, Artificial Sequence
  Description of Artificial Sequence: Synthetic oligonucleotide
  Antisense strand to SEQ ID NO: 584009
uauauaccuaggagggucc

SEQ ID NO: 584011 - RNA, 19 nt, Artificial Sequence
  Description of Artificial Sequence: Synthetic oligonucleotide
  Sense strand starting at position 3778 of SEQ ID NO: 318716
uuguuuaaugaaugaagcu

SEQ ID NO: 584012 - RNA, 19 nt, Artificial Sequence
  Description of Artificial Sequence: Synthetic oligonucleotide
  Antisense strand to SEQ ID NO: 584011
agcuucauucauuaaacaa

SEQ ID NO: 584013 - RNA, 19 nt, Artificial Sequence
  Description of Artificial Sequence: Synthetic oligonucleotide
  Sense strand starting at position 3842 of SEQ ID NO: 318716
uggagaauuuacuaugagc

SEQ ID NO: 584014 - RNA, 19 nt, Artificial Sequence
  Description of Artificial Sequence: Synthetic oligonucleotide
  Antisense strand to SEQ ID NO: 584013
gcucauaguaaauucucca

SEQ ID NO: 584015 - RNA, 19 nt, Artificial Sequence
  Description of Artificial Sequence: Synthetic oligonucleotide
  Sense strand starting at position 129 of SEQ ID NO: 318717
ggugguccucccuacagaa

SEQ ID NO: 584016 - RNA, 19 nt, Artificial Sequence
  Description of Artificial Sequence: Synthetic oligonucleotide
  Antisense strand to SEQ ID NO: 584015
uucuguagggaggaccacc

SEQ ID NO: 584017 - RNA, 19 nt, Artificial Sequence
  Description of Artificial Sequence: Synthetic oligonucleotide
  Sense strand starting at position 210 of SEQ ID NO: 318717
uggagauggucccggguga

SEQ ID NO: 584018 - RNA, 19 nt, Artificial Sequence
  Description of Artificial Sequence: Synthetic oligonucleotide
  Antisense strand to SEQ ID NO: 584017
ucacccgggaccaucucca

SEQ ID NO: 584019 - RNA, 19 nt, Artificial Sequence
  Description of Artificial Sequence: Synthetic oligonucleotide
  Sense strand starting at position 211 of SEQ ID NO: 318717
ggagauggucccgggugaa

SEQ ID NO: 584020 - RNA, 19 nt, Artificial Sequence
  Description of Artificial Sequence: Synthetic oligonucleotide
  Antisense strand to SEQ ID NO: 584019
uucacccgggaccaucucc

SEQ ID NO: 584021 - RNA, 19 nt, Artificial Sequence
  Description of Artificial Sequence: Synthetic oligonucleotide
  Sense strand starting at position 214 of SEQ ID NO: 318717
gauggucccgggugaagaa

SEQ ID NO: 584022 - RNA, 19 nt, Artificial Sequence
  Description of Artificial Sequence: Synthetic oligonucleotide
  Antisense strand to SEQ ID NO: 584021
uucuucacccgggaccauc

SEQ ID NO: 584023 - RNA, 19 nt, Artificial Sequence
  Description of Artificial Sequence: Synthetic oligonucleotide
  Sense strand starting at position 362 of SEQ ID NO: 318717
gaaggcagaucugagaaga

SEQ ID NO: 584024 - RNA, 19 nt, Artificial Sequence
  Description of Artificial Sequence: Synthetic oligonucleotide
  Antisense strand to SEQ ID NO: 584023
ucuucucagaucugccuuc

SEQ ID NO: 584025 - RNA, 19 nt, Artificial Sequence
  Description of Artificial Sequence: Synthetic oligonucleotide
  Sense strand starting at position 2075 of SEQ ID NO: 318717
aguguaguuccaugcguuu

SEQ ID NO: 584026 - RNA, 19 nt, Artificial Sequence
  Description of Artificial Sequence: Synthetic oligonucleotide
  Antisense strand to SEQ ID NO: 584025
aaacgcauggaacuacacu

SEQ ID NO: 584027 - RNA, 19 nt, Artificial Sequence
  Description of Artificial Sequence: Synthetic oligonucleotide
  Sense strand starting at position 2077 of SEQ ID NO: 318717
uguaguuccaugcguuuga

SEQ ID NO: 584028 - RNA, 19 nt, Artificial Sequence
  Description of Artificial Sequence: Synthetic oligonucleotide
  Antisense strand to SEQ ID NO: 584027
ucaaacgcauggaacuaca

SEQ ID NO: 584029 - RNA, 19 nt, Artificial Sequence
  Description of Artificial Sequence: Synthetic oligonucleotide
  Sense strand starting at position 2166 of SEQ ID NO: 318717
gguuccugguuauagggaa

SEQ ID NO: 584030 - RNA, 19 nt, Artificial Sequence
  Description of Artificial Sequence: Synthetic oligonucleotide
  Antisense strand to SEQ ID NO: 584029
uucccuauaaccaggaacc

SEQ ID NO: 584031 - RNA, 19 nt, Artificial Sequence
  Description of Artificial Sequence: Synthetic oligonucleotide
  Sense strand starting at position 2231 of SEQ ID NO: 318717
gugggaauuucgggaggga

SEQ ID NO: 584032 - RNA, 19 nt, Artificial Sequence
  Description of Artificial Sequence: Synthetic oligonucleotide
  Antisense strand to SEQ ID NO: 584031
ucccucccgaaauucccac

SEQ ID NO: 584033 - RNA, 19 nt, Artificial Sequence
  Description of Artificial Sequence: Synthetic oligonucleotide
  Sense strand starting at position 2343 of SEQ ID NO: 318717
gguugcaagugguuucaca

SEQ ID NO: 584034 - RNA, 19 nt, Artificial Sequence
  Description of Artificial Sequence: Synthetic oligonucleotide
  Antisense strand to SEQ ID NO: 584033
ugugaaaccacuugcaacc

SEQ ID NO: 584035 - RNA, 19 nt, Artificial Sequence
  Description of Artificial Sequence: Synthetic oligonucleotide
  Sense strand starting at position 2382 of SEQ ID NO: 318717
acgucacugcccuggagaa

SEQ ID NO: 584036 - RNA, 19 nt, Artificial Sequence
  Description of Artificial Sequence: Synthetic oligonucleotide
  Antisense strand to SEQ ID NO: 584035
uucuccagggcagugacgu

SEQ ID NO: 584037 - RNA, 19 nt, Artificial Sequence
  Description of Artificial Sequence: Synthetic oligonucleotide
  Sense strand starting at position 2463 of SEQ ID NO: 318717
ggauaaaugugaggagaaa

SEQ ID NO: 584038 - RNA, 19 nt, Artificial Sequence
  Description of Artificial Sequence: Synthetic oligonucleotide
  Antisense strand to SEQ ID NO: 584037
uuucuccucacauuuaucc

SEQ ID NO: 584039 - RNA, 19 nt, Artificial Sequence
  Description of Artificial Sequence: Synthetic oligonucleotide
  Sense strand starting at position 2583 of SEQ ID NO: 318717
aacggauguauguauguau

SEQ ID NO: 584040 - RNA, 19 nt, Artificial Sequence
  Description of Artificial Sequence: Synthetic oligonucleotide
  Antisense strand to SEQ ID NO: 584039
auacauacauacauccguu

SEQ ID NO: 584041 - RNA, 19 nt, Artificial Sequence
  Description of Artificial Sequence: Synthetic oligonucleotide
  Sense strand starting at position 2675 of SEQ ID NO: 318717
cggcuccauuuagaaaguu

SEQ ID NO: 584042 - RNA, 19 nt, Artificial Sequence
  Description of Artificial Sequence: Synthetic oligonucleotide
  Antisense strand to SEQ ID NO: 584041
aacuuucuaaauggagccg

SEQ ID NO: 584043 - RNA, 19 nt, Artificial Sequence
  Description of Artificial Sequence: Synthetic oligonucleotide
  Sense strand starting at position 2696 of SEQ ID NO: 318717
gcgcuucccuacuuaagaa

SEQ ID NO: 584044 - RNA, 19 nt, Artificial Sequence
  Description of Artificial Sequence: Synthetic oligonucleotide
  Antisense strand to SEQ ID NO: 584043
uucuuaaguagggaagcgc

SEQ ID NO: 584045 - RNA, 19 nt, Artificial Sequence
  Description of Artificial Sequence: Synthetic oligonucleotide
  Sense strand starting at position 2708 of SEQ ID NO: 318717
uuaagaauaugccuugaac

SEQ ID NO: 584046 - RNA, 19 nt, Artificial Sequence
  Description of Artificial Sequence: Synthetic oligonucleotide
  Antisense strand to SEQ ID NO: 584045
guucaaggcauauucuuaa

SEQ ID NO: 584047 - RNA, 19 nt, Artificial Sequence
  Description of Artificial Sequence: Synthetic oligonucleotide
  Sense strand starting at position 2873 of SEQ ID NO: 318717
gcggguugaucacgacguu

SEQ ID NO: 584048 - RNA, 19 nt, Artificial Sequence
  Description of Artificial Sequence: Synthetic oligonucleotide
  Antisense strand to SEQ ID NO: 584047
aacgucgugaucaacccgc

SEQ ID NO: 584049 - RNA, 19 nt, Artificial Sequence
  Description of Artificial Sequence: Synthetic oligonucleotide
  Sense strand starting at position 2874 of SEQ ID NO: 318717
cggguugaucacgacguua

SEQ ID NO: 584050 - RNA, 19 nt, Artificial Sequence
  Description of Artificial Sequence: Synthetic oligonucleotide
  Antisense strand to SEQ ID NO: 584049
uaacgucgugaucaacccg

SEQ ID NO: 584051 - RNA, 19 nt, Artificial Sequence
  Description of Artificial Sequence: Synthetic oligonucleotide
  Sense strand starting at position 2876 of SEQ ID NO: 318717
gguugaucacgacguuagu

SEQ ID NO: 584052 - RNA, 19 nt, Artificial Sequence
  Description of Artificial Sequence: Synthetic oligonucleotide
  Antisense strand to SEQ ID NO: 584051
acuaacgucgugaucaacc

SEQ ID NO: 584053 - RNA, 19 nt, Artificial Sequence
  Description of Artificial Sequence: Synthetic oligonucleotide
  Sense strand starting at position 2882 of SEQ ID NO: 318717
ucacgacguuaguucaaga

SEQ ID NO: 584054 - RNA, 19 nt, Artificial Sequence
  Description of Artificial Sequence: Synthetic oligonucleotide
  Antisense strand to SEQ ID NO: 584053
ucuugaacuaacgucguga

SEQ ID NO: 584055 - RNA, 19 nt, Artificial Sequence
  Description of Artificial Sequence: Synthetic oligonucleotide
  Sense strand starting at position 3113 of SEQ ID NO: 318717
aguaguugccucugaggag

SEQ ID NO: 584056 - RNA, 19 nt, Artificial Sequence
  Description of Artificial Sequence: Synthetic oligonucleotide
  Antisense strand to SEQ ID NO: 584055
cuccucagaggcaacuacu

SEQ ID NO: 584057 - RNA, 19 nt, Artificial Sequence
  Description of Artificial Sequence: Synthetic oligonucleotide
  Sense strand starting at position 3132 of SEQ ID NO: 318717
gguacugggagcuggaaua

SEQ ID NO: 584058 - RNA, 19 nt, Artificial Sequence
  Description of Artificial Sequence: Synthetic oligonucleotide
  Antisense strand to SEQ ID NO: 584057
uauuccagcucccaguacc

SEQ ID NO: 584059 - RNA, 19 nt, Artificial Sequence
  Description of Artificial Sequence: Synthetic oligonucleotide
  Sense strand starting at position 3198 of SEQ ID NO: 318717
gcuuuaccauaugcaugua

SEQ ID NO: 584060 - RNA, 19 nt, Artificial Sequence
  Description of Artificial Sequence: Synthetic oligonucleotide
  Antisense strand to SEQ ID NO: 584059
uacaugcauaugguaaagc

SEQ ID NO: 584061 - RNA, 19 nt, Artificial Sequence
  Description of Artificial Sequence: Synthetic oligonucleotide
  Sense strand starting at position 3201 of SEQ ID NO: 318717
uuaccauaugcauguauga

SEQ ID NO: 584062 - RNA, 19 nt, Artificial Sequence
  Description of Artificial Sequence: Synthetic oligonucleotide
  Antisense strand to SEQ ID NO: 584061
ucauacaugcauaugguaa

SEQ ID NO: 584063 - RNA, 19 nt, Artificial Sequence
  Description of Artificial Sequence: Synthetic oligonucleotide
  Sense strand starting at position 3264 of SEQ ID NO: 318717
uuggcuguaucauuagcaa

SEQ ID NO: 584064 - RNA, 19 nt, Artificial Sequence
  Description of Artificial Sequence: Synthetic oligonucleotide
  Antisense strand to SEQ ID NO: 584063
uugcuaaugauacagccaa

SEQ ID NO: 584065 - RNA, 19 nt, Artificial Sequence
  Description of Artificial Sequence: Synthetic oligonucleotide
  Sense strand starting at position 3267 of SEQ ID NO: 318717
gcuguaucauuagcaauac

SEQ ID NO: 584066 - RNA, 19 nt, Artificial Sequence
  Description of Artificial Sequence: Synthetic oligonucleotide
  Antisense strand to SEQ ID NO: 584065
guauugcuaaugauacagc

SEQ ID NO: 584067 - RNA, 19 nt, Artificial Sequence
  Description of Artificial Sequence: Synthetic oligonucleotide
  Sense strand starting at position 3303 of SEQ ID NO: 318717
agaaaccuuugcuaacagu

SEQ ID NO: 584068 - RNA, 19 nt, Artificial Sequence
  Description of Artificial Sequence: Synthetic oligonucleotide
  Antisense strand to SEQ ID NO: 584067
acuguuagcaaagguuucu

SEQ ID NO: 584069 - RNA, 19 nt, Artificial Sequence
  Description of Artificial Sequence: Synthetic oligonucleotide
  Sense strand starting at position 3319 of SEQ ID NO: 318717
aguggcuugcaucaugaca

SEQ ID NO: 584070 - RNA, 19 nt, Artificial Sequence
  Description of Artificial Sequence: Synthetic oligonucleotide
  Antisense strand to SEQ ID NO: 584069
ugucaugaugcaagccacu

SEQ ID NO: 584071 - RNA, 19 nt, Artificial Sequence
  Description of Artificial Sequence: Synthetic oligonucleotide
  Sense strand starting at position 3321 of SEQ ID NO: 318717
uggcuugcaucaugacauu

SEQ ID NO: 584072 - RNA, 19 nt, Artificial Sequence
  Description of Artificial Sequence: Synthetic oligonucleotide
  Antisense strand to SEQ ID NO: 584071
aaugucaugaugcaagcca

SEQ ID NO: 584073 - RNA, 19 nt, Artificial Sequence
  Description of Artificial Sequence: Synthetic oligonucleotide
  Sense strand starting at position 3466 of SEQ ID NO: 318717
ggcuauggucuccacucaa

SEQ ID NO: 584074 - RNA, 19 nt, Artificial Sequence
  Description of Artificial Sequence: Synthetic oligonucleotide
  Antisense strand to SEQ ID NO: 584073
uugaguggagaccauagcc

SEQ ID NO: 584075 - RNA, 19 nt, Artificial Sequence
  Description of Artificial Sequence: Synthetic oligonucleotide
  Sense strand starting at position 3566 of SEQ ID NO: 318717
aggacuaacuuccacauga

SEQ ID NO: 584076 - RNA, 19 nt, Artificial Sequence
  Description of Artificial Sequence: Synthetic oligonucleotide
  Antisense strand to SEQ ID NO: 584075
ucauguggaaguuaguccu

SEQ ID NO: 584077 - RNA, 19 nt, Artificial Sequence
  Description of Artificial Sequence: Synthetic oligonucleotide
  Sense strand starting at position 3774 of SEQ ID NO: 318717
gagcgcauugcucacugaa

SEQ ID NO: 584078 - RNA, 19 nt, Artificial Sequence
  Description of Artificial Sequence: Synthetic oligonucleotide
  Antisense strand to SEQ ID NO: 584077
uucagugagcaaugcgcuc

SEQ ID NO: 584079 - RNA, 19 nt, Artificial Sequence
  Description of Artificial Sequence: Synthetic oligonucleotide
  Sense strand starting at position 3776 of SEQ ID NO: 318717
gcgcauugcucacugaaca

SEQ ID NO: 584080 - RNA, 19 nt, Artificial Sequence
  Description of Artificial Sequence: Synthetic oligonucleotide
  Antisense strand to SEQ ID NO: 584079
uguucagugagcaaugcgc

SEQ ID NO: 584081 - RNA, 19 nt, Artificial Sequence
  Description of Artificial Sequence: Synthetic oligonucleotide
  Sense strand starting at position 3777 of SEQ ID NO: 318717
cgcauugcucacugaacaa

SEQ ID NO: 584082 - RNA, 19 nt, Artificial Sequence
  Description of Artificial Sequence: Synthetic oligonucleotide
  Antisense strand to SEQ ID NO: 584081
uuguucagugagcaaugcg

SEQ ID NO: 584083 - RNA, 19 nt, Artificial Sequence
  Description of Artificial Sequence: Synthetic oligonucleotide
  Sense strand starting at position 3797 of SEQ ID NO: 318717
auugguguucuugacaaag

SEQ ID NO: 584084 - RNA, 19 nt, Artificial Sequence
  Description of Artificial Sequence: Synthetic oligonucleotide
  Antisense strand to SEQ ID NO: 584083
cuuugucaagaacaccaau

SEQ ID NO: 584085 - RNA, 19 nt, Artificial Sequence
  Description of Artificial Sequence: Synthetic oligonucleotide
  Sense strand starting at position 3799 of SEQ ID NO: 318717
ugguguucuugacaaagaa

SEQ ID NO: 584086 - RNA, 19 nt, Artificial Sequence
  Description of Artificial Sequence: Synthetic oligonucleotide
  Antisense strand to SEQ ID NO: 584085
uucuuugucaagaacacca

SEQ ID NO: 584087 - RNA, 19 nt, Artificial Sequence
  Description of Artificial Sequence: Synthetic oligonucleotide
  Sense strand starting at position 3920 of SEQ ID NO: 318717
cagccugucugucagaauc

SEQ ID NO: 584088 - RNA, 19 nt, Artificial Sequence
  Description of Artificial Sequence: Synthetic oligonucleotide
  Antisense strand to SEQ ID NO: 584087
gauucugacagacaggcug

SEQ ID NO: 584089 - RNA, 19 nt, Artificial Sequence
  Description of Artificial Sequence: Synthetic oligonucleotide
  Sense strand starting at position 3922 of SEQ ID NO: 318717
gccugucugucagaaucac

SEQ ID NO: 584090 - RNA, 19 nt, Artificial Sequence
  Description of Artificial Sequence: Synthetic oligonucleotide
  Antisense strand to SEQ ID NO: 584089
gugauucugacagacaggc

SEQ ID NO: 584091 - RNA, 19 nt, Artificial Sequence
  Description of Artificial Sequence: Synthetic oligonucleotide
  Sense strand starting at position 3947 of SEQ ID NO: 318717
uggaaucucucacgacgaa

SEQ ID NO: 584092 - RNA, 19 nt, Artificial Sequence
  Description of Artificial Sequence: Synthetic oligonucleotide
  Antisense strand to SEQ ID NO: 584091
uucgucgugagagauucca

SEQ ID NO: 584093 - RNA, 19 nt, Artificial Sequence
  Description of Artificial Sequence: Synthetic oligonucleotide
  Sense strand starting at position 3982 of SEQ ID NO: 318717
aggccuugguccuauguua

SEQ ID NO: 584094 - RNA, 19 nt, Artificial Sequence
  Description of Artificial Sequence: Synthetic oligonucleotide
  Antisense strand to SEQ ID NO: 584093
uaacauaggaccaaggccu

SEQ ID NO: 584095 - RNA, 19 nt, Artificial Sequence
  Description of Artificial Sequence: Synthetic oligonucleotide
  Sense strand starting at position 457 of SEQ ID NO: 318718
caacgaugcguuggagaag

SEQ ID NO: 584096 - RNA, 19 nt, Artificial Sequence
  Description of Artificial Sequence: Synthetic oligonucleotide
  Antisense strand to SEQ ID NO: 584095
cuucuccaacgcaucguug

SEQ ID NO: 584097 - RNA, 19 nt, Artificial Sequence
  Description of Artificial Sequence: Synthetic oligonucleotide
  Sense strand starting at position 519 of SEQ ID NO: 318718
gagaaaguauuccugcgaa

SEQ ID NO: 584098 - RNA, 19 nt, Artificial Sequence
  Description of Artificial Sequence: Synthetic oligonucleotide
  Antisense strand to SEQ ID NO: 584097
uucgcaggaauacuuucuc

SEQ ID NO: 584099 - RNA, 19 nt, Artificial Sequence
  Description of Artificial Sequence: Synthetic oligonucleotide
  Sense strand starting at position 522 of SEQ ID NO: 318718
aaaguauuccugcgaagga

SEQ ID NO: 584100 - RNA, 19 nt, Artificial Sequence
  Description of Artificial Sequence: Synthetic oligonucleotide
  Antisense strand to SEQ ID NO: 584099
uccuucgcaggaauacuuu

SEQ ID NO: 584101 - RNA, 19 nt, Artificial Sequence
  Description of Artificial Sequence: Synthetic oligonucleotide
  Sense strand starting at position 592 of SEQ ID NO: 318718
guacguuugcucuuaguga

SEQ ID NO: 584102 - RNA, 19 nt, Artificial Sequence
  Description of Artificial Sequence: Synthetic oligonucleotide
  Antisense strand to SEQ ID NO: 584101
ucacuaagagcaaacguac

SEQ ID NO: 584103 - RNA, 19 nt, Artificial Sequence
  Description of Artificial Sequence: Synthetic oligonucleotide
  Sense strand starting at position 609 of SEQ ID NO: 318718
gacagacagacuuguggua

SEQ ID NO: 584104 - RNA, 19 nt, Artificial Sequence
  Description of Artificial Sequence: Synthetic oligonucleotide
  Antisense strand to SEQ ID NO: 584103
uaccacaagucugucuguc

SEQ ID NO: 584105 - RNA, 19 nt, Artificial Sequence
  Description of Artificial Sequence: Synthetic oligonucleotide
  Sense strand starting at position 622 of SEQ ID NO: 318718
gugguaucuuacuugucaa

SEQ ID NO: 584106 - RNA, 19 nt, Artificial Sequence
  Description of Artificial Sequence: Synthetic oligonucleotide
  Antisense strand to SEQ ID NO: 584105
uugacaaguaagauaccac

SEQ ID NO: 584107 - RNA, 19 nt, Artificial Sequence
  Description of Artificial Sequence: Synthetic oligonucleotide
  Sense strand starting at position 625 of SEQ ID NO: 318718
guaucuuacuugucaaacu

SEQ ID NO: 584108 - RNA, 19 nt, Artificial Sequence
  Description of Artificial Sequence: Synthetic oligonucleotide
  Antisense strand to SEQ ID NO: 584107
aguuugacaaguaagauac

SEQ ID NO: 584109 - RNA, 19 nt, Artificial Sequence
  Description of Artificial Sequence: Synthetic oligonucleotide
  Sense strand starting at position 634 of SEQ ID NO: 318718
uugucaaacuagucacaca

SEQ ID NO: 584110 - RNA, 19 nt, Artificial Sequence
  Description of Artificial Sequence: Synthetic oligonucleotide
  Antisense strand to SEQ ID NO: 584109
ugugugacuaguuugacaa

SEQ ID NO: 584111 - RNA, 19 nt, Artificial Sequence
  Description of Artificial Sequence: Synthetic oligonucleotide
  Sense strand starting at position 655 of SEQ ID NO: 318718
ggaugaagauucgugaaca

SEQ ID NO: 584112 - RNA, 19 nt, Artificial Sequence
  Description of Artificial Sequence: Synthetic oligonucleotide
  Antisense strand to SEQ ID NO: 584111
uguucacgaaucuucaucc

SEQ ID NO: 584113 - RNA, 19 nt, Artificial Sequence
  Description of Artificial Sequence: Synthetic oligonucleotide
  Sense strand starting at position 715 of SEQ ID NO: 318718
ggugguccucccuacagaa

SEQ ID NO: 584114 - RNA, 19 nt, Artificial Sequence
  Description of Artificial Sequence: Synthetic oligonucleotide
  Antisense strand to SEQ ID NO: 584113
uucuguagggaggaccacc

SEQ ID NO: 584115 - RNA, 19 nt, Artificial Sequence
  Description of Artificial Sequence: Synthetic oligonucleotide
  Sense strand starting at position 797 of SEQ ID NO: 318718
ggagauggucccgggugaa

SEQ ID NO: 584116 - RNA, 19 nt, Artificial Sequence
  Description of Artificial Sequence: Synthetic oligonucleotide
  Antisense strand to SEQ ID NO: 584115
uucacccgggaccaucucc

SEQ ID NO: 584117 - RNA, 19 nt, Artificial Sequence
  Description of Artificial Sequence: Synthetic oligonucleotide
  Sense strand starting at position 948 of SEQ ID NO: 318718
gaaggcagaucugagaaga

SEQ ID NO: 584118 - RNA, 19 nt, Artificial Sequence
  Description of Artificial Sequence: Synthetic oligonucleotide
  Antisense strand to SEQ ID NO: 584117
ucuucucagaucugccuuc

SEQ ID NO: 584119 - RNA, 19 nt, Artificial Sequence
  Description of Artificial Sequence: Synthetic oligonucleotide
  Sense strand starting at position 1998 of SEQ ID NO: 318718
cgcuaaggccucuaggaaa

SEQ ID NO: 584120 - RNA, 19 nt, Artificial Sequence
  Description of Artificial Sequence: Synthetic oligonucleotide
  Antisense strand to SEQ ID NO: 584119
uuuccuagaggccuuagcg

SEQ ID NO: 584121 - RNA, 19 nt, Artificial Sequence
  Description of Artificial Sequence: Synthetic oligonucleotide
  Sense strand starting at position 2040 of SEQ ID NO: 318718
cuuucugggaaguguaguu

SEQ ID NO: 584122 - RNA, 19 nt, Artificial Sequence
  Description of Artificial Sequence: Synthetic oligonucleotide
  Antisense strand to SEQ ID NO: 584121
aacuacacuucccagaaag

SEQ ID NO: 584123 - RNA, 19 nt, Artificial Sequence
  Description of Artificial Sequence: Synthetic oligonucleotide
  Sense strand starting at position 2199 of SEQ ID NO: 318718
gugugugaauuucaggaug

SEQ ID NO: 584124 - RNA, 19 nt, Artificial Sequence
  Description of Artificial Sequence: Synthetic oligonucleotide
  Antisense strand to SEQ ID NO: 584123
cauccugaaauucacacac

SEQ ID NO: 584125 - RNA, 19 nt, Artificial Sequence
  Description of Artificial Sequence: Synthetic oligonucleotide
  Sense strand starting at position 2288 of SEQ ID NO: 318718
gcuggauuuccacgugcaa

SEQ ID NO: 584126 - RNA, 19 nt, Artificial Sequence
  Description of Artificial Sequence: Synthetic oligonucleotide
  Antisense strand to SEQ ID NO: 584125
uugcacguggaaauccagc

SEQ ID NO: 584127 - RNA, 19 nt, Artificial Sequence
  Description of Artificial Sequence: Synthetic oligonucleotide
  Sense strand starting at position 2428 of SEQ ID NO: 318718
ggauguuggagauggcaau

SEQ ID NO: 584128 - RNA, 19 nt, Artificial Sequence
  Description of Artificial Sequence: Synthetic oligonucleotide
  Antisense strand to SEQ ID NO: 584127
auugccaucuccaacaucc

SEQ ID NO: 584129 - RNA, 19 nt, Artificial Sequence
  Description of Artificial Sequence: Synthetic oligonucleotide
  Sense strand starting at position 2583 of SEQ ID NO: 318718
auaucugauuugcaaugua

SEQ ID NO: 584130 - RNA, 19 nt, Artificial Sequence
  Description of Artificial Sequence: Synthetic oligonucleotide
  Antisense strand to SEQ ID NO: 584129
uacauugcaaaucagauau

SEQ ID NO: 584131 - RNA, 19 nt, Artificial Sequence
  Description of Artificial Sequence: Synthetic oligonucleotide
  Sense strand starting at position 2591 of SEQ ID NO: 318718
uuugcaauguauccuggau

SEQ ID NO: 584132 - RNA, 19 nt, Artificial Sequence
  Description of Artificial Sequence: Synthetic oligonucleotide
  Antisense strand to SEQ ID NO: 584131
auccaggauacauugcaaa

SEQ ID NO: 584133 - RNA, 19 nt, Artificial Sequence
  Description of Artificial Sequence: Synthetic oligonucleotide
  Sense strand starting at position 2604 of SEQ ID NO: 318718
cuggauuuauauggaacuu

SEQ ID NO: 584134 - RNA, 19 nt, Artificial Sequence
  Description of Artificial Sequence: Synthetic oligonucleotide
  Antisense strand to SEQ ID NO: 584133
aaguuccauauaaauccag

SEQ ID NO: 584135 - RNA, 19 nt, Artificial Sequence
  Description of Artificial Sequence: Synthetic oligonucleotide
  Sense strand starting at position 2685 of SEQ ID NO: 318718
auaggcaauucuccaauga

SEQ ID NO: 584136 - RNA, 19 nt, Artificial Sequence
  Description of Artificial Sequence: Synthetic oligonucleotide
  Antisense strand to SEQ ID NO: 584135
ucauuggagaauugccuau

SEQ ID NO: 584137 - RNA, 19 nt, Artificial Sequence
  Description of Artificial Sequence: Synthetic oligonucleotide
  Sense strand starting at position 2689 of SEQ ID NO: 318718
gcaauucuccaaugaagau

SEQ ID NO: 584138 - RNA, 19 nt, Artificial Sequence
  Description of Artificial Sequence: Synthetic oligonucleotide
  Antisense strand to SEQ ID NO: 584137
aucuucauuggagaauugc

SEQ ID NO: 584139 - RNA, 19 nt, Artificial Sequence
  Description of Artificial Sequence: Synthetic oligonucleotide
  Sense strand starting at position 2745 of SEQ ID NO: 318718
ugguaaacaucucuaggua

SEQ ID NO: 584140 - RNA, 19 nt, Artificial Sequence
  Description of Artificial Sequence: Synthetic oligonucleotide
  Antisense strand to SEQ ID NO: 584139
uaccuagagauguuuacca

SEQ ID NO: 584141 - RNA, 19 nt, Artificial Sequence
  Description of Artificial Sequence: Synthetic oligonucleotide
  Sense strand starting at position 2746 of SEQ ID NO: 318718
gguaaacaucucuagguau

SEQ ID NO: 584142 - RNA, 19 nt, Artificial Sequence
  Description of Artificial Sequence: Synthetic oligonucleotide
  Antisense strand to SEQ ID NO: 584141
auaccuagagauguuuacc

SEQ ID NO: 584143 - RNA, 19 nt, Artificial Sequence
  Description of Artificial Sequence: Synthetic oligonucleotide
  Sense strand starting at position 2789 of SEQ ID NO: 318718
augagaaaucacugcaccu

SEQ ID NO: 584144 - RNA, 19 nt, Artificial Sequence
  Description of Artificial Sequence: Synthetic oligonucleotide
  Antisense strand to SEQ ID NO: 584143
aggugcagugauuucucau

SEQ ID NO: 584145 - RNA, 19 nt, Artificial Sequence
  Description of Artificial Sequence: Synthetic oligonucleotide
  Sense strand starting at position 2944 of SEQ ID NO: 318718
aagugaaacuccgugagau

SEQ ID NO: 584146 - RNA, 19 nt, Artificial Sequence
  Description of Artificial Sequence: Synthetic oligonucleotide
  Antisense strand to SEQ ID NO: 584145
aucucacggaguuucacuu

SEQ ID NO: 584147 - RNA, 19 nt, Artificial Sequence
  Description of Artificial Sequence: Synthetic oligonucleotide
  Sense strand starting at position 2945 of SEQ ID NO: 318718
agugaaacuccgugagaua

SEQ ID NO: 584148 - RNA, 19 nt, Artificial Sequence
  Description of Artificial Sequence: Synthetic oligonucleotide
  Antisense strand to SEQ ID NO: 584147
uaucucacggaguuucacu

SEQ ID NO: 584149 - RNA, 19 nt, Artificial Sequence
  Description of Artificial Sequence: Synthetic oligonucleotide
  Sense strand starting at position 2946 of SEQ ID NO: 318718
gugaaacuccgugagauac

SEQ ID NO: 584150 - RNA, 19 nt, Artificial Sequence
  Description of Artificial Sequence: Synthetic oligonucleotide
  Antisense strand to SEQ ID NO: 584149
guaucucacggaguuucac

SEQ ID NO: 584151 - RNA, 19 nt, Artificial Sequence
  Description of Artificial Sequence: Synthetic oligonucleotide
  Sense strand starting at position 2973 of SEQ ID NO: 318718
ccauguuagcugcaacauu

SEQ ID NO: 584152 - RNA, 19 nt, Artificial Sequence
  Description of Artificial Sequence: Synthetic oligonucleotide
  Antisense strand to SEQ ID NO: 584151
aauguugcagcuaacaugg

SEQ ID NO: 584153 - RNA, 19 nt, Artificial Sequence
  Description of Artificial Sequence: Synthetic oligonucleotide
  Sense strand starting at position 3012 of SEQ ID NO: 318718
ggaaacaacuaucuguuga

SEQ ID NO: 584154 - RNA, 19 nt, Artificial Sequence
  Description of Artificial Sequence: Synthetic oligonucleotide
  Antisense strand to SEQ ID NO: 584153
ucaacagauaguuguuucc

SEQ ID NO: 584155 - RNA, 19 nt, Artificial Sequence
  Description of Artificial Sequence: Synthetic oligonucleotide
  Sense strand starting at position 3020 of SEQ ID NO: 318718
cuaucuguugauggaugaa

SEQ ID NO: 584156 - RNA, 19 nt, Artificial Sequence
  Description of Artificial Sequence: Synthetic oligonucleotide
  Antisense strand to SEQ ID NO: 584155
uucauccaucaacagauag

SEQ ID NO: 584157 - RNA, 19 nt, Artificial Sequence
  Description of Artificial Sequence: Synthetic oligonucleotide
  Sense strand starting at position 3350 of SEQ ID NO: 318718
gccacaauguguuuauaua

SEQ ID NO: 584158 - RNA, 19 nt, Artificial Sequence
  Description of Artificial Sequence: Synthetic oligonucleotide
  Antisense strand to SEQ ID NO: 584157
uauauaaacacauuguggc

SEQ ID NO: 584159 - RNA, 19 nt, Artificial Sequence
  Description of Artificial Sequence: Synthetic oligonucleotide
  Sense strand starting at position 3351 of SEQ ID NO: 318718
ccacaauguguuuauauac

SEQ ID NO: 584160 - RNA, 19 nt, Artificial Sequence
  Description of Artificial Sequence: Synthetic oligonucleotide
  Antisense strand to SEQ ID NO: 584159
guauauaaacacauugugg

SEQ ID NO: 584161 - RNA, 19 nt, Artificial Sequence
  Description of Artificial Sequence: Synthetic oligonucleotide
  Sense strand starting at position 3535 of SEQ ID NO: 318718
aagaaaguagcauggugau

SEQ ID NO: 584162 - RNA, 19 nt, Artificial Sequence
  Description of Artificial Sequence: Synthetic oligonucleotide
  Antisense strand to SEQ ID NO: 584161
aucaccaugcuacuuucuu

SEQ ID NO: 584163 - RNA, 19 nt, Artificial Sequence
  Description of Artificial Sequence: Synthetic oligonucleotide
  Sense strand starting at position 3547 of SEQ ID NO: 318718
uggugauuucccugugugu

SEQ ID NO: 584164 - RNA, 19 nt, Artificial Sequence
  Description of Artificial Sequence: Synthetic oligonucleotide
  Antisense strand to SEQ ID NO: 584163
acacacagggaaaucacca

SEQ ID NO: 584165 - RNA, 19 nt, Artificial Sequence
  Description of Artificial Sequence: Synthetic oligonucleotide
  Sense strand starting at position 3549 of SEQ ID NO: 318718
gugauuucccuguguguua

SEQ ID NO: 584166 - RNA, 19 nt, Artificial Sequence
  Description of Artificial Sequence: Synthetic oligonucleotide
  Antisense strand to SEQ ID NO: 584165
uaacacacagggaaaucac

SEQ ID NO: 584167 - RNA, 19 nt, Artificial Sequence
  Description of Artificial Sequence: Synthetic oligonucleotide
  Sense strand starting at position 3550 of SEQ ID NO: 318718
ugauuucccuguguguuaa

SEQ ID NO: 584168 - RNA, 19 nt, Artificial Sequence
  Description of Artificial Sequence: Synthetic oligonucleotide
  Antisense strand to SEQ ID NO: 584167
uuaacacacagggaaauca

SEQ ID NO: 584169 - RNA, 19 nt, Artificial Sequence
  Description of Artificial Sequence: Synthetic oligonucleotide
  Sense strand starting at position 3551 of SEQ ID NO: 318718
gauuucccuguguguuaau

SEQ ID NO: 584170 - RNA, 19 nt, Artificial Sequence
  Description of Artificial Sequence: Synthetic oligonucleotide
  Antisense strand to SEQ ID NO: 584169
auuaacacacagggaaauc

SEQ ID NO: 584171 - RNA, 19 nt, Artificial Sequence
  Description of Artificial Sequence: Synthetic oligonucleotide
  Sense strand starting at position 3560 of SEQ ID NO: 318718
guguguuaauuaccaaucu

SEQ ID NO: 584172 - RNA, 19 nt, Artificial Sequence
  Description of Artificial Sequence: Synthetic oligonucleotide
  Antisense strand to SEQ ID NO: 584171
agauugguaauuaacacac

SEQ ID NO: 584173 - RNA, 19 nt, Artificial Sequence
  Description of Artificial Sequence: Synthetic oligonucleotide
  Sense strand starting at position 3586 of SEQ ID NO: 318718
uagguaauuccauauggca

SEQ ID NO: 584174 - RNA, 19 nt, Artificial Sequence
  Description of Artificial Sequence: Synthetic oligonucleotide
  Antisense strand to SEQ ID NO: 584173
ugccauauggaauuaccua

SEQ ID NO: 584175 - RNA, 19 nt, Artificial Sequence
  Description of Artificial Sequence: Synthetic oligonucleotide
  Sense strand starting at position 182 of SEQ ID NO: 318719
gugugacuauauccucuau

SEQ ID NO: 584176 - RNA, 19 nt, Artificial Sequence
  Description of Artificial Sequence: Synthetic oligonucleotide
  Antisense strand to SEQ ID NO: 584175
auagaggauauagucacac

SEQ ID NO: 584177 - RNA, 19 nt, Artificial Sequence
  Description of Artificial Sequence: Synthetic oligonucleotide
  Sense strand starting at position 184 of SEQ ID NO: 318719
gugacuauauccucuauga

SEQ ID NO: 584178 - RNA, 19 nt, Artificial Sequence
  Description of Artificial Sequence: Synthetic oligonucleotide
  Antisense strand to SEQ ID NO: 584177
ucauagaggauauagucac

SEQ ID NO: 584179 - RNA, 19 nt, Artificial Sequence
  Description of Artificial Sequence: Synthetic oligonucleotide
  Sense strand starting at position 254 of SEQ ID NO: 318719
ggaagcauaugcucagaac

SEQ ID NO: 584180 - RNA, 19 nt, Artificial Sequence
  Description of Artificial Sequence: Synthetic oligonucleotide
  Antisense strand to SEQ ID NO: 584179
guucugagcauaugcuucc

SEQ ID NO: 584181 - RNA, 19 nt, Artificial Sequence
  Description of Artificial Sequence: Synthetic oligonucleotide
  Sense strand starting at position 266 of SEQ ID NO: 318719
ucagaacugccucaaaugu

SEQ ID NO: 584182 - RNA, 19 nt, Artificial Sequence
  Description of Artificial Sequence: Synthetic oligonucleotide
  Antisense strand to SEQ ID NO: 584181
acauuugaggcaguucuga

SEQ ID NO: 584183 - RNA, 19 nt, Artificial Sequence
  Description of Artificial Sequence: Synthetic oligonucleotide
  Sense strand starting at position 274 of SEQ ID NO: 318719
gccucaaauguggaucaca

SEQ ID NO: 584184 - RNA, 19 nt, Artificial Sequence
  Description of Artificial Sequence: Synthetic oligonucleotide
  Antisense strand to SEQ ID NO: 584183
ugugauccacauuugaggc

SEQ ID NO: 584185 - RNA, 19 nt, Artificial Sequence
  Description of Artificial Sequence: Synthetic oligonucleotide
  Sense strand starting at position 311 of SEQ ID NO: 318719
aagaguagucucgggacaa

SEQ ID NO: 584186 - RNA, 19 nt, Artificial Sequence
  Description of Artificial Sequence: Synthetic oligonucleotide
  Antisense strand to SEQ ID NO: 584185
uugucccgagacuacucuu

SEQ ID NO: 584187 - RNA, 19 nt, Artificial Sequence
  Description of Artificial Sequence: Synthetic oligonucleotide
  Sense strand starting at position 441 of SEQ ID NO: 318719
cuggaaacaugucuaccau

SEQ ID NO: 584188 - RNA, 19 nt, Artificial Sequence
  Description of Artificial Sequence: Synthetic oligonucleotide
  Antisense strand to SEQ ID NO: 584187
augguagacauguuuccag

SEQ ID NO: 584189 - RNA, 19 nt, Artificial Sequence
  Description of Artificial Sequence: Synthetic oligonucleotide
  Sense strand starting at position 716 of SEQ ID NO: 318719
caagaagaguguuuacuag

SEQ ID NO: 584190 - RNA, 19 nt, Artificial Sequence
  Description of Artificial Sequence: Synthetic oligonucleotide
  Antisense strand to SEQ ID NO: 584189
cuaguaaacacucuucuug

SEQ ID NO: 584191 - RNA, 19 nt, Artificial Sequence
  Description of Artificial Sequence: Synthetic oligonucleotide
  Sense strand starting at position 730 of SEQ ID NO: 318719
acuaguuuacuagggcaau

SEQ ID NO: 584192 - RNA, 19 nt, Artificial Sequence
  Description of Artificial Sequence: Synthetic oligonucleotide
  Antisense strand to SEQ ID NO: 584191
auugcccuaguaaacuagu

SEQ ID NO: 584193 - RNA, 19 nt, Artificial Sequence
  Description of Artificial Sequence: Synthetic oligonucleotide
  Sense strand starting at position 849 of SEQ ID NO: 318719
ggaguccuucgcuagcuuu

SEQ ID NO: 584194 - RNA, 19 nt, Artificial Sequence
  Description of Artificial Sequence: Synthetic oligonucleotide
  Antisense strand to SEQ ID NO: 584193
aaagcuagcgaaggacucc

SEQ ID NO: 584195 - RNA, 19 nt, Artificial Sequence
  Description of Artificial Sequence: Synthetic oligonucleotide
  Sense strand starting at position 852 of SEQ ID NO: 318719
guccuucgcuagcuuugaa

SEQ ID NO: 584196 - RNA, 19 nt, Artificial Sequence
  Description of Artificial Sequence: Synthetic oligonucleotide
  Antisense strand to SEQ ID NO: 584195
uucaaagcuagcgaaggac

SEQ ID NO: 584197 - RNA, 19 nt, Artificial Sequence
  Description of Artificial Sequence: Synthetic oligonucleotide
  Sense strand starting at position 964 of SEQ ID NO: 318719
cccuuuccucccuauggua

SEQ ID NO: 584198 - RNA, 19 nt, Artificial Sequence
  Description of Artificial Sequence: Synthetic oligonucleotide
  Antisense strand to SEQ ID NO: 584197
uaccauagggaggaaaggg

SEQ ID NO: 584199 - RNA, 19 nt, Artificial Sequence
  Description of Artificial Sequence: Synthetic oligonucleotide
  Sense strand starting at position 973 of SEQ ID NO: 318719
cccuaugguagccacgaua

SEQ ID NO: 584200 - RNA, 19 nt, Artificial Sequence
  Description of Artificial Sequence: Synthetic oligonucleotide
  Antisense strand to SEQ ID NO: 584199
uaucguggcuaccauaggg

SEQ ID NO: 584201 - RNA, 19 nt, Artificial Sequence
  Description of Artificial Sequence: Synthetic oligonucleotide
  Sense strand starting at position 1075 of SEQ ID NO: 318719
ccaagaaacugugagcaua

SEQ ID NO: 584202 - RNA, 19 nt, Artificial Sequence
  Description of Artificial Sequence: Synthetic oligonucleotide
  Antisense strand to SEQ ID NO: 584201
uaugcucacaguuucuugg

SEQ ID NO: 584203 - RNA, 19 nt, Artificial Sequence
  Description of Artificial Sequence: Synthetic oligonucleotide
  Sense strand starting at position 1842 of SEQ ID NO: 318719
uuccguuacucagaagaaa

SEQ ID NO: 584204 - RNA, 19 nt, Artificial Sequence
  Description of Artificial Sequence: Synthetic oligonucleotide
  Antisense strand to SEQ ID NO: 584203
uuucuucugaguaacggaa

SEQ ID NO: 584205 - RNA, 19 nt, Artificial Sequence
  Description of Artificial Sequence: Synthetic oligonucleotide
  Sense strand starting at position 2503 of SEQ ID NO: 318719
ggaggaucagugugcugua

SEQ ID NO: 584206 - RNA, 19 nt, Artificial Sequence
  Description of Artificial Sequence: Synthetic oligonucleotide
  Antisense strand to SEQ ID NO: 584205
uacagcacacugauccucc

SEQ ID NO: 584207 - RNA, 19 nt, Artificial Sequence
  Description of Artificial Sequence: Synthetic oligonucleotide
  Sense strand starting at position 2584 of SEQ ID NO: 318719
guccaugugagugcuuguu

SEQ ID NO: 584208 - RNA, 19 nt, Artificial Sequence
  Description of Artificial Sequence: Synthetic oligonucleotide
  Antisense strand to SEQ ID NO: 584207
aacaagcacucacauggac

SEQ ID NO: 584209 - RNA, 19 nt, Artificial Sequence
  Description of Artificial Sequence: Synthetic oligonucleotide
  Sense strand starting at position 2588 of SEQ ID NO: 318719
augugagugcuuguuacgu

SEQ ID NO: 584210 - RNA, 19 nt, Artificial Sequence
  Description of Artificial Sequence: Synthetic oligonucleotide
  Antisense strand to SEQ ID NO: 584209
acguaacaagcacucacau

SEQ ID NO: 584211 - RNA, 19 nt, Artificial Sequence
  Description of Artificial Sequence: Synthetic oligonucleotide
  Sense strand starting at position 2596 of SEQ ID NO: 318719
gcuuguuacgugcauagac

SEQ ID NO: 584212 - RNA, 19 nt, Artificial Sequence
  Description of Artificial Sequence: Synthetic oligonucleotide
  Antisense strand to SEQ ID NO: 584211
gucuaugcacguaacaagc

SEQ ID NO: 584213 - RNA, 19 nt, Artificial Sequence
  Description of Artificial Sequence: Synthetic oligonucleotide
  Sense strand starting at position 2605 of SEQ ID NO: 318719
gugcauagacuguaaugau

SEQ ID NO: 584214 - RNA, 19 nt, Artificial Sequence
  Description of Artificial Sequence: Synthetic oligonucleotide
  Antisense strand to SEQ ID NO: 584213
aucauuacagucuaugcac

SEQ ID NO: 584215 - RNA, 19 nt, Artificial Sequence
  Description of Artificial Sequence: Synthetic oligonucleotide
  Sense strand starting at position 2614 of SEQ ID NO: 318719
cuguaaugaucaucaaguc

SEQ ID NO: 584216 - RNA, 19 nt, Artificial Sequence
  Description of Artificial Sequence: Synthetic oligonucleotide
  Antisense strand to SEQ ID NO: 584215
gacuugaugaucauuacag

SEQ ID NO: 584217 - RNA, 19 nt, Artificial Sequence
  Description of Artificial Sequence: Synthetic oligonucleotide
  Sense strand starting at position 2615 of SEQ ID NO: 318719
uguaaugaucaucaaguca

SEQ ID NO: 584218 - RNA, 19 nt, Artificial Sequence
  Description of Artificial Sequence: Synthetic oligonucleotide
  Antisense strand to SEQ ID NO: 584217
ugacuugaugaucauuaca

SEQ ID NO: 584219 - RNA, 19 nt, Artificial Sequence
  Description of Artificial Sequence: Synthetic oligonucleotide
  Sense strand starting at position 2748 of SEQ ID NO: 318719
ucacccuagucugcuauua

SEQ ID NO: 584220 - RNA, 19 nt, Artificial Sequence
  Description of Artificial Sequence: Synthetic oligonucleotide
  Antisense strand to SEQ ID NO: 584219
uaauagcagacuaggguga

SEQ ID NO: 584221 - RNA, 19 nt, Artificial Sequence
  Description of Artificial Sequence: Synthetic oligonucleotide
  Sense strand starting at position 2875 of SEQ ID NO: 318719
guugucuauguccaugaga

SEQ ID NO: 584222 - RNA, 19 nt, Artificial Sequence
  Description of Artificial Sequence: Synthetic oligonucleotide
  Antisense strand to SEQ ID NO: 584221
ucucauggacauagacaac

SEQ ID NO: 584223 - RNA, 19 nt, Artificial Sequence
  Description of Artificial Sequence: Synthetic oligonucleotide
  Sense strand starting at position 2877 of SEQ ID NO: 318719
ugucuauguccaugagauc

SEQ ID NO: 584224 - RNA, 19 nt, Artificial Sequence
  Description of Artificial Sequence: Synthetic oligonucleotide
  Antisense strand to SEQ ID NO: 584223
gaucucauggacauagaca

SEQ ID NO: 584225 - RNA, 19 nt, Artificial Sequence
  Description of Artificial Sequence: Synthetic oligonucleotide
  Sense strand starting at position 2878 of SEQ ID NO: 318719
gucuauguccaugagauca

SEQ ID NO: 584226 - RNA, 19 nt, Artificial Sequence
  Description of Artificial Sequence: Synthetic oligonucleotide
  Antisense strand to SEQ ID NO: 584225
ugaucucauggacauagac

SEQ ID NO: 584227 - RNA, 19 nt, Artificial Sequence
  Description of Artificial Sequence: Synthetic oligonucleotide
  Sense strand starting at position 2883 of SEQ ID NO: 318719
uguccaugagaucaagugu

SEQ ID NO: 584228 - RNA, 19 nt, Artificial Sequence
  Description of Artificial Sequence: Synthetic oligonucleotide
  Antisense strand to SEQ ID NO: 584227
acacuugaucucauggaca

SEQ ID NO: 584229 - RNA, 19 nt, Artificial Sequence
  Description of Artificial Sequence: Synthetic oligonucleotide
  Sense strand starting at position 2903 of SEQ ID NO: 318719
uuaacucccgaauauaagu

SEQ ID NO: 584230 - RNA, 19 nt, Artificial Sequence
  Description of Artificial Sequence: Synthetic oligonucleotide
  Antisense strand to SEQ ID NO: 584229
acuuauauucgggaguuaa

SEQ ID NO: 584231 - RNA, 19 nt, Artificial Sequence
  Description of Artificial Sequence: Synthetic oligonucleotide
  Sense strand starting at position 2908 of SEQ ID NO: 318719
ucccgaauauaagugagaa

SEQ ID NO: 584232 - RNA, 19 nt, Artificial Sequence
  Description of Artificial Sequence: Synthetic oligonucleotide
  Antisense strand to SEQ ID NO: 584231
uucucacuuauauucggga

SEQ ID NO: 584233 - RNA, 19 nt, Artificial Sequence
  Description of Artificial Sequence: Synthetic oligonucleotide
  Sense strand starting at position 2909 of SEQ ID NO: 318719
cccgaauauaagugagaac

SEQ ID NO: 584234 - RNA, 19 nt, Artificial Sequence
  Description of Artificial Sequence: Synthetic oligonucleotide
  Antisense strand to SEQ ID NO: 584233
guucucacuuauauucggg

SEQ ID NO: 584235 - RNA, 19 nt, Artificial Sequence
  Description of Artificial Sequence: Synthetic oligonucleotide
  Sense strand starting at position 2912 of SEQ ID NO: 318719
gaauauaagugagaacaug

SEQ ID NO: 584236 - RNA, 19 nt, Artificial Sequence
  Description of Artificial Sequence: Synthetic oligonucleotide
  Antisense strand to SEQ ID NO: 584235
cauguucucacuuauauuc

SEQ ID NO: 584237 - RNA, 19 nt, Artificial Sequence
  Description of Artificial Sequence: Synthetic oligonucleotide
  Sense strand starting at position 2993 of SEQ ID NO: 318719
uguugcugugaauacauua

SEQ ID NO: 584238 - RNA, 19 nt, Artificial Sequence
  Description of Artificial Sequence: Synthetic oligonucleotide
  Antisense strand to SEQ ID NO: 584237
uaauguauucacagcaaca

SEQ ID NO: 584239 - RNA, 19 nt, Artificial Sequence
  Description of Artificial Sequence: Synthetic oligonucleotide
  Sense strand starting at position 3046 of SEQ ID NO: 318719
ugugucuauguaugacauu

SEQ ID NO: 584240 - RNA, 19 nt, Artificial Sequence
  Description of Artificial Sequence: Synthetic oligonucleotide
  Antisense strand to SEQ ID NO: 584239
aaugucauacauagacaca

SEQ ID NO: 584241 - RNA, 19 nt, Artificial Sequence
  Description of Artificial Sequence: Synthetic oligonucleotide
  Sense strand starting at position 3087 of SEQ ID NO: 318719
cugguagguugagucuaua

SEQ ID NO: 584242 - RNA, 19 nt, Artificial Sequence
  Description of Artificial Sequence: Synthetic oligonucleotide
  Antisense strand to SEQ ID NO: 584241
uauagacucaaccuaccag

SEQ ID NO: 584243 - RNA, 19 nt, Artificial Sequence
  Description of Artificial Sequence: Synthetic oligonucleotide
  Sense strand starting at position 3090 of SEQ ID NO: 318719
guagguugagucuauaucu

SEQ ID NO: 584244 - RNA, 19 nt, Artificial Sequence
  Description of Artificial Sequence: Synthetic oligonucleotide
  Antisense strand to SEQ ID NO: 584243
agauauagacucaaccuac

SEQ ID NO: 584245 - RNA, 19 nt, Artificial Sequence
  Description of Artificial Sequence: Synthetic oligonucleotide
  Sense strand starting at position 3118 of SEQ ID NO: 318719
caaauagugcagugacaaa

SEQ ID NO: 584246 - RNA, 19 nt, Artificial Sequence
  Description of Artificial Sequence: Synthetic oligonucleotide
  Antisense strand to SEQ ID NO: 584245
uuugucacugcacuauuug

SEQ ID NO: 584247 - RNA, 19 nt, Artificial Sequence
  Description of Artificial Sequence: Synthetic oligonucleotide
  Sense strand starting at position 3371 of SEQ ID NO: 318719
gugagcuuauaucuaauua

SEQ ID NO: 584248 - RNA, 19 nt, Artificial Sequence
  Description of Artificial Sequence: Synthetic oligonucleotide
  Antisense strand to SEQ ID NO: 584247
uaauuagauauaagcucac

SEQ ID NO: 584249 - RNA, 19 nt, Artificial Sequence
  Description of Artificial Sequence: Synthetic oligonucleotide
  Sense strand starting at position 3388 of SEQ ID NO: 318719
uagaaaguguuaguaacca

SEQ ID NO: 584250 - RNA, 19 nt, Artificial Sequence
  Description of Artificial Sequence: Synthetic oligonucleotide
  Antisense strand to SEQ ID NO: 584249
ugguuacuaacacuuucua

SEQ ID NO: 584251 - RNA, 19 nt, Artificial Sequence
  Description of Artificial Sequence: Synthetic oligonucleotide
  Sense strand starting at position 3541 of SEQ ID NO: 318719
aggacuacgucuuuaauaa

SEQ ID NO: 584252 - RNA, 19 nt, Artificial Sequence
  Description of Artificial Sequence: Synthetic oligonucleotide
  Antisense strand to SEQ ID NO: 584251
uuauuaaagacguaguccu

SEQ ID NO: 584253 - RNA, 19 nt, Artificial Sequence
  Description of Artificial Sequence: Synthetic oligonucleotide
  Sense strand starting at position 3542 of SEQ ID NO: 318719
ggacuacgucuuuaauaaa

SEQ ID NO: 584254 - RNA, 19 nt, Artificial Sequence
  Description of Artificial Sequence: Synthetic oligonucleotide
  Antisense strand to SEQ ID NO: 584253
uuuauuaaagacguagucc

SEQ ID NO: 584255 - RNA, 19 nt, Artificial Sequence
  Description of Artificial Sequence: Synthetic oligonucleotide
  Sense strand starting at position 124 of SEQ ID NO: 318720
acaaaugacucugcuguca

SEQ ID NO: 584256 - RNA, 19 nt, Artificial Sequence
  Description of Artificial Sequence: Synthetic oligonucleotide
  Antisense strand to SEQ ID NO: 584255
ugacagcagagucauuugu

SEQ ID NO: 584257 - RNA, 19 nt, Artificial Sequence
  Description of Artificial Sequence: Synthetic oligonucleotide
  Sense strand starting at position 135 of SEQ ID NO: 318720
ugcugucauuuguuuccua

SEQ ID NO: 584258 - RNA, 19 nt, Artificial Sequence
  Description of Artificial Sequence: Synthetic oligonucleotide
  Antisense strand to SEQ ID NO: 584257
uaggaaacaaaugacagca

SEQ ID NO: 584259 - RNA, 19 nt, Artificial Sequence
  Description of Artificial Sequence: Synthetic oligonucleotide
  Sense strand starting at position 136 of SEQ ID NO: 318720
gcugucauuuguuuccuau

SEQ ID NO: 584260 - RNA, 19 nt, Artificial Sequence
  Description of Artificial Sequence: Synthetic oligonucleotide
  Antisense strand to SEQ ID NO: 584259
auaggaaacaaaugacagc

SEQ ID NO: 584261 - RNA, 19 nt, Artificial Sequence
  Description of Artificial Sequence: Synthetic oligonucleotide
  Sense strand starting at position 139 of SEQ ID NO: 318720
gucauuuguuuccuauugu

SEQ ID NO: 584262 - RNA, 19 nt, Artificial Sequence
  Description of Artificial Sequence: Synthetic oligonucleotide
  Antisense strand to SEQ ID NO: 584261
acaauaggaaacaaaugac

SEQ ID NO: 584263 - RNA, 19 nt, Artificial Sequence
  Description of Artificial Sequence: Synthetic oligonucleotide
  Sense strand starting at position 198 of SEQ ID NO: 318720
guguucugugauguuguuu

SEQ ID NO: 584264 - RNA, 19 nt, Artificial Sequence
  Description of Artificial Sequence: Synthetic oligonucleotide
  Antisense strand to SEQ ID NO: 584263
aaacaacaucacagaacac

SEQ ID NO: 584265 - RNA, 19 nt, Artificial Sequence
  Description of Artificial Sequence: Synthetic oligonucleotide
  Sense strand starting at position 304 of SEQ ID NO: 318720
gccacaguugcugauaaau

SEQ ID NO: 584266 - RNA, 19 nt, Artificial Sequence
  Description of Artificial Sequence: Synthetic oligonucleotide
  Antisense strand to SEQ ID NO: 584265
auuuaucagcaacuguggc

SEQ ID NO: 584267 - RNA, 19 nt, Artificial Sequence
  Description of Artificial Sequence: Synthetic oligonucleotide
  Sense strand starting at position 639 of SEQ ID NO: 318720
uaauuacuugaaugugguu

SEQ ID NO: 584268 - RNA, 19 nt, Artificial Sequence
  Description of Artificial Sequence: Synthetic oligonucleotide
  Antisense strand to SEQ ID NO: 584267
aaccacauucaaguaauua

SEQ ID NO: 584269 - RNA, 19 nt, Artificial Sequence
  Description of Artificial Sequence: Synthetic oligonucleotide
  Sense strand starting at position 645 of SEQ ID NO: 318720
cuugaaugugguuaaagca

SEQ ID NO: 584270 - RNA, 19 nt, Artificial Sequence
  Description of Artificial Sequence: Synthetic oligonucleotide
  Antisense strand to SEQ ID NO: 584269
ugcuuuaaccacauucaag

SEQ ID NO: 584271 - RNA, 19 nt, Artificial Sequence
  Description of Artificial Sequence: Synthetic oligonucleotide
  Sense strand starting at position 652 of SEQ ID NO: 318720
gugguuaaagcauagucua

SEQ ID NO: 584272 - RNA, 19 nt, Artificial Sequence
  Description of Artificial Sequence: Synthetic oligonucleotide
  Antisense strand to SEQ ID NO: 584271
uagacuaugcuuuaaccac

SEQ ID NO: 584273 - RNA, 19 nt, Artificial Sequence
  Description of Artificial Sequence: Synthetic oligonucleotide
  Sense strand starting at position 914 of SEQ ID NO: 318720
augauaggugcugguaaca

SEQ ID NO: 584274 - RNA, 19 nt, Artificial Sequence
  Description of Artificial Sequence: Synthetic oligonucleotide
  Antisense strand to SEQ ID NO: 584273
uguuaccagcaccuaucau

SEQ ID NO: 584275 - RNA, 19 nt, Artificial Sequence
  Description of Artificial Sequence: Synthetic oligonucleotide
  Sense strand starting at position 943 of SEQ ID NO: 318720
ugacuaaucuaauugaagc

SEQ ID NO: 584276 - RNA, 19 nt, Artificial Sequence
  Description of Artificial Sequence: Synthetic oligonucleotide
  Antisense strand to SEQ ID NO: 584275
gcuucaauuagauuaguca

SEQ ID NO: 584277 - RNA, 19 nt, Artificial Sequence
  Description of Artificial Sequence: Synthetic oligonucleotide
  Sense strand starting at position 977 of SEQ ID NO: 318720
aaacuaguuguguauguua

SEQ ID NO: 584278 - RNA, 19 nt, Artificial Sequence
  Description of Artificial Sequence: Synthetic oligonucleotide
  Antisense strand to SEQ ID NO: 584277
uaacauacacaacuaguuu

SEQ ID NO: 584279 - RNA, 19 nt, Artificial Sequence
  Description of Artificial Sequence: Synthetic oligonucleotide
  Sense strand starting at position 1181 of SEQ ID NO: 318720
uaucauguggcagaugaca

SEQ ID NO: 584280 - RNA, 19 nt, Artificial Sequence
  Description of Artificial Sequence: Synthetic oligonucleotide
  Antisense strand to SEQ ID NO: 584279
ugucaucugccacaugaua

SEQ ID NO: 584281 - RNA, 19 nt, Artificial Sequence
  Description of Artificial Sequence: Synthetic oligonucleotide
  Sense strand starting at position 1202 of SEQ ID NO: 318720
uuccacugacagugaauaa

SEQ ID NO: 584282 - RNA, 19 nt, Artificial Sequence
  Description of Artificial Sequence: Synthetic oligonucleotide
  Antisense strand to SEQ ID NO: 584281
uuauucacugucaguggaa

SEQ ID NO: 584283 - RNA, 19 nt, Artificial Sequence
  Description of Artificial Sequence: Synthetic oligonucleotide
  Sense strand starting at position 1506 of SEQ ID NO: 318720
caaauucuccagugggaca

SEQ ID NO: 584284 - RNA, 19 nt, Artificial Sequence
  Description of Artificial Sequence: Synthetic oligonucleotide
  Antisense strand to SEQ ID NO: 584283
ugucccacuggagaauuug

SEQ ID NO: 584285 - RNA, 19 nt, Artificial Sequence
  Description of Artificial Sequence: Synthetic oligonucleotide
  Sense strand starting at position 1559 of SEQ ID NO: 318720
ccacaugaucugugccaaa

SEQ ID NO: 584286 - RNA, 19 nt, Artificial Sequence
  Description of Artificial Sequence: Synthetic oligonucleotide
  Antisense strand to SEQ ID NO: 584285
uuuggcacagaucaugugg

SEQ ID NO: 584287 - RNA, 19 nt, Artificial Sequence
  Description of Artificial Sequence: Synthetic oligonucleotide
  Sense strand starting at position 1688 of SEQ ID NO: 318720
cugaaauucugggccaucu

SEQ ID NO: 584288 - RNA, 19 nt, Artificial Sequence
  Description of Artificial Sequence: Synthetic oligonucleotide
  Antisense strand to SEQ ID NO: 584287
agauggcccagaauuucag

SEQ ID NO: 584289 - RNA, 19 nt, Artificial Sequence
  Description of Artificial Sequence: Synthetic oligonucleotide
  Sense strand starting at position 1730 of SEQ ID NO: 318720
gacuacucccaguaaggua

SEQ ID NO: 584290 - RNA, 19 nt, Artificial Sequence
  Description of Artificial Sequence: Synthetic oligonucleotide
  Antisense strand to SEQ ID NO: 584289
uaccuuacugggaguaguc

SEQ ID NO: 584291 - RNA, 19 nt, Artificial Sequence
  Description of Artificial Sequence: Synthetic oligonucleotide
  Sense strand starting at position 1806 of SEQ ID NO: 318720
aaaugauugcauggguaac

SEQ ID NO: 584292 - RNA, 19 nt, Artificial Sequence
  Description of Artificial Sequence: Synthetic oligonucleotide
  Antisense strand to SEQ ID NO: 584291
guuacccaugcaaucauuu

SEQ ID NO: 584293 - RNA, 19 nt, Artificial Sequence
  Description of Artificial Sequence: Synthetic oligonucleotide
  Sense strand starting at position 1915 of SEQ ID NO: 318720
cuuucucuuguguacagau

SEQ ID NO: 584294 - RNA, 19 nt, Artificial Sequence
  Description of Artificial Sequence: Synthetic oligonucleotide
  Antisense strand to SEQ ID NO: 584293
aucuguacacaagagaaag

SEQ ID NO: 584295 - RNA, 19 nt, Artificial Sequence
  Description of Artificial Sequence: Synthetic oligonucleotide
  Sense strand starting at position 1927 of SEQ ID NO: 318720
uacagauugcagggaacuu

SEQ ID NO: 584296 - RNA, 19 nt, Artificial Sequence
  Description of Artificial Sequence: Synthetic oligonucleotide
  Antisense strand to SEQ ID NO: 584295
aaguucccugcaaucugua

SEQ ID NO: 584297 - RNA, 19 nt, Artificial Sequence
  Description of Artificial Sequence: Synthetic oligonucleotide
  Sense strand starting at position 1956 of SEQ ID NO: 318720
cagggacaguguuucgaau

SEQ ID NO: 584298 - RNA, 19 nt, Artificial Sequence
  Description of Artificial Sequence: Synthetic oligonucleotide
  Antisense strand to SEQ ID NO: 584297
auucgaaacacugucccug

SEQ ID NO: 584299 - RNA, 19 nt, Artificial Sequence
  Description of Artificial Sequence: Synthetic oligonucleotide
  Sense strand starting at position 1965 of SEQ ID NO: 318720
uguuucgaaugacuuaaga

SEQ ID NO: 584300 - RNA, 19 nt, Artificial Sequence
  Description of Artificial Sequence: Synthetic oligonucleotide
  Antisense strand to SEQ ID NO: 584299
ucuuaagucauucgaaaca

SEQ ID NO: 584301 - RNA, 19 nt, Artificial Sequence
  Description of Artificial Sequence: Synthetic oligonucleotide
  Sense strand starting at position 2212 of SEQ ID NO: 318720
gcuuuaaagagaugaaacg

SEQ ID NO: 584302 - RNA, 19 nt, Artificial Sequence
  Description of Artificial Sequence: Synthetic oligonucleotide
  Antisense strand to SEQ ID NO: 584301
cguuucaucucuuuaaagc

SEQ ID NO: 584303 - RNA, 19 nt, Artificial Sequence
  Description of Artificial Sequence: Synthetic oligonucleotide
  Sense strand starting at position 2497 of SEQ ID NO: 318720
gacucuagauccuuagagu

SEQ ID NO: 584304 - RNA, 19 nt, Artificial Sequence
  Description of Artificial Sequence: Synthetic oligonucleotide
  Antisense strand to SEQ ID NO: 584303
acucuaaggaucuagaguc

SEQ ID NO: 584305 - RNA, 19 nt, Artificial Sequence
  Description of Artificial Sequence: Synthetic oligonucleotide
  Sense strand starting at position 2498 of SEQ ID NO: 318720
acucuagauccuuagaguu

SEQ ID NO: 584306 - RNA, 19 nt, Artificial Sequence
  Description of Artificial Sequence: Synthetic oligonucleotide
  Antisense strand to SEQ ID NO: 584305
aacucuaaggaucuagagu

SEQ ID NO: 584307 - RNA, 19 nt, Artificial Sequence
  Description of Artificial Sequence: Synthetic oligonucleotide
  Sense strand starting at position 2533 of SEQ ID NO: 318720
gcagauuuaugcccaccga

SEQ ID NO: 584308 - RNA, 19 nt, Artificial Sequence
  Description of Artificial Sequence: Synthetic oligonucleotide
  Antisense strand to SEQ ID NO: 584307
ucggugggcauaaaucugc

SEQ ID NO: 584309 - RNA, 19 nt, Artificial Sequence
  Description of Artificial Sequence: Synthetic oligonucleotide
  Sense strand starting at position 2832 of SEQ ID NO: 318720
gaguaaccuuuaucaaggu

SEQ ID NO: 584310 - RNA, 19 nt, Artificial Sequence
  Description of Artificial Sequence: Synthetic oligonucleotide
  Antisense strand to SEQ ID NO: 584309
accuugauaaagguuacuc

SEQ ID NO: 584311 - RNA, 19 nt, Artificial Sequence
  Description of Artificial Sequence: Synthetic oligonucleotide
  Sense strand starting at position 2893 of SEQ ID NO: 318720
gcuaguugcacuuaggaau

SEQ ID NO: 584312 - RNA, 19 nt, Artificial Sequence
  Description of Artificial Sequence: Synthetic oligonucleotide
  Antisense strand to SEQ ID NO: 584311
auuccuaagugcaacuagc

SEQ ID NO: 584313 - RNA, 19 nt, Artificial Sequence
  Description of Artificial Sequence: Synthetic oligonucleotide
  Sense strand starting at position 2926 of SEQ ID NO: 318720
cuucucugauuuguguuau

SEQ ID NO: 584314 - RNA, 19 nt, Artificial Sequence
  Description of Artificial Sequence: Synthetic oligonucleotide
  Antisense strand to SEQ ID NO: 584313
auaacacaaaucagagaag

SEQ ID NO: 584315 - RNA, 19 nt, Artificial Sequence
  Description of Artificial Sequence: Synthetic oligonucleotide
  Sense strand starting at position 2938 of SEQ ID NO: 318720
guguuaugucucuuguguc

SEQ ID NO: 584316 - RNA, 19 nt, Artificial Sequence
  Description of Artificial Sequence: Synthetic oligonucleotide
  Antisense strand to SEQ ID NO: 584315
gacacaagagacauaacac

SEQ ID NO: 584317 - RNA, 19 nt, Artificial Sequence
  Description of Artificial Sequence: Synthetic oligonucleotide
  Sense strand starting at position 3001 of SEQ ID NO: 318720
agcaguuauguagaccuuu

SEQ ID NO: 584318 - RNA, 19 nt, Artificial Sequence
  Description of Artificial Sequence: Synthetic oligonucleotide
  Antisense strand to SEQ ID NO: 584317
aaaggucuacauaacugcu

SEQ ID NO: 584319 - RNA, 19 nt, Artificial Sequence
  Description of Artificial Sequence: Synthetic oligonucleotide
  Sense strand starting at position 3092 of SEQ ID NO: 318720
agauacaccugauugcaaa

SEQ ID NO: 584320 - RNA, 19 nt, Artificial Sequence
  Description of Artificial Sequence: Synthetic oligonucleotide
  Antisense strand to SEQ ID NO: 584319
uuugcaaucagguguaucu

SEQ ID NO: 584321 - RNA, 19 nt, Artificial Sequence
  Description of Artificial Sequence: Synthetic oligonucleotide
  Sense strand starting at position 3111 of SEQ ID NO: 318720
gagucaugaaagugaguuc

SEQ ID NO: 584322 - RNA, 19 nt, Artificial Sequence
  Description of Artificial Sequence: Synthetic oligonucleotide
  Antisense strand to SEQ ID NO: 584321
gaacucacuuucaugacuc

SEQ ID NO: 584323 - RNA, 19 nt, Artificial Sequence
  Description of Artificial Sequence: Synthetic oligonucleotide
  Sense strand starting at position 3178 of SEQ ID NO: 318720
uccuuauuggccuauagga

SEQ ID NO: 584324 - RNA, 19 nt, Artificial Sequence
  Description of Artificial Sequence: Synthetic oligonucleotide
  Antisense strand to SEQ ID NO: 584323
uccuauaggccaauaagga

SEQ ID NO: 584325 - RNA, 19 nt, Artificial Sequence
  Description of Artificial Sequence: Synthetic oligonucleotide
  Sense strand starting at position 3180 of SEQ ID NO: 318720
cuuauuggccuauaggauu

SEQ ID NO: 584326 - RNA, 19 nt, Artificial Sequence
  Description of Artificial Sequence: Synthetic oligonucleotide
  Antisense strand to SEQ ID NO: 584325
aauccuauaggccaauaag

SEQ ID NO: 584327 - RNA, 19 nt, Artificial Sequence
  Description of Artificial Sequence: Synthetic oligonucleotide
  Sense strand starting at position 3186 of SEQ ID NO: 318720
ggccuauaggauuauguuu

SEQ ID NO: 584328 - RNA, 19 nt, Artificial Sequence
  Description of Artificial Sequence: Synthetic oligonucleotide
  Antisense strand to SEQ ID NO: 584327
aaacauaauccuauaggcc

SEQ ID NO: 584329 - RNA, 19 nt, Artificial Sequence
  Description of Artificial Sequence: Synthetic oligonucleotide
  Sense strand starting at position 3324 of SEQ ID NO: 318720
uaguuaucugaauaugugu

SEQ ID NO: 584330 - RNA, 19 nt, Artificial Sequence
  Description of Artificial Sequence: Synthetic oligonucleotide
  Antisense strand to SEQ ID NO: 584329
acacauauucagauaacua

SEQ ID NO: 584331 - RNA, 19 nt, Artificial Sequence
  Description of Artificial Sequence: Synthetic oligonucleotide
  Sense strand starting at position 3746 of SEQ ID NO: 318720
ugaguaaccggaggugaaa

SEQ ID NO: 584332 - RNA, 19 nt, Artificial Sequence
  Description of Artificial Sequence: Synthetic oligonucleotide
  Antisense strand to SEQ ID NO: 584331
uuucaccuccgguuacuca

SEQ ID NO: 584333 - RNA, 19 nt, Artificial Sequence
  Description of Artificial Sequence: Synthetic oligonucleotide
  Sense strand starting at position 3892 of SEQ ID NO: 318720
gaacaagacgcucauggua

SEQ ID NO: 584334 - RNA, 19 nt, Artificial Sequence
  Description of Artificial Sequence: Synthetic oligonucleotide
  Antisense strand to SEQ ID NO: 584333
uaccaugagcgucuuguuc

SEQ ID NO: 584335 - RNA, 19 nt, Artificial Sequence
  Description of Artificial Sequence: Synthetic oligonucleotide
  Sense strand starting at position 153 of SEQ ID NO: 318721
ugacauuuaugugaccuuu

SEQ ID NO: 584336 - RNA, 19 nt, Artificial Sequence
  Description of Artificial Sequence: Synthetic oligonucleotide
  Antisense strand to SEQ ID NO: 584335
aaaggucacauaaauguca

SEQ ID NO: 584337 - RNA, 19 nt, Artificial Sequence
  Description of Artificial Sequence: Synthetic oligonucleotide
  Sense strand starting at position 645 of SEQ ID NO: 318721
uccuucugaggguacuaua

SEQ ID NO: 584338 - RNA, 19 nt, Artificial Sequence
  Description of Artificial Sequence: Synthetic oligonucleotide
  Antisense strand to SEQ ID NO: 584337
uauaguacccucagaagga

SEQ ID NO: 584339 - RNA, 19 nt, Artificial Sequence
  Description of Artificial Sequence: Synthetic oligonucleotide
  Sense strand starting at position 655 of SEQ ID NO: 318721
gguacuauacauugacuuu

SEQ ID NO: 584340 - RNA, 19 nt, Artificial Sequence
  Description of Artificial Sequence: Synthetic oligonucleotide
  Antisense strand to SEQ ID NO: 584339
aaagucaauguauaguacc

SEQ ID NO: 584341 - RNA, 19 nt, Artificial Sequence
  Description of Artificial Sequence: Synthetic oligonucleotide
  Sense strand starting at position 1069 of SEQ ID NO: 318721
ggccgagaauuaucucuuu

SEQ ID NO: 584342 - RNA, 19 nt, Artificial Sequence
  Description of Artificial Sequence: Synthetic oligonucleotide
  Antisense strand to SEQ ID NO: 584341
aaagagauaauucucggcc

SEQ ID NO: 584343 - RNA, 19 nt, Artificial Sequence
  Description of Artificial Sequence: Synthetic oligonucleotide
  Sense strand starting at position 1072 of SEQ ID NO: 318721
cgagaauuaucucuuuaac

SEQ ID NO: 584344 - RNA, 19 nt, Artificial Sequence
  Description of Artificial Sequence: Synthetic oligonucleotide
  Antisense strand to SEQ ID NO: 584343
guuaaagagauaauucucg

SEQ ID NO: 584345 - RNA, 19 nt, Artificial Sequence
  Description of Artificial Sequence: Synthetic oligonucleotide
  Sense strand starting at position 1173 of SEQ ID NO: 318721
guucgacuggauuggaaga

SEQ ID NO: 584346 - RNA, 19 nt, Artificial Sequence
  Description of Artificial Sequence: Synthetic oligonucleotide
  Antisense strand to SEQ ID NO: 584345
ucuuccaauccagucgaac

SEQ ID NO: 584347 - RNA, 19 nt, Artificial Sequence
  Description of Artificial Sequence: Synthetic oligonucleotide
  Sense strand starting at position 1582 of SEQ ID NO: 318721
guguaucuaucaccugaga

SEQ ID NO: 584348 - RNA, 19 nt, Artificial Sequence
  Description of Artificial Sequence: Synthetic oligonucleotide
  Antisense strand to SEQ ID NO: 584347
ucucaggugauagauacac

SEQ ID NO: 584349 - RNA, 19 nt, Artificial Sequence
  Description of Artificial Sequence: Synthetic oligonucleotide
  Sense strand starting at position 1584 of SEQ ID NO: 318721
guaucuaucaccugagagg

SEQ ID NO: 584350 - RNA, 19 nt, Artificial Sequence
  Description of Artificial Sequence: Synthetic oligonucleotide
  Antisense strand to SEQ ID NO: 584349
ccucucaggugauagauac

SEQ ID NO: 584351 - RNA, 19 nt, Artificial Sequence
  Description of Artificial Sequence: Synthetic oligonucleotide
  Sense strand starting at position 1744 of SEQ ID NO: 318721
acauacauuccgggaaguu

SEQ ID NO: 584352 - RNA, 19 nt, Artificial Sequence
  Description of Artificial Sequence: Synthetic oligonucleotide
  Antisense strand to SEQ ID NO: 584351
aacuucccggaauguaugu

SEQ ID NO: 584353 - RNA, 19 nt, Artificial Sequence
  Description of Artificial Sequence: Synthetic oligonucleotide
  Sense strand starting at position 1745 of SEQ ID NO: 318721
cauacauuccgggaaguuu

SEQ ID NO: 584354 - RNA, 19 nt, Artificial Sequence
  Description of Artificial Sequence: Synthetic oligonucleotide
  Antisense strand to SEQ ID NO: 584353
aaacuucccggaauguaug

SEQ ID NO: 584355 - RNA, 19 nt, Artificial Sequence
  Description of Artificial Sequence: Synthetic oligonucleotide
  Sense strand starting at position 2032 of SEQ ID NO: 318721
gccgaauucccacaagucu

SEQ ID NO: 584356 - RNA, 19 nt, Artificial Sequence
  Description of Artificial Sequence: Synthetic oligonucleotide
  Antisense strand to SEQ ID NO: 584355
agacuugugggaauucggc

SEQ ID NO: 584357 - RNA, 19 nt, Artificial Sequence
  Description of Artificial Sequence: Synthetic oligonucleotide
  Sense strand starting at position 2234 of SEQ ID NO: 318721
cguuccguucgcuuuagaa

SEQ ID NO: 584358 - RNA, 19 nt, Artificial Sequence
  Description of Artificial Sequence: Synthetic oligonucleotide
  Antisense strand to SEQ ID NO: 584357
uucuaaagcgaacggaacg

SEQ ID NO: 584359 - RNA, 19 nt, Artificial Sequence
  Description of Artificial Sequence: Synthetic oligonucleotide
  Sense strand starting at position 2633 of SEQ ID NO: 318721
gaauguucgggacgcagaa

SEQ ID NO: 584360 - RNA, 19 nt, Artificial Sequence
  Description of Artificial Sequence: Synthetic oligonucleotide
  Antisense strand to SEQ ID NO: 584359
uucugcgucccgaacauuc

SEQ ID NO: 584361 - RNA, 19 nt, Artificial Sequence
  Description of Artificial Sequence: Synthetic oligonucleotide
  Sense strand starting at position 2650 of SEQ ID NO: 318721
aacacuucgugcuugggaa

SEQ ID NO: 584362 - RNA, 19 nt, Artificial Sequence
  Description of Artificial Sequence: Synthetic oligonucleotide
  Antisense strand to SEQ ID NO: 584361
uucccaagcacgaaguguu

SEQ ID NO: 584363 - RNA, 19 nt, Artificial Sequence
  Description of Artificial Sequence: Synthetic oligonucleotide
  Sense strand starting at position 2746 of SEQ ID NO: 318721
uuaagaaggugguauuuau

SEQ ID NO: 584364 - RNA, 19 nt, Artificial Sequence
  Description of Artificial Sequence: Synthetic oligonucleotide
  Antisense strand to SEQ ID NO: 584363
auaaauaccaccuucuuaa

SEQ ID NO: 584365 - RNA, 19 nt, Artificial Sequence
  Description of Artificial Sequence: Synthetic oligonucleotide
  Sense strand starting at position 2826 of SEQ ID NO: 318721
uggagauacuuaguugcuu

SEQ ID NO: 584366 - RNA, 19 nt, Artificial Sequence
  Description of Artificial Sequence: Synthetic oligonucleotide
  Antisense strand to SEQ ID NO: 584365
aagcaacuaaguaucucca

SEQ ID NO: 584367 - RNA, 19 nt, Artificial Sequence
  Description of Artificial Sequence: Synthetic oligonucleotide
  Sense strand starting at position 2827 of SEQ ID NO: 318721
ggagauacuuaguugcuuu

SEQ ID NO: 584368 - RNA, 19 nt, Artificial Sequence
  Description of Artificial Sequence: Synthetic oligonucleotide
  Antisense strand to SEQ ID NO: 584367
aaagcaacuaaguaucucc

SEQ ID NO: 584369 - RNA, 19 nt, Artificial Sequence
  Description of Artificial Sequence: Synthetic oligonucleotide
  Sense strand starting at position 2919 of SEQ ID NO: 318721
ucaagaaugugaccuguuu

SEQ ID NO: 584370 - RNA, 19 nt, Artificial Sequence
  Description of Artificial Sequence: Synthetic oligonucleotide
  Antisense strand to SEQ ID NO: 584369
aaacaggucacauucuuga

SEQ ID NO: 584371 - RNA, 19 nt, Artificial Sequence
  Description of Artificial Sequence: Synthetic oligonucleotide
  Sense strand starting at position 2932 of SEQ ID NO: 318721
cuguuugucacauacggaa

SEQ ID NO: 584372 - RNA, 19 nt, Artificial Sequence
  Description of Artificial Sequence: Synthetic oligonucleotide
  Antisense strand to SEQ ID NO: 584371
uuccguaugugacaaacag

SEQ ID NO: 584373 - RNA, 19 nt, Artificial Sequence
  Description of Artificial Sequence: Synthetic oligonucleotide
  Sense strand starting at position 2934 of SEQ ID NO: 318721
guuugucacauacggaauu

SEQ ID NO: 584374 - RNA, 19 nt, Artificial Sequence
  Description of Artificial Sequence: Synthetic oligonucleotide
  Antisense strand to SEQ ID NO: 584373
aauuccguaugugacaaac

SEQ ID NO: 584375 - RNA, 19 nt, Artificial Sequence
  Description of Artificial Sequence: Synthetic oligonucleotide
  Sense strand starting at position 2969 of SEQ ID NO: 318721
gaagcagugucagugacua

SEQ ID NO: 584376 - RNA, 19 nt, Artificial Sequence
  Description of Artificial Sequence: Synthetic oligonucleotide
  Antisense strand to SEQ ID NO: 584375
uagucacugacacugcuuc

SEQ ID NO: 584377 - RNA, 19 nt, Artificial Sequence
  Description of Artificial Sequence: Synthetic oligonucleotide
  Sense strand starting at position 2971 of SEQ ID NO: 318721
agcagugucagugacuaca

SEQ ID NO: 584378 - RNA, 19 nt, Artificial Sequence
  Description of Artificial Sequence: Synthetic oligonucleotide
  Antisense strand to SEQ ID NO: 584377
uguagucacugacacugcu

SEQ ID NO: 584379 - RNA, 19 nt, Artificial Sequence
  Description of Artificial Sequence: Synthetic oligonucleotide
  Sense strand starting at position 3029 of SEQ ID NO: 318721
gacacuuuggagcacuuau

SEQ ID NO: 584380 - RNA, 19 nt, Artificial Sequence
  Description of Artificial Sequence: Synthetic oligonucleotide
  Antisense strand to SEQ ID NO: 584379
auaagugcuccaaaguguc

SEQ ID NO: 584381 - RNA, 19 nt, Artificial Sequence
  Description of Artificial Sequence: Synthetic oligonucleotide
  Sense strand starting at position 3036 of SEQ ID NO: 318721
uggagcacuuaugugucaa

SEQ ID NO: 584382 - RNA, 19 nt, Artificial Sequence
  Description of Artificial Sequence: Synthetic oligonucleotide
  Antisense strand to SEQ ID NO: 584381
uugacacauaagugcucca

SEQ ID NO: 584383 - RNA, 19 nt, Artificial Sequence
  Description of Artificial Sequence: Synthetic oligonucleotide
  Sense strand starting at position 3037 of SEQ ID NO: 318721
ggagcacuuaugugucaag

SEQ ID NO: 584384 - RNA, 19 nt, Artificial Sequence
  Description of Artificial Sequence: Synthetic oligonucleotide
  Antisense strand to SEQ ID NO: 584383
cuugacacauaagugcucc

SEQ ID NO: 584385 - RNA, 19 nt, Artificial Sequence
  Description of Artificial Sequence: Synthetic oligonucleotide
  Sense strand starting at position 3131 of SEQ ID NO: 318721
ggaggauguugugugagua

SEQ ID NO: 584386 - RNA, 19 nt, Artificial Sequence
  Description of Artificial Sequence: Synthetic oligonucleotide
  Antisense strand to SEQ ID NO: 584385
uacucacacaacauccucc

SEQ ID NO: 584387 - RNA, 19 nt, Artificial Sequence
  Description of Artificial Sequence: Synthetic oligonucleotide
  Sense strand starting at position 3238 of SEQ ID NO: 318721
uggagaaauagcugugaaa

SEQ ID NO: 584388 - RNA, 19 nt, Artificial Sequence
  Description of Artificial Sequence: Synthetic oligonucleotide
  Antisense strand to SEQ ID NO: 584387
uuucacagcuauuucucca

SEQ ID NO: 584389 - RNA, 19 nt, Artificial Sequence
  Description of Artificial Sequence: Synthetic oligonucleotide
  Sense strand starting at position 3391 of SEQ ID NO: 318721
ggaaguucucuuugaggag

SEQ ID NO: 584390 - RNA, 19 nt, Artificial Sequence
  Description of Artificial Sequence: Synthetic oligonucleotide
  Antisense strand to SEQ ID NO: 584389
cuccucaaagagaacuucc

SEQ ID NO: 584391 - RNA, 19 nt, Artificial Sequence
  Description of Artificial Sequence: Synthetic oligonucleotide
  Sense strand starting at position 3395 of SEQ ID NO: 318721
guucucuuugaggagguaa

SEQ ID NO: 584392 - RNA, 19 nt, Artificial Sequence
  Description of Artificial Sequence: Synthetic oligonucleotide
  Antisense strand to SEQ ID NO: 584391
uuaccuccucaaagagaac

SEQ ID NO: 584393 - RNA, 19 nt, Artificial Sequence
  Description of Artificial Sequence: Synthetic oligonucleotide
  Sense strand starting at position 3397 of SEQ ID NO: 318721
ucucuuugaggagguaaca

SEQ ID NO: 584394 - RNA, 19 nt, Artificial Sequence
  Description of Artificial Sequence: Synthetic oligonucleotide
  Antisense strand to SEQ ID NO: 584393
uguuaccuccucaaagaga

SEQ ID NO: 584395 - RNA, 19 nt, Artificial Sequence
  Description of Artificial Sequence: Synthetic oligonucleotide
  Sense strand starting at position 3444 of SEQ ID NO: 318721
gaagaaacgaugugacugu

SEQ ID NO: 584396 - RNA, 19 nt, Artificial Sequence
  Description of Artificial Sequence: Synthetic oligonucleotide
  Antisense strand to SEQ ID NO: 584395
acagucacaucguuucuuc

SEQ ID NO: 584397 - RNA, 19 nt, Artificial Sequence
  Description of Artificial Sequence: Synthetic oligonucleotide
  Sense strand starting at position 3455 of SEQ ID NO: 318721
gugacuguauggguaaagu

SEQ ID NO: 584398 - RNA, 19 nt, Artificial Sequence
  Description of Artificial Sequence: Synthetic oligonucleotide
  Antisense strand to SEQ ID NO: 584397
acuuuacccauacagucac

SEQ ID NO: 584399 - RNA, 19 nt, Artificial Sequence
  Description of Artificial Sequence: Synthetic oligonucleotide
  Sense strand starting at position 3464 of SEQ ID NO: 318721
uggguaaagugccuucuaa

SEQ ID NO: 584400 - RNA, 19 nt, Artificial Sequence
  Description of Artificial Sequence: Synthetic oligonucleotide
  Antisense strand to SEQ ID NO: 584399
uuagaaggcacuuuaccca

SEQ ID NO: 584401 - RNA, 19 nt, Artificial Sequence
  Description of Artificial Sequence: Synthetic oligonucleotide
  Sense strand starting at position 3504 of SEQ ID NO: 318721
accagagagaagugugcuu

SEQ ID NO: 584402 - RNA, 19 nt, Artificial Sequence
  Description of Artificial Sequence: Synthetic oligonucleotide
  Antisense strand to SEQ ID NO: 584401
aagcacacuucucucuggu

SEQ ID NO: 584403 - RNA, 19 nt, Artificial Sequence
  Description of Artificial Sequence: Synthetic oligonucleotide
  Sense strand starting at position 3509 of SEQ ID NO: 318721
agagaagugugcuugguga

SEQ ID NO: 584404 - RNA, 19 nt, Artificial Sequence
  Description of Artificial Sequence: Synthetic oligonucleotide
  Antisense strand to SEQ ID NO: 584403
ucaccaagcacacuucucu

SEQ ID NO: 584405 - RNA, 19 nt, Artificial Sequence
  Description of Artificial Sequence: Synthetic oligonucleotide
  Sense strand starting at position 3538 of SEQ ID NO: 318721
uggcaaggucaguaugacu

SEQ ID NO: 584406 - RNA, 19 nt, Artificial Sequence
  Description of Artificial Sequence: Synthetic oligonucleotide
  Antisense strand to SEQ ID NO: 584405
agucauacugaccuugcca

SEQ ID NO: 584407 - RNA, 19 nt, Artificial Sequence
  Description of Artificial Sequence: Synthetic oligonucleotide
  Sense strand starting at position 3830 of SEQ ID NO: 318721
aggcauuugcuuugagagc

SEQ ID NO: 584408 - RNA, 19 nt, Artificial Sequence
  Description of Artificial Sequence: Synthetic oligonucleotide
  Antisense strand to SEQ ID NO: 584407
gcucucaaagcaaaugccu

SEQ ID NO: 584409 - RNA, 19 nt, Artificial Sequence
  Description of Artificial Sequence: Synthetic oligonucleotide
  Sense strand starting at position 3878 of SEQ ID NO: 318721
gggugcuaugcucaggagu

SEQ ID NO: 584410 - RNA, 19 nt, Artificial Sequence
  Description of Artificial Sequence: Synthetic oligonucleotide
  Antisense strand to SEQ ID NO: 584409
acuccugagcauagcaccc

SEQ ID NO: 584411 - RNA, 19 nt, Artificial Sequence
  Description of Artificial Sequence: Synthetic oligonucleotide
  Sense strand starting at position 3886 of SEQ ID NO: 318721
ugcucaggaguuuggauau

SEQ ID NO: 584412 - RNA, 19 nt, Artificial Sequence
  Description of Artificial Sequence: Synthetic oligonucleotide
  Antisense strand to SEQ ID NO: 584411
auauccaaacuccugagca

SEQ ID NO: 584413 - RNA, 19 nt, Artificial Sequence
  Description of Artificial Sequence: Synthetic oligonucleotide
  Sense strand starting at position 3933 of SEQ ID NO: 318721
auauguauugagcacuaac

SEQ ID NO: 584414 - RNA, 19 nt, Artificial Sequence
  Description of Artificial Sequence: Synthetic oligonucleotide
  Antisense strand to SEQ ID NO: 584413
guuagugcucaauacauau

SEQ ID NO: 584415 - RNA, 19 nt, Artificial Sequence
  Description of Artificial Sequence: Synthetic oligonucleotide
  Sense strand starting at position 289 of SEQ ID NO: 318722
ccauaauggcuguauuaaa

SEQ ID NO: 584416 - RNA, 19 nt, Artificial Sequence
  Description of Artificial Sequence: Synthetic oligonucleotide
  Antisense strand to SEQ ID NO: 584415
uuuaauacagccauuaugg

SEQ ID NO: 584417 - RNA, 19 nt, Artificial Sequence
  Description of Artificial Sequence: Synthetic oligonucleotide
  Sense strand starting at position 395 of SEQ ID NO: 318722
cucacaaauguaugguaau

SEQ ID NO: 584418 - RNA, 19 nt, Artificial Sequence
  Description of Artificial Sequence: Synthetic oligonucleotide
  Antisense strand to SEQ ID NO: 584417
auuaccauacauuugugag

SEQ ID NO: 584419 - RNA, 19 nt, Artificial Sequence
  Description of Artificial Sequence: Synthetic oligonucleotide
  Sense strand starting at position 408 of SEQ ID NO: 318722
gguaauaucuccuugugau

SEQ ID NO: 584420 - RNA, 19 nt, Artificial Sequence
  Description of Artificial Sequence: Synthetic oligonucleotide
  Antisense strand to SEQ ID NO: 584419
aucacaaggagauauuacc

SEQ ID NO: 584421 - RNA, 19 nt, Artificial Sequence
  Description of Artificial Sequence: Synthetic oligonucleotide
  Sense strand starting at position 479 of SEQ ID NO: 318722
accuguugagugcaauaau

SEQ ID NO: 584422 - RNA, 19 nt, Artificial Sequence
  Description of Artificial Sequence: Synthetic oligonucleotide
  Antisense strand to SEQ ID NO: 584421
auuauugcacucaacaggu

SEQ ID NO: 584423 - RNA, 19 nt, Artificial Sequence
  Description of Artificial Sequence: Synthetic oligonucleotide
  Sense strand starting at position 482 of SEQ ID NO: 318722
uguugagugcaauaauggu

SEQ ID NO: 584424 - RNA, 19 nt, Artificial Sequence
  Description of Artificial Sequence: Synthetic oligonucleotide
  Antisense strand to SEQ ID NO: 584423
accauuauugcacucaaca

SEQ ID NO: 584425 - RNA, 19 nt, Artificial Sequence
  Description of Artificial Sequence: Synthetic oligonucleotide
  Sense strand starting at position 556 of SEQ ID NO: 318722
gcuauaagaugaguaaaug

SEQ ID NO: 584426 - RNA, 19 nt, Artificial Sequence
  Description of Artificial Sequence: Synthetic oligonucleotide
  Antisense strand to SEQ ID NO: 584425
cauuuacucaucuuauagc

SEQ ID NO: 584427 - RNA, 19 nt, Artificial Sequence
  Description of Artificial Sequence: Synthetic oligonucleotide
  Sense strand starting at position 590 of SEQ ID NO: 318722
acagcauugugauuauaau

SEQ ID NO: 584428 - RNA, 19 nt, Artificial Sequence
  Description of Artificial Sequence: Synthetic oligonucleotide
  Antisense strand to SEQ ID NO: 584427
auuauaaucacaaugcugu

SEQ ID NO: 584429 - RNA, 19 nt, Artificial Sequence
  Description of Artificial Sequence: Synthetic oligonucleotide
  Sense strand starting at position 684 of SEQ ID NO: 318722
aaagguaacuaugugauau

SEQ ID NO: 584430 - RNA, 19 nt, Artificial Sequence
  Description of Artificial Sequence: Synthetic oligonucleotide
  Antisense strand to SEQ ID NO: 584429
auaucacauaguuaccuuu

SEQ ID NO: 584431 - RNA, 19 nt, Artificial Sequence
  Description of Artificial Sequence: Synthetic oligonucleotide
  Sense strand starting at position 740 of SEQ ID NO: 318722
ucacaaugucuacauaugu

SEQ ID NO: 584432 - RNA, 19 nt, Artificial Sequence
  Description of Artificial Sequence: Synthetic oligonucleotide
  Antisense strand to SEQ ID NO: 584431
acauauguagacauuguga

SEQ ID NO: 584433 - RNA, 19 nt, Artificial Sequence
  Description of Artificial Sequence: Synthetic oligonucleotide
  Sense strand starting at position 872 of SEQ ID NO: 318722
guggaagaaucuuuauagc

SEQ ID NO: 584434 - RNA, 19 nt, Artificial Sequence
  Description of Artificial Sequence: Synthetic oligonucleotide
  Antisense strand to SEQ ID NO: 584433
gcuauaaagauucuuccac

SEQ ID NO: 584435 - RNA, 19 nt, Artificial Sequence
  Description of Artificial Sequence: Synthetic oligonucleotide
  Sense strand starting at position 890 of SEQ ID NO: 318722
cugcuuuagcuauaagagg

SEQ ID NO: 584436 - RNA, 19 nt, Artificial Sequence
  Description of Artificial Sequence: Synthetic oligonucleotide
  Antisense strand to SEQ ID NO: 584435
ccucuuauagcuaaagcag

SEQ ID NO: 584437 - RNA, 19 nt, Artificial Sequence
  Description of Artificial Sequence: Synthetic oligonucleotide
  Sense strand starting at position 1121 of SEQ ID NO: 318722
gccaacuauucuuugagga

SEQ ID NO: 584438 - RNA, 19 nt, Artificial Sequence
  Description of Artificial Sequence: Synthetic oligonucleotide
  Antisense strand to SEQ ID NO: 584437
uccucaaagaauaguuggc

SEQ ID NO: 584439 - RNA, 19 nt, Artificial Sequence
  Description of Artificial Sequence: Synthetic oligonucleotide
  Sense strand starting at position 1122 of SEQ ID NO: 318722
ccaacuauucuuugaggac

SEQ ID NO: 584440 - RNA, 19 nt, Artificial Sequence
  Description of Artificial Sequence: Synthetic oligonucleotide
  Antisense strand to SEQ ID NO: 584439
guccucaaagaauaguugg

SEQ ID NO: 584441 - RNA, 19 nt, Artificial Sequence
  Description of Artificial Sequence: Synthetic oligonucleotide
  Sense strand starting at position 1240 of SEQ ID NO: 318722
ugaccaugacaugguugua

SEQ ID NO: 584442 - RNA, 19 nt, Artificial Sequence
  Description of Artificial Sequence: Synthetic oligonucleotide
  Antisense strand to SEQ ID NO: 584441
uacaaccaugucaugguca

SEQ ID NO: 584443 - RNA, 19 nt, Artificial Sequence
  Description of Artificial Sequence: Synthetic oligonucleotide
  Sense strand starting at position 1243 of SEQ ID NO: 318722
ccaugacaugguuguauau

SEQ ID NO: 584444 - RNA, 19 nt, Artificial Sequence
  Description of Artificial Sequence: Synthetic oligonucleotide
  Antisense strand to SEQ ID NO: 584443
auauacaaccaugucaugg

SEQ ID NO: 584445 - RNA, 19 nt, Artificial Sequence
  Description of Artificial Sequence: Synthetic oligonucleotide
  Sense strand starting at position 1302 of SEQ ID NO: 318722
acucaagauugguuacaau

SEQ ID NO: 584446 - RNA, 19 nt, Artificial Sequence
  Description of Artificial Sequence: Synthetic oligonucleotide
  Antisense strand to SEQ ID NO: 584445
auuguaaccaaucuugagu

SEQ ID NO: 584447 - RNA, 19 nt, Artificial Sequence
  Description of Artificial Sequence: Synthetic oligonucleotide
  Sense strand starting at position 1408 of SEQ ID NO: 318722
uggauaaucuggcuaauaa

SEQ ID NO: 584448 - RNA, 19 nt, Artificial Sequence
  Description of Artificial Sequence: Synthetic oligonucleotide
  Antisense strand to SEQ ID NO: 584447
uuauuagccagauuaucca

SEQ ID NO: 584449 - RNA, 19 nt, Artificial Sequence
  Description of Artificial Sequence: Synthetic oligonucleotide
  Sense strand starting at position 1746 of SEQ ID NO: 318722
aguuguuauuaguugaaag

SEQ ID NO: 584450 - RNA, 19 nt, Artificial Sequence
  Description of Artificial Sequence: Synthetic oligonucleotide
  Antisense strand to SEQ ID NO: 584449
cuuucaacuaauaacaacu

SEQ ID NO: 584451 - RNA, 19 nt, Artificial Sequence
  Description of Artificial Sequence: Synthetic oligonucleotide
  Sense strand starting at position 1747 of SEQ ID NO: 318722
guuguuauuaguugaaagg

SEQ ID NO: 584452 - RNA, 19 nt, Artificial Sequence
  Description of Artificial Sequence: Synthetic oligonucleotide
  Antisense strand to SEQ ID NO: 584451
ccuuucaacuaauaacaac

SEQ ID NO: 584453 - RNA, 19 nt, Artificial Sequence
  Description of Artificial Sequence: Synthetic oligonucleotide
  Sense strand starting at position 1748 of SEQ ID NO: 318722
uuguuauuaguugaaaggu

SEQ ID NO: 584454 - RNA, 19 nt, Artificial Sequence
  Description of Artificial Sequence: Synthetic oligonucleotide
  Antisense strand to SEQ ID NO: 584453
accuuucaacuaauaacaa

SEQ ID NO: 584455 - RNA, 19 nt, Artificial Sequence
  Description of Artificial Sequence: Synthetic oligonucleotide
  Sense strand starting at position 1818 of SEQ ID NO: 318722
uugugacauuuguucuuua

SEQ ID NO: 584456 - RNA, 19 nt, Artificial Sequence
  Description of Artificial Sequence: Synthetic oligonucleotide
  Antisense strand to SEQ ID NO: 584455
uaaagaacaaaugucacaa

SEQ ID NO: 584457 - RNA, 19 nt, Artificial Sequence
  Description of Artificial Sequence: Synthetic oligonucleotide
  Sense strand starting at position 2043 of SEQ ID NO: 318722
gggacugaguucucuagua

SEQ ID NO: 584458 - RNA, 19 nt, Artificial Sequence
  Description of Artificial Sequence: Synthetic oligonucleotide
  Antisense strand to SEQ ID NO: 584457
uacuagagaacucaguccc

SEQ ID NO: 584459 - RNA, 19 nt, Artificial Sequence
  Description of Artificial Sequence: Synthetic oligonucleotide
  Sense strand starting at position 2045 of SEQ ID NO: 318722
gacugaguucucuaguaac

SEQ ID NO: 584460 - RNA, 19 nt, Artificial Sequence
  Description of Artificial Sequence: Synthetic oligonucleotide
  Antisense strand to SEQ ID NO: 584459
guuacuagagaacucaguc

SEQ ID NO: 584461 - RNA, 19 nt, Artificial Sequence
  Description of Artificial Sequence: Synthetic oligonucleotide
  Sense strand starting at position 2076 of SEQ ID NO: 318722
gagcaaaguagguauggau

SEQ ID NO: 584462 - RNA, 19 nt, Artificial Sequence
  Description of Artificial Sequence: Synthetic oligonucleotide
  Antisense strand to SEQ ID NO: 584461
auccauaccuacuuugcuc

SEQ ID NO: 584463 - RNA, 19 nt, Artificial Sequence
  Description of Artificial Sequence: Synthetic oligonucleotide
  Sense strand starting at position 2122 of SEQ ID NO: 318722
gaacuuuaccgauggacug

SEQ ID NO: 584464 - RNA, 19 nt, Artificial Sequence
  Description of Artificial Sequence: Synthetic oligonucleotide
  Antisense strand to SEQ ID NO: 584463
caguccaucgguaaaguuc

SEQ ID NO: 584465 - RNA, 19 nt, Artificial Sequence
  Description of Artificial Sequence: Synthetic oligonucleotide
  Sense strand starting at position 2275 of SEQ ID NO: 318722
uacuguaacgguuaauauu

SEQ ID NO: 584466 - RNA, 19 nt, Artificial Sequence
  Description of Artificial Sequence: Synthetic oligonucleotide
  Antisense strand to SEQ ID NO: 584465
aauauuaaccguuacagua

SEQ ID NO: 584467 - RNA, 19 nt, Artificial Sequence
  Description of Artificial Sequence: Synthetic oligonucleotide
  Sense strand starting at position 2704 of SEQ ID NO: 318722
ggaacuuuacccugugauc

SEQ ID NO: 584468 - RNA, 19 nt, Artificial Sequence
  Description of Artificial Sequence: Synthetic oligonucleotide
  Antisense strand to SEQ ID NO: 584467
gaucacaggguaaaguucc

SEQ ID NO: 584469 - RNA, 19 nt, Artificial Sequence
  Description of Artificial Sequence: Synthetic oligonucleotide
  Sense strand starting at position 3182 of SEQ ID NO: 318722
gaagauggauagucuccau

SEQ ID NO: 584470 - RNA, 19 nt, Artificial Sequence
  Description of Artificial Sequence: Synthetic oligonucleotide
  Antisense strand to SEQ ID NO: 584469
auggagacuauccaucuuc

SEQ ID NO: 584471 - RNA, 19 nt, Artificial Sequence
  Description of Artificial Sequence: Synthetic oligonucleotide
  Sense strand starting at position 3256 of SEQ ID NO: 318722
agaagcuaugcuuaaucua

SEQ ID NO: 584472 - RNA, 19 nt, Artificial Sequence
  Description of Artificial Sequence: Synthetic oligonucleotide
  Antisense strand to SEQ ID NO: 584471
uagauuaagcauagcuucu

SEQ ID NO: 584473 - RNA, 19 nt, Artificial Sequence
  Description of Artificial Sequence: Synthetic oligonucleotide
  Sense strand starting at position 3450 of SEQ ID NO: 318722
acaguuuauugaccuggga

SEQ ID NO: 584474 - RNA, 19 nt, Artificial Sequence
  Description of Artificial Sequence: Synthetic oligonucleotide
  Antisense strand to SEQ ID NO: 584473
ucccaggucaauaaacugu

SEQ ID NO: 584475 - RNA, 19 nt, Artificial Sequence
  Description of Artificial Sequence: Synthetic oligonucleotide
  Sense strand starting at position 3614 of SEQ ID NO: 318722
cuaccuaugaguggugaga

SEQ ID NO: 584476 - RNA, 19 nt, Artificial Sequence
  Description of Artificial Sequence: Synthetic oligonucleotide
  Antisense strand to SEQ ID NO: 584475
ucucaccacucauagguag

SEQ ID NO: 584477 - RNA, 19 nt, Artificial Sequence
  Description of Artificial Sequence: Synthetic oligonucleotide
  Sense strand starting at position 3651 of SEQ ID NO: 318722
gaauguuccuuacugguua

SEQ ID NO: 584478 - RNA, 19 nt, Artificial Sequence
  Description of Artificial Sequence: Synthetic oligonucleotide
  Antisense strand to SEQ ID NO: 584477
uaaccaguaaggaacauuc

SEQ ID NO: 584479 - RNA, 19 nt, Artificial Sequence
  Description of Artificial Sequence: Synthetic oligonucleotide
  Sense strand starting at position 3748 of SEQ ID NO: 318722
uugggauauggagguaauu

SEQ ID NO: 584480 - RNA, 19 nt, Artificial Sequence
  Description of Artificial Sequence: Synthetic oligonucleotide
  Antisense strand to SEQ ID NO: 584479
aauuaccuccauaucccaa

SEQ ID NO: 584481 - RNA, 19 nt, Artificial Sequence
  Description of Artificial Sequence: Synthetic oligonucleotide
  Sense strand starting at position 3773 of SEQ ID NO: 318722
acucuuaauucugcugaag

SEQ ID NO: 584482 - RNA, 19 nt, Artificial Sequence
  Description of Artificial Sequence: Synthetic oligonucleotide
  Antisense strand to SEQ ID NO: 584481
cuucagcagaauuaagagu

SEQ ID NO: 584483 - RNA, 19 nt, Artificial Sequence
  Description of Artificial Sequence: Synthetic oligonucleotide
  Sense strand starting at position 3776 of SEQ ID NO: 318722
cuuaauucugcugaaguga

SEQ ID NO: 584484 - RNA, 19 nt, Artificial Sequence
  Description of Artificial Sequence: Synthetic oligonucleotide
  Antisense strand to SEQ ID NO: 584483
ucacuucagcagaauuaag

SEQ ID NO: 584485 - RNA, 19 nt, Artificial Sequence
  Description of Artificial Sequence: Synthetic oligonucleotide
  Sense strand starting at position 3802 of SEQ ID NO: 318722
ggccacacagucuagagau

SEQ ID NO: 584486 - RNA, 19 nt, Artificial Sequence
  Description of Artificial Sequence: Synthetic oligonucleotide
  Antisense strand to SEQ ID NO: 584485
aucucuagacuguguggcc

SEQ ID NO: 584487 - RNA, 19 nt, Artificial Sequence
  Description of Artificial Sequence: Synthetic oligonucleotide
  Sense strand starting at position 3854 of SEQ ID NO: 318722
gcaauaacgcucuaacuau

SEQ ID NO: 584488 - RNA, 19 nt, Artificial Sequence
  Description of Artificial Sequence: Synthetic oligonucleotide
  Antisense strand to SEQ ID NO: 584487
auaguuagagcguuauugc

SEQ ID NO: 584489 - RNA, 19 nt, Artificial Sequence
  Description of Artificial Sequence: Synthetic oligonucleotide
  Sense strand starting at position 3977 of SEQ ID NO: 318722
gauauaauaucagugagua

SEQ ID NO: 584490 - RNA, 19 nt, Artificial Sequence
  Description of Artificial Sequence: Synthetic oligonucleotide
  Antisense strand to SEQ ID NO: 584489
uacucacugauauuauauc

SEQ ID NO: 584491 - RNA, 19 nt, Artificial Sequence
  Description of Artificial Sequence: Synthetic oligonucleotide
  Sense strand starting at position 3981 of SEQ ID NO: 318722
uaauaucagugaguaaaug

SEQ ID NO: 584492 - RNA, 19 nt, Artificial Sequence
  Description of Artificial Sequence: Synthetic oligonucleotide
  Antisense strand to SEQ ID NO: 584491
cauuuacucacugauauua

SEQ ID NO: 584493 - RNA, 19 nt, Artificial Sequence
  Description of Artificial Sequence: Synthetic oligonucleotide
  Sense strand starting at position 3982 of SEQ ID NO: 318722
aauaucagugaguaaaugu

SEQ ID NO: 584494 - RNA, 19 nt, Artificial Sequence
  Description of Artificial Sequence: Synthetic oligonucleotide
  Antisense strand to SEQ ID NO: 584493
acauuuacucacugauauu

SEQ ID NO: 584495 - RNA, 19 nt, Artificial Sequence
  Description of Artificial Sequence: Synthetic oligonucleotide
  Sense strand starting at position 19 of SEQ ID NO: 318723
caaggcagugucuaacuau

SEQ ID NO: 584496 - RNA, 19 nt, Artificial Sequence
  Description of Artificial Sequence: Synthetic oligonucleotide
  Antisense strand to SEQ ID NO: 584495
auaguuagacacugccuug

SEQ ID NO: 584497 - RNA, 19 nt, Artificial Sequence
  Description of Artificial Sequence: Synthetic oligonucleotide
  Sense strand starting at position 25 of SEQ ID NO: 318723
agugucuaacuauagacuu

SEQ ID NO: 584498 - RNA, 19 nt, Artificial Sequence
  Description of Artificial Sequence: Synthetic oligonucleotide
  Antisense strand to SEQ ID NO: 584497
aagucuauaguuagacacu

SEQ ID NO: 584499 - RNA, 19 nt, Artificial Sequence
  Description of Artificial Sequence: Synthetic oligonucleotide
  Sense strand starting at position 56 of SEQ ID NO: 318723
ggagaaggguccaaauggu

SEQ ID NO: 584500 - RNA, 19 nt, Artificial Sequence
  Description of Artificial Sequence: Synthetic oligonucleotide
  Antisense strand to SEQ ID NO: 584499
accauuuggacccuucucc

SEQ ID NO: 584501 - RNA, 19 nt, Artificial Sequence
  Description of Artificial Sequence: Synthetic oligonucleotide
  Sense strand starting at position 62 of SEQ ID NO: 318723
ggguccaaauggucuaaau

SEQ ID NO: 584502 - RNA, 19 nt, Artificial Sequence
  Description of Artificial Sequence: Synthetic oligonucleotide
  Antisense strand to SEQ ID NO: 584501
auuuagaccauuuggaccc

SEQ ID NO: 584503 - RNA, 19 nt, Artificial Sequence
  Description of Artificial Sequence: Synthetic oligonucleotide
  Sense strand starting at position 64 of SEQ ID NO: 318723
guccaaauggucuaaauca

SEQ ID NO: 584504 - RNA, 19 nt, Artificial Sequence
  Description of Artificial Sequence: Synthetic oligonucleotide
  Antisense strand to SEQ ID NO: 584503
ugauuuagaccauuuggac

SEQ ID NO: 584505 - RNA, 19 nt, Artificial Sequence
  Description of Artificial Sequence: Synthetic oligonucleotide
  Sense strand starting at position 95 of SEQ ID NO: 318723
guuuaaaugcagcacauaa

SEQ ID NO: 584506 - RNA, 19 nt, Artificial Sequence
  Description of Artificial Sequence: Synthetic oligonucleotide
  Antisense strand to SEQ ID NO: 584505
uuaugugcugcauuuaaac

SEQ ID NO: 584507 - RNA, 19 nt, Artificial Sequence
  Description of Artificial Sequence: Synthetic oligonucleotide
  Sense strand starting at position 173 of SEQ ID NO: 318723
cgaguaucaguccagcaag

SEQ ID NO: 584508 - RNA, 19 nt, Artificial Sequence
  Description of Artificial Sequence: Synthetic oligonucleotide
  Antisense strand to SEQ ID NO: 584507
cuugcuggacugauacucg

SEQ ID NO: 584509 - RNA, 19 nt, Artificial Sequence
  Description of Artificial Sequence: Synthetic oligonucleotide
  Sense strand starting at position 451 of SEQ ID NO: 318723
agggaugaggucuguagaa

SEQ ID NO: 584510 - RNA, 19 nt, Artificial Sequence
  Description of Artificial Sequence: Synthetic oligonucleotide
  Antisense strand to SEQ ID NO: 584509
uucuacagaccucaucccu

SEQ ID NO: 584511 - RNA, 19 nt, Artificial Sequence
  Description of Artificial Sequence: Synthetic oligonucleotide
  Sense strand starting at position 458 of SEQ ID NO: 318723
aggucuguagaauguaaau

SEQ ID NO: 584512 - RNA, 19 nt, Artificial Sequence
  Description of Artificial Sequence: Synthetic oligonucleotide
  Antisense strand to SEQ ID NO: 584511
auuuacauucuacagaccu

SEQ ID NO: 584513 - RNA, 19 nt, Artificial Sequence
  Description of Artificial Sequence: Synthetic oligonucleotide
  Sense strand starting at position 475 of SEQ ID NO: 318723
auucgaauccucgacauuc

SEQ ID NO: 584514 - RNA, 19 nt, Artificial Sequence
  Description of Artificial Sequence: Synthetic oligonucleotide
  Antisense strand to SEQ ID NO: 584513
gaaugucgaggauucgaau

SEQ ID NO: 584515 - RNA, 19 nt, Artificial Sequence
  Description of Artificial Sequence: Synthetic oligonucleotide
  Sense strand starting at position 486 of SEQ ID NO: 318723
cgacauuccucuccaggga

SEQ ID NO: 584516 - RNA, 19 nt, Artificial Sequence
  Description of Artificial Sequence: Synthetic oligonucleotide
  Antisense strand to SEQ ID NO: 584515
ucccuggagaggaaugucg

SEQ ID NO: 584517 - RNA, 19 nt, Artificial Sequence
  Description of Artificial Sequence: Synthetic oligonucleotide
  Sense strand starting at position 538 of SEQ ID NO: 318723
cccgcaauacuaggaugaa

SEQ ID NO: 584518 - RNA, 19 nt, Artificial Sequence
  Description of Artificial Sequence: Synthetic oligonucleotide
  Antisense strand to SEQ ID NO: 584517
uucauccuaguauugcggg

SEQ ID NO: 584519 - RNA, 19 nt, Artificial Sequence
  Description of Artificial Sequence: Synthetic oligonucleotide
  Sense strand starting at position 1565 of SEQ ID NO: 318723
uugauuugcuggucucuuu

SEQ ID NO: 584520 - RNA, 19 nt, Artificial Sequence
  Description of Artificial Sequence: Synthetic oligonucleotide
  Antisense strand to SEQ ID NO: 584519
aaagagaccagcaaaucaa

SEQ ID NO: 584521 - RNA, 19 nt, Artificial Sequence
  Description of Artificial Sequence: Synthetic oligonucleotide
  Sense strand starting at position 1679 of SEQ ID NO: 318723
cuccacaauccuuggaguu

SEQ ID NO: 584522 - RNA, 19 nt, Artificial Sequence
  Description of Artificial Sequence: Synthetic oligonucleotide
  Antisense strand to SEQ ID NO: 584521
aacuccaaggauuguggag

SEQ ID NO: 584523 - RNA, 19 nt, Artificial Sequence
  Description of Artificial Sequence: Synthetic oligonucleotide
  Sense strand starting at position 1680 of SEQ ID NO: 318723
uccacaauccuuggaguug

SEQ ID NO: 584524 - RNA, 19 nt, Artificial Sequence
  Description of Artificial Sequence: Synthetic oligonucleotide
  Antisense strand to SEQ ID NO: 584523
caacuccaaggauugugga

SEQ ID NO: 584525 - RNA, 19 nt, Artificial Sequence
  Description of Artificial Sequence: Synthetic oligonucleotide
  Sense strand starting at position 2011 of SEQ ID NO: 318723
ccacgaauguguccaggga

SEQ ID NO: 584526 - RNA, 19 nt, Artificial Sequence
  Description of Artificial Sequence: Synthetic oligonucleotide
  Antisense strand to SEQ ID NO: 584525
ucccuggacacauucgugg

SEQ ID NO: 584527 - RNA, 19 nt, Artificial Sequence
  Description of Artificial Sequence: Synthetic oligonucleotide
  Sense strand starting at position 2012 of SEQ ID NO: 318723
cacgaauguguccagggau

SEQ ID NO: 584528 - RNA, 19 nt, Artificial Sequence
  Description of Artificial Sequence: Synthetic oligonucleotide
  Antisense strand to SEQ ID NO: 584527
aucccuggacacauucgug

SEQ ID NO: 584529 - RNA, 19 nt, Artificial Sequence
  Description of Artificial Sequence: Synthetic oligonucleotide
  Sense strand starting at position 2080 of SEQ ID NO: 318723
agucgaauauuucuugucu

SEQ ID NO: 584530 - RNA, 19 nt, Artificial Sequence
  Description of Artificial Sequence: Synthetic oligonucleotide
  Antisense strand to SEQ ID NO: 584529
agacaagaaauauucgacu

SEQ ID NO: 584531 - RNA, 19 nt, Artificial Sequence
  Description of Artificial Sequence: Synthetic oligonucleotide
  Sense strand starting at position 2088 of SEQ ID NO: 318723
auuucuugucuggguguua

SEQ ID NO: 584532 - RNA, 19 nt, Artificial Sequence
  Description of Artificial Sequence: Synthetic oligonucleotide
  Antisense strand to SEQ ID NO: 584531
uaacacccagacaagaaau

SEQ ID NO: 584533 - RNA, 19 nt, Artificial Sequence
  Description of Artificial Sequence: Synthetic oligonucleotide
  Sense strand starting at position 2594 of SEQ ID NO: 318723
uuacaaauugucugggcaa

SEQ ID NO: 584534 - RNA, 19 nt, Artificial Sequence
  Description of Artificial Sequence: Synthetic oligonucleotide
  Antisense strand to SEQ ID NO: 584533
uugcccagacaauuuguaa

SEQ ID NO: 584535 - RNA, 19 nt, Artificial Sequence
  Description of Artificial Sequence: Synthetic oligonucleotide
  Sense strand starting at position 2596 of SEQ ID NO: 318723
acaaauugucugggcaauc

SEQ ID NO: 584536 - RNA, 19 nt, Artificial Sequence
  Description of Artificial Sequence: Synthetic oligonucleotide
  Antisense strand to SEQ ID NO: 584535
gauugcccagacaauuugu

SEQ ID NO: 584537 - RNA, 19 nt, Artificial Sequence
  Description of Artificial Sequence: Synthetic oligonucleotide
  Sense strand starting at position 2597 of SEQ ID NO: 318723
caaauugucugggcaaucu

SEQ ID NO: 584538 - RNA, 19 nt, Artificial Sequence
  Description of Artificial Sequence: Synthetic oligonucleotide
  Antisense strand to SEQ ID NO: 584537
agauugcccagacaauuug

SEQ ID NO: 584539 - RNA, 19 nt, Artificial Sequence
  Description of Artificial Sequence: Synthetic oligonucleotide
  Sense strand starting at position 2830 of SEQ ID NO: 318723
accauauuccuaggucaga

SEQ ID NO: 584540 - RNA, 19 nt, Artificial Sequence
  Description of Artificial Sequence: Synthetic oligonucleotide
  Antisense strand to SEQ ID NO: 584539
ucugaccuaggaauauggu

SEQ ID NO: 584541 - RNA, 19 nt, Artificial Sequence
  Description of Artificial Sequence: Synthetic oligonucleotide
  Sense strand starting at position 2831 of SEQ ID NO: 318723
ccauauuccuaggucagag

SEQ ID NO: 584542 - RNA, 19 nt, Artificial Sequence
  Description of Artificial Sequence: Synthetic oligonucleotide
  Antisense strand to SEQ ID NO: 584541
cucugaccuaggaauaugg

SEQ ID NO: 584543 - RNA, 19 nt, Artificial Sequence
  Description of Artificial Sequence: Synthetic oligonucleotide
  Sense strand starting at position 2936 of SEQ ID NO: 318723
ccucaaugaccgcaaauga

SEQ ID NO: 584544 - RNA, 19 nt, Artificial Sequence
  Description of Artificial Sequence: Synthetic oligonucleotide
  Antisense strand to SEQ ID NO: 584543
ucauuugcggucauugagg

SEQ ID NO: 584545 - RNA, 19 nt, Artificial Sequence
  Description of Artificial Sequence: Synthetic oligonucleotide
  Sense strand starting at position 2949 of SEQ ID NO: 318723
aaaugaguguguuugacaa

SEQ ID NO: 584546 - RNA, 19 nt, Artificial Sequence
  Description of Artificial Sequence: Synthetic oligonucleotide
  Antisense strand to SEQ ID NO: 584545
uugucaaacacacucauuu

SEQ ID NO: 584547 - RNA, 19 nt, Artificial Sequence
  Description of Artificial Sequence: Synthetic oligonucleotide
  Sense strand starting at position 2957 of SEQ ID NO: 318723
guguuugacaaagagcagu

SEQ ID NO: 584548 - RNA, 19 nt, Artificial Sequence
  Description of Artificial Sequence: Synthetic oligonucleotide
  Antisense strand to SEQ ID NO: 584547
acugcucuuugucaaacac

SEQ ID NO: 584549 - RNA, 19 nt, Artificial Sequence
  Description of Artificial Sequence: Synthetic oligonucleotide
  Sense strand starting at position 3006 of SEQ ID NO: 318723
uuuaacaguugauugucaa

SEQ ID NO: 584550 - RNA, 19 nt, Artificial Sequence
  Description of Artificial Sequence: Synthetic oligonucleotide
  Antisense strand to SEQ ID NO: 584549
uugacaaucaacuguuaaa

SEQ ID NO: 584551 - RNA, 19 nt, Artificial Sequence
  Description of Artificial Sequence: Synthetic oligonucleotide
  Sense strand starting at position 3007 of SEQ ID NO: 318723
uuaacaguugauugucaag

SEQ ID NO: 584552 - RNA, 19 nt, Artificial Sequence
  Description of Artificial Sequence: Synthetic oligonucleotide
  Antisense strand to SEQ ID NO: 584551
cuugacaaucaacuguuaa

SEQ ID NO: 584553 - RNA, 19 nt, Artificial Sequence
  Description of Artificial Sequence: Synthetic oligonucleotide
  Sense strand starting at position 3009 of SEQ ID NO: 318723
aacaguugauugucaagaa

SEQ ID NO: 584554 - RNA, 19 nt, Artificial Sequence
  Description of Artificial Sequence: Synthetic oligonucleotide
  Antisense strand to SEQ ID NO: 584553
uucuugacaaucaacuguu

SEQ ID NO: 584555 - RNA, 19 nt, Artificial Sequence
  Description of Artificial Sequence: Synthetic oligonucleotide
  Sense strand starting at position 3221 of SEQ ID NO: 318723
ccagaauaaucacucgaua

SEQ ID NO: 584556 - RNA, 19 nt, Artificial Sequence
  Description of Artificial Sequence: Synthetic oligonucleotide
  Antisense strand to SEQ ID NO: 584555
uaucgagugauuauucugg

SEQ ID NO: 584557 - RNA, 19 nt, Artificial Sequence
  Description of Artificial Sequence: Synthetic oligonucleotide
  Sense strand starting at position 3373 of SEQ ID NO: 318723
cuuaacaagcaucgagaau

SEQ ID NO: 584558 - RNA, 19 nt, Artificial Sequence
  Description of Artificial Sequence: Synthetic oligonucleotide
  Antisense strand to SEQ ID NO: 584557
auucucgaugcuuguuaag

SEQ ID NO: 584559 - RNA, 19 nt, Artificial Sequence
  Description of Artificial Sequence: Synthetic oligonucleotide
  Sense strand starting at position 3379 of SEQ ID NO: 318723
aagcaucgagaauaauagu

SEQ ID NO: 584560 - RNA, 19 nt, Artificial Sequence
  Description of Artificial Sequence: Synthetic oligonucleotide
  Antisense strand to SEQ ID NO: 584559
acuauuauucucgaugcuu

SEQ ID NO: 584561 - RNA, 19 nt, Artificial Sequence
  Description of Artificial Sequence: Synthetic oligonucleotide
  Sense strand starting at position 3468 of SEQ ID NO: 318723
cagagucaccgugaucagu

SEQ ID NO: 584562 - RNA, 19 nt, Artificial Sequence
  Description of Artificial Sequence: Synthetic oligonucleotide
  Antisense strand to SEQ ID NO: 584561
acugaucacggugacucug

SEQ ID NO: 584563 - RNA, 19 nt, Artificial Sequence
  Description of Artificial Sequence: Synthetic oligonucleotide
  Sense strand starting at position 3471 of SEQ ID NO: 318723
agucaccgugaucaguaau

SEQ ID NO: 584564 - RNA, 19 nt, Artificial Sequence
  Description of Artificial Sequence: Synthetic oligonucleotide
  Antisense strand to SEQ ID NO: 584563
auuacugaucacggugacu

SEQ ID NO: 584565 - RNA, 19 nt, Artificial Sequence
  Description of Artificial Sequence: Synthetic oligonucleotide
  Sense strand starting at position 3474 of SEQ ID NO: 318723
caccgugaucaguaaugau

SEQ ID NO: 584566 - RNA, 19 nt, Artificial Sequence
  Description of Artificial Sequence: Synthetic oligonucleotide
  Antisense strand to SEQ ID NO: 584565
aucauuacugaucacggug

SEQ ID NO: 584567 - RNA, 19 nt, Artificial Sequence
  Description of Artificial Sequence: Synthetic oligonucleotide
  Sense strand starting at position 3528 of SEQ ID NO: 318723
gagacagaaugugcuaaca

SEQ ID NO: 584568 - RNA, 19 nt, Artificial Sequence
  Description of Artificial Sequence: Synthetic oligonucleotide
  Antisense strand to SEQ ID NO: 584567
uguuagcacauucugucuc

SEQ ID NO: 584569 - RNA, 19 nt, Artificial Sequence
  Description of Artificial Sequence: Synthetic oligonucleotide
  Sense strand starting at position 3539 of SEQ ID NO: 318723
ugcuaacaucgggauaaau

SEQ ID NO: 584570 - RNA, 19 nt, Artificial Sequence
  Description of Artificial Sequence: Synthetic oligonucleotide
  Antisense strand to SEQ ID NO: 584569
auuuaucccgauguuagca

SEQ ID NO: 584571 - RNA, 19 nt, Artificial Sequence
  Description of Artificial Sequence: Synthetic oligonucleotide
  Sense strand starting at position 3900 of SEQ ID NO: 318723
accuaaaggaugugauguu

SEQ ID NO: 584572 - RNA, 19 nt, Artificial Sequence
  Description of Artificial Sequence: Synthetic oligonucleotide
  Antisense strand to SEQ ID NO: 584571
aacaucacauccuuuaggu

SEQ ID NO: 584573 - RNA, 19 nt, Artificial Sequence
  Description of Artificial Sequence: Synthetic oligonucleotide
  Sense strand starting at position 3947 of SEQ ID NO: 318723
ggaacugaguuccuaguau

SEQ ID NO: 584574 - RNA, 19 nt, Artificial Sequence
  Description of Artificial Sequence: Synthetic oligonucleotide
  Antisense strand to SEQ ID NO: 584573
auacuaggaacucaguucc

SEQ ID NO: 584575 - RNA, 19 nt, Artificial Sequence
  Description of Artificial Sequence: Synthetic oligonucleotide
  Sense strand starting at position 39 of SEQ ID NO: 318724
aguccuauauuuggagaaa

SEQ ID NO: 584576 - RNA, 19 nt, Artificial Sequence
  Description of Artificial Sequence: Synthetic oligonucleotide
  Antisense strand to SEQ ID NO: 584575
uuucuccaaauauaggacu

SEQ ID NO: 584577 - RNA, 19 nt, Artificial Sequence
  Description of Artificial Sequence: Synthetic oligonucleotide
  Sense strand starting at position 40 of SEQ ID NO: 318724
guccuauauuuggagaaac

SEQ ID NO: 584578 - RNA, 19 nt, Artificial Sequence
  Description of Artificial Sequence: Synthetic oligonucleotide
  Antisense strand to SEQ ID NO: 584577
guuucuccaaauauaggac

SEQ ID NO: 584579 - RNA, 19 nt, Artificial Sequence
  Description of Artificial Sequence: Synthetic oligonucleotide
  Sense strand starting at position 106 of SEQ ID NO: 318724
uuuagcuauuuguuuacca

SEQ ID NO: 584580 - RNA, 19 nt, Artificial Sequence
  Description of Artificial Sequence: Synthetic oligonucleotide
  Antisense strand to SEQ ID NO: 584579
ugguaaacaaauagcuaaa

SEQ ID NO: 584581 - RNA, 19 nt, Artificial Sequence
  Description of Artificial Sequence: Synthetic oligonucleotide
  Sense strand starting at position 133 of SEQ ID NO: 318724
ucugaauggccaugaaacu

SEQ ID NO: 584582 - RNA, 19 nt, Artificial Sequence
  Description of Artificial Sequence: Synthetic oligonucleotide
  Antisense strand to SEQ ID NO: 584581
aguuucauggccauucaga

SEQ ID NO: 584583 - RNA, 19 nt, Artificial Sequence
  Description of Artificial Sequence: Synthetic oligonucleotide
  Sense strand starting at position 449 of SEQ ID NO: 318724
gggugauuagguuaggcaa

SEQ ID NO: 584584 - RNA, 19 nt, Artificial Sequence
  Description of Artificial Sequence: Synthetic oligonucleotide
  Antisense strand to SEQ ID NO: 584583
uugccuaaccuaaucaccc

SEQ ID NO: 584585 - RNA, 19 nt, Artificial Sequence
  Description of Artificial Sequence: Synthetic oligonucleotide
  Sense strand starting at position 484 of SEQ ID NO: 318724
aauggauuagugcgaggga

SEQ ID NO: 584586 - RNA, 19 nt, Artificial Sequence
  Description of Artificial Sequence: Synthetic oligonucleotide
  Antisense strand to SEQ ID NO: 584585
ucccucgcacuaauccauu

SEQ ID NO: 584587 - RNA, 19 nt, Artificial Sequence
  Description of Artificial Sequence: Synthetic oligonucleotide
  Sense strand starting at position 487 of SEQ ID NO: 318724
ggauuagugcgagggaacu

SEQ ID NO: 584588 - RNA, 19 nt, Artificial Sequence
  Description of Artificial Sequence: Synthetic oligonucleotide
  Antisense strand to SEQ ID NO: 584587
aguucccucgcacuaaucc

SEQ ID NO: 584589 - RNA, 19 nt, Artificial Sequence
  Description of Artificial Sequence: Synthetic oligonucleotide
  Sense strand starting at position 682 of SEQ ID NO: 318724
cuaguacuuccuuauagca

SEQ ID NO: 584590 - RNA, 19 nt, Artificial Sequence
  Description of Artificial Sequence: Synthetic oligonucleotide
  Antisense strand to SEQ ID NO: 584589
ugcuauaaggaaguacuag

SEQ ID NO: 584591 - RNA, 19 nt, Artificial Sequence
  Description of Artificial Sequence: Synthetic oligonucleotide
  Sense strand starting at position 738 of SEQ ID NO: 318724
cuguuaauaggauguggga

SEQ ID NO: 584592 - RNA, 19 nt, Artificial Sequence
  Description of Artificial Sequence: Synthetic oligonucleotide
  Antisense strand to SEQ ID NO: 584591
ucccacauccuauuaacag

SEQ ID NO: 584593 - RNA, 19 nt, Artificial Sequence
  Description of Artificial Sequence: Synthetic oligonucleotide
  Sense strand starting at position 943 of SEQ ID NO: 318724
gcauguccuccugugcaua

SEQ ID NO: 584594 - RNA, 19 nt, Artificial Sequence
  Description of Artificial Sequence: Synthetic oligonucleotide
  Antisense strand to SEQ ID NO: 584593
uaugcacaggaggacaugc

SEQ ID NO: 584595 - RNA, 19 nt, Artificial Sequence
  Description of Artificial Sequence: Synthetic oligonucleotide
  Sense strand starting at position 1111 of SEQ ID NO: 318724
ucagaaagcgucuaaacca

SEQ ID NO: 584596 - RNA, 19 nt, Artificial Sequence
  Description of Artificial Sequence: Synthetic oligonucleotide
  Antisense strand to SEQ ID NO: 584595
ugguuuagacgcuuucuga

SEQ ID NO: 584597 - RNA, 19 nt, Artificial Sequence
  Description of Artificial Sequence: Synthetic oligonucleotide
  Sense strand starting at position 1176 of SEQ ID NO: 318724
acccaucucgaguauaaau

SEQ ID NO: 584598 - RNA, 19 nt, Artificial Sequence
  Description of Artificial Sequence: Synthetic oligonucleotide
  Antisense strand to SEQ ID NO: 584597
auuuauacucgagaugggu

SEQ ID NO: 584599 - RNA, 19 nt, Artificial Sequence
  Description of Artificial Sequence: Synthetic oligonucleotide
  Sense strand starting at position 1178 of SEQ ID NO: 318724
ccaucucgaguauaaaucu

SEQ ID NO: 584600 - RNA, 19 nt, Artificial Sequence
  Description of Artificial Sequence: Synthetic oligonucleotide
  Antisense strand to SEQ ID NO: 584599
agauuuauacucgagaugg

SEQ ID NO: 584601 - RNA, 19 nt, Artificial Sequence
  Description of Artificial Sequence: Synthetic oligonucleotide
  Sense strand starting at position 1184 of SEQ ID NO: 318724
cgaguauaaaucuggaaac

SEQ ID NO: 584602 - RNA, 19 nt, Artificial Sequence
  Description of Artificial Sequence: Synthetic oligonucleotide
  Antisense strand to SEQ ID NO: 584601
guuuccagauuuauacucg

SEQ ID NO: 584603 - RNA, 19 nt, Artificial Sequence
  Description of Artificial Sequence: Synthetic oligonucleotide
  Sense strand starting at position 1629 of SEQ ID NO: 318724
guucucguaggcguugaaa

SEQ ID NO: 584604 - RNA, 19 nt, Artificial Sequence
  Description of Artificial Sequence: Synthetic oligonucleotide
  Antisense strand to SEQ ID NO: 584603
uuucaacgccuacgagaac

SEQ ID NO: 584605 - RNA, 19 nt, Artificial Sequence
  Description of Artificial Sequence: Synthetic oligonucleotide
  Sense strand starting at position 1640 of SEQ ID NO: 318724
cguugaaagaggcaaacuu

SEQ ID NO: 584606 - RNA, 19 nt, Artificial Sequence
  Description of Artificial Sequence: Synthetic oligonucleotide
  Antisense strand to SEQ ID NO: 584605
aaguuugccucuuucaacg

SEQ ID NO: 584607 - RNA, 19 nt, Artificial Sequence
  Description of Artificial Sequence: Synthetic oligonucleotide
  Sense strand starting at position 1796 of SEQ ID NO: 318724
ggugccaguccgucuuaua

SEQ ID NO: 584608 - RNA, 19 nt, Artificial Sequence
  Description of Artificial Sequence: Synthetic oligonucleotide
  Antisense strand to SEQ ID NO: 584607
uauaagacggacuggcacc

SEQ ID NO: 584609 - RNA, 19 nt, Artificial Sequence
  Description of Artificial Sequence: Synthetic oligonucleotide
  Sense strand starting at position 1797 of SEQ ID NO: 318724
gugccaguccgucuuauag

SEQ ID NO: 584610 - RNA, 19 nt, Artificial Sequence
  Description of Artificial Sequence: Synthetic oligonucleotide
  Antisense strand to SEQ ID NO: 584609
cuauaagacggacuggcac

SEQ ID NO: 584611 - RNA, 19 nt, Artificial Sequence
  Description of Artificial Sequence: Synthetic oligonucleotide
  Sense strand starting at position 2002 of SEQ ID NO: 318724
uccugauugucacugagga

SEQ ID NO: 584612 - RNA, 19 nt, Artificial Sequence
  Description of Artificial Sequence: Synthetic oligonucleotide
  Antisense strand to SEQ ID NO: 584611
uccucagugacaaucagga

SEQ ID NO: 584613 - RNA, 19 nt, Artificial Sequence
  Description of Artificial Sequence: Synthetic oligonucleotide
  Sense strand starting at position 2003 of SEQ ID NO: 318724
ccugauugucacugaggaa

SEQ ID NO: 584614 - RNA, 19 nt, Artificial Sequence
  Description of Artificial Sequence: Synthetic oligonucleotide
  Antisense strand to SEQ ID NO: 584613
uuccucagugacaaucagg

SEQ ID NO: 584615 - RNA, 19 nt, Artificial Sequence
  Description of Artificial Sequence: Synthetic oligonucleotide
  Sense strand starting at position 2539 of SEQ ID NO: 318724
ggcggaauuugagugcaca

SEQ ID NO: 584616 - RNA, 19 nt, Artificial Sequence
  Description of Artificial Sequence: Synthetic oligonucleotide
  Antisense strand to SEQ ID NO: 584615
ugugcacucaaauuccgcc

SEQ ID NO: 584617 - RNA, 19 nt, Artificial Sequence
  Description of Artificial Sequence: Synthetic oligonucleotide
  Sense strand starting at position 2540 of SEQ ID NO: 318724
gcggaauuugagugcacag

SEQ ID NO: 584618 - RNA, 19 nt, Artificial Sequence
  Description of Artificial Sequence: Synthetic oligonucleotide
  Antisense strand to SEQ ID NO: 584617
cugugcacucaaauuccgc

SEQ ID NO: 584619 - RNA, 19 nt, Artificial Sequence
  Description of Artificial Sequence: Synthetic oligonucleotide
  Sense strand starting at position 2598 of SEQ ID NO: 318724
ccacguagguaauucuaau

SEQ ID NO: 584620 - RNA, 19 nt, Artificial Sequence
  Description of Artificial Sequence: Synthetic oligonucleotide
  Antisense strand to SEQ ID NO: 584619
auuagaauuaccuacgugg

SEQ ID NO: 584621 - RNA, 19 nt, Artificial Sequence
  Description of Artificial Sequence: Synthetic oligonucleotide
  Sense strand starting at position 2859 of SEQ ID NO: 318724
cagcaaaguucuguagaaa

SEQ ID NO: 584622 - RNA, 19 nt, Artificial Sequence
  Description of Artificial Sequence: Synthetic oligonucleotide
  Antisense strand to SEQ ID NO: 584621
uuucuacagaacuuugcug

SEQ ID NO: 584623 - RNA, 19 nt, Artificial Sequence
  Description of Artificial Sequence: Synthetic oligonucleotide
  Sense strand starting at position 3253 of SEQ ID NO: 318724
cuuguuagagucgaauguu

SEQ ID NO: 584624 - RNA, 19 nt, Artificial Sequence
  Description of Artificial Sequence: Synthetic oligonucleotide
  Antisense strand to SEQ ID NO: 584623
aacauucgacucuaacaag

SEQ ID NO: 584625 - RNA, 19 nt, Artificial Sequence
  Description of Artificial Sequence: Synthetic oligonucleotide
  Sense strand starting at position 3337 of SEQ ID NO: 318724
gugccuucccuugacucaa

SEQ ID NO: 584626 - RNA, 19 nt, Artificial Sequence
  Description of Artificial Sequence: Synthetic oligonucleotide
  Antisense strand to SEQ ID NO: 584625
uugagucaagggaaggcac

SEQ ID NO: 584627 - RNA, 19 nt, Artificial Sequence
  Description of Artificial Sequence: Synthetic oligonucleotide
  Sense strand starting at position 3526 of SEQ ID NO: 318724
acucuucugcuuggaacau

SEQ ID NO: 584628 - RNA, 19 nt, Artificial Sequence
  Description of Artificial Sequence: Synthetic oligonucleotide
  Antisense strand to SEQ ID NO: 584627
auguuccaagcagaagagu

SEQ ID NO: 584629 - RNA, 19 nt, Artificial Sequence
  Description of Artificial Sequence: Synthetic oligonucleotide
  Sense strand starting at position 3551 of SEQ ID NO: 318724
gcuggcuugcuuccuuauu

SEQ ID NO: 584630 - RNA, 19 nt, Artificial Sequence
  Description of Artificial Sequence: Synthetic oligonucleotide
  Antisense strand to SEQ ID NO: 584629
aauaaggaagcaagccagc

SEQ ID NO: 584631 - RNA, 19 nt, Artificial Sequence
  Description of Artificial Sequence: Synthetic oligonucleotide
  Sense strand starting at position 3572 of SEQ ID NO: 318724
uuggaucucugcccaaaug

SEQ ID NO: 584632 - RNA, 19 nt, Artificial Sequence
  Description of Artificial Sequence: Synthetic oligonucleotide
  Antisense strand to SEQ ID NO: 584631
cauuugggcagagauccaa

SEQ ID NO: 584633 - RNA, 19 nt, Artificial Sequence
  Description of Artificial Sequence: Synthetic oligonucleotide
  Sense strand starting at position 3583 of SEQ ID NO: 318724
cccaaaugccuuuguaaga

SEQ ID NO: 584634 - RNA, 19 nt, Artificial Sequence
  Description of Artificial Sequence: Synthetic oligonucleotide
  Antisense strand to SEQ ID NO: 584633
ucuuacaaaggcauuuggg

SEQ ID NO: 584635 - RNA, 19 nt, Artificial Sequence
  Description of Artificial Sequence: Synthetic oligonucleotide
  Sense strand starting at position 3584 of SEQ ID NO: 318724
ccaaaugccuuuguaagag

SEQ ID NO: 584636 - RNA, 19 nt, Artificial Sequence
  Description of Artificial Sequence: Synthetic oligonucleotide
  Antisense strand to SEQ ID NO: 584635
cucuuacaaaggcauuugg

SEQ ID NO: 584637 - RNA, 19 nt, Artificial Sequence
  Description of Artificial Sequence: Synthetic oligonucleotide
  Sense strand starting at position 3590 of SEQ ID NO: 318724
gccuuuguaagagaggcuu

SEQ ID NO: 584638 - RNA, 19 nt, Artificial Sequence
  Description of Artificial Sequence: Synthetic oligonucleotide
  Antisense strand to SEQ ID NO: 584637
aagccucucuuacaaaggc

SEQ ID NO: 584639 - RNA, 19 nt, Artificial Sequence
  Description of Artificial Sequence: Synthetic oligonucleotide
  Sense strand starting at position 3592 of SEQ ID NO: 318724
cuuuguaagagaggcuuau

SEQ ID NO: 584640 - RNA, 19 nt, Artificial Sequence
  Description of Artificial Sequence: Synthetic oligonucleotide
  Antisense strand to SEQ ID NO: 584639
auaagccucucuuacaaag

SEQ ID NO: 584641 - RNA, 19 nt, Artificial Sequence
  Description of Artificial Sequence: Synthetic oligonucleotide
  Sense strand starting at position 3670 of SEQ ID NO: 318724
ucuccaguacuguauuagu

SEQ ID NO: 584642 - RNA, 19 nt, Artificial Sequence
  Description of Artificial Sequence: Synthetic oligonucleotide
  Antisense strand to SEQ ID NO: 584641
acuaauacaguacuggaga

SEQ ID NO: 584643 - RNA, 19 nt, Artificial Sequence
  Description of Artificial Sequence: Synthetic oligonucleotide
  Sense strand starting at position 3679 of SEQ ID NO: 318724
cuguauuaguuaucuacua

SEQ ID NO: 584644 - RNA, 19 nt, Artificial Sequence
  Description of Artificial Sequence: Synthetic oligonucleotide
  Antisense strand to SEQ ID NO: 584643
uaguagauaacuaauacag

SEQ ID NO: 584645 - RNA, 19 nt, Artificial Sequence
  Description of Artificial Sequence: Synthetic oligonucleotide
  Sense strand starting at position 3680 of SEQ ID NO: 318724
uguauuaguuaucuacuac

SEQ ID NO: 584646 - RNA, 19 nt, Artificial Sequence
  Description of Artificial Sequence: Synthetic oligonucleotide
  Antisense strand to SEQ ID NO: 584645
guaguagauaacuaauaca

SEQ ID NO: 584647 - RNA, 19 nt, Artificial Sequence
  Description of Artificial Sequence: Synthetic oligonucleotide
  Sense strand starting at position 3778 of SEQ ID NO: 318724
ggugguucugacuaagauc

SEQ ID NO: 584648 - RNA, 19 nt, Artificial Sequence
  Description of Artificial Sequence: Synthetic oligonucleotide
  Antisense strand to SEQ ID NO: 584647
gaucuuagucagaaccacc

SEQ ID NO: 584649 - RNA, 19 nt, Artificial Sequence
  Description of Artificial Sequence: Synthetic oligonucleotide
  Sense strand starting at position 3868 of SEQ ID NO: 318724
gcuggagagucucccuuaa

SEQ ID NO: 584650 - RNA, 19 nt, Artificial Sequence
  Description of Artificial Sequence: Synthetic oligonucleotide
  Antisense strand to SEQ ID NO: 584649
uuaagggagacucuccagc

SEQ ID NO: 584651 - RNA, 19 nt, Artificial Sequence
  Description of Artificial Sequence: Synthetic oligonucleotide
  Sense strand starting at position 3870 of SEQ ID NO: 318724
uggagagucucccuuaaag

SEQ ID NO: 584652 - RNA, 19 nt, Artificial Sequence
  Description of Artificial Sequence: Synthetic oligonucleotide
  Antisense strand to SEQ ID NO: 584651
cuuuaagggagacucucca

SEQ ID NO: 584653 - RNA, 19 nt, Artificial Sequence
  Description of Artificial Sequence: Synthetic oligonucleotide
  Sense strand starting at position 3904 of SEQ ID NO: 318724
agcugauagcaagagguuu

SEQ ID NO: 584654 - RNA, 19 nt, Artificial Sequence
  Description of Artificial Sequence: Synthetic oligonucleotide
  Antisense strand to SEQ ID NO: 584653
aaaccucuugcuaucagcu

SEQ ID NO: 584655 - RNA, 19 nt, Artificial Sequence
  Description of Artificial Sequence: Synthetic oligonucleotide
  Sense strand starting at position 98 of SEQ ID NO: 318725
ucccaagguccugggaaua

SEQ ID NO: 584656 - RNA, 19 nt, Artificial Sequence
  Description of Artificial Sequence: Synthetic oligonucleotide
  Antisense strand to SEQ ID NO: 584655
uauucccaggaccuuggga

SEQ ID NO: 584657 - RNA, 19 nt, Artificial Sequence
  Description of Artificial Sequence: Synthetic oligonucleotide
  Sense strand starting at position 141 of SEQ ID NO: 318725
ccguguuaggaaggaauua

SEQ ID NO: 584658 - RNA, 19 nt, Artificial Sequence
  Description of Artificial Sequence: Synthetic oligonucleotide
  Antisense strand to SEQ ID NO: 584657
uaauuccuuccuaacacgg

SEQ ID NO: 584659 - RNA, 19 nt, Artificial Sequence
  Description of Artificial Sequence: Synthetic oligonucleotide
  Sense strand starting at position 142 of SEQ ID NO: 318725
cguguuaggaaggaauuau

SEQ ID NO: 584660 - RNA, 19 nt, Artificial Sequence
  Description of Artificial Sequence: Synthetic oligonucleotide
  Antisense strand to SEQ ID NO: 584659
auaauuccuuccuaacacg

SEQ ID NO: 584661 - RNA, 19 nt, Artificial Sequence
  Description of Artificial Sequence: Synthetic oligonucleotide
  Sense strand starting at position 157 of SEQ ID NO: 318725
uuauuuaacuccuccgugu

SEQ ID NO: 584662 - RNA, 19 nt, Artificial Sequence
  Description of Artificial Sequence: Synthetic oligonucleotide
  Antisense strand to SEQ ID NO: 584661
acacggaggaguuaaauaa

SEQ ID NO: 584663 - RNA, 19 nt, Artificial Sequence
  Description of Artificial Sequence: Synthetic oligonucleotide
  Sense strand starting at position 953 of SEQ ID NO: 318725
cacuuaaaccaguguggga

SEQ ID NO: 584664 - RNA, 19 nt, Artificial Sequence
  Description of Artificial Sequence: Synthetic oligonucleotide
  Antisense strand to SEQ ID NO: 584663
ucccacacugguuuaagug

SEQ ID NO: 584665 - RNA, 19 nt, Artificial Sequence
  Description of Artificial Sequence: Synthetic oligonucleotide
  Sense strand starting at position 1005 of SEQ ID NO: 318725
cugccagugcuuuacgaua

SEQ ID NO: 584666 - RNA, 19 nt, Artificial Sequence
  Description of Artificial Sequence: Synthetic oligonucleotide
  Antisense strand to SEQ ID NO: 584665
uaucguaaagcacuggcag

SEQ ID NO: 584667 - RNA, 19 nt, Artificial Sequence
  Description of Artificial Sequence: Synthetic oligonucleotide
  Sense strand starting at position 1010 of SEQ ID NO: 318725
agugcuuuacgauaaagac

SEQ ID NO: 584668 - RNA, 19 nt, Artificial Sequence
  Description of Artificial Sequence: Synthetic oligonucleotide
  Antisense strand to SEQ ID NO: 584667
gucuuuaucguaaagcacu

SEQ ID NO: 584669 - RNA, 19 nt, Artificial Sequence
  Description of Artificial Sequence: Synthetic oligonucleotide
  Sense strand starting at position 1504 of SEQ ID NO: 318725
aaguuuaaacuccgggaaa

SEQ ID NO: 584670 - RNA, 19 nt, Artificial Sequence
  Description of Artificial Sequence: Synthetic oligonucleotide
  Antisense strand to SEQ ID NO: 584669
uuucccggaguuuaaacuu

SEQ ID NO: 584671 - RNA, 19 nt, Artificial Sequence
  Description of Artificial Sequence: Synthetic oligonucleotide
  Sense strand starting at position 1993 of SEQ ID NO: 318725
acggguuucccuggcugaa

SEQ ID NO: 584672 - RNA, 19 nt, Artificial Sequence
  Description of Artificial Sequence: Synthetic oligonucleotide
  Antisense strand to SEQ ID NO: 584671
uucagccagggaaacccgu

SEQ ID NO: 584673 - RNA, 19 nt, Artificial Sequence
  Description of Artificial Sequence: Synthetic oligonucleotide
  Sense strand starting at position 2121 of SEQ ID NO: 318725
uguggaguucgagaaggcu

SEQ ID NO: 584674 - RNA, 19 nt, Artificial Sequence
  Description of Artificial Sequence: Synthetic oligonucleotide
  Antisense strand to SEQ ID NO: 584673
agccuucucgaacuccaca

SEQ ID NO: 584675 - RNA, 19 nt, Artificial Sequence
  Description of Artificial Sequence: Synthetic oligonucleotide
  Sense strand starting at position 2124 of SEQ ID NO: 318725
ggaguucgagaaggcugaa

SEQ ID NO: 584676 - RNA, 19 nt, Artificial Sequence
  Description of Artificial Sequence: Synthetic oligonucleotide
  Antisense strand to SEQ ID NO: 584675
uucagccuucucgaacucc

SEQ ID NO: 584677 - RNA, 19 nt, Artificial Sequence
  Description of Artificial Sequence: Synthetic oligonucleotide
  Sense strand starting at position 2191 of SEQ ID NO: 318725
cccauuguauucguaauua

SEQ ID NO: 584678 - RNA, 19 nt, Artificial Sequence
  Description of Artificial Sequence: Synthetic oligonucleotide
  Antisense strand to SEQ ID NO: 584677
uaauuacgaauacaauggg

SEQ ID NO: 584679 - RNA, 19 nt, Artificial Sequence
  Description of Artificial Sequence: Synthetic oligonucleotide
  Sense strand starting at position 2196 of SEQ ID NO: 318725
uguauucguaauuagaaug

SEQ ID NO: 584680 - RNA, 19 nt, Artificial Sequence
  Description of Artificial Sequence: Synthetic oligonucleotide
  Antisense strand to SEQ ID NO: 584679
cauucuaauuacgaauaca

SEQ ID NO: 584681 - RNA, 19 nt, Artificial Sequence
  Description of Artificial Sequence: Synthetic oligonucleotide
  Sense strand starting at position 2201 of SEQ ID NO: 318725
ucguaauuagaaugacaaa

SEQ ID NO: 584682 - RNA, 19 nt, Artificial Sequence
  Description of Artificial Sequence: Synthetic oligonucleotide
  Antisense strand to SEQ ID NO: 584681
uuugucauucuaauuacga

SEQ ID NO: 584683 - RNA, 19 nt, Artificial Sequence
  Description of Artificial Sequence: Synthetic oligonucleotide
  Sense strand starting at position 2276 of SEQ ID NO: 318725
ugauuauucgcagguggug

SEQ ID NO: 584684 - RNA, 19 nt, Artificial Sequence
  Description of Artificial Sequence: Synthetic oligonucleotide
  Antisense strand to SEQ ID NO: 584683
caccaccugcgaauaauca

SEQ ID NO: 584685 - RNA, 19 nt, Artificial Sequence
  Description of Artificial Sequence: Synthetic oligonucleotide
  Sense strand starting at position 2843 of SEQ ID NO: 318725
gccaaauacuaugugcuca

SEQ ID NO: 584686 - RNA, 19 nt, Artificial Sequence
  Description of Artificial Sequence: Synthetic oligonucleotide
  Antisense strand to SEQ ID NO: 584685
ugagcacauaguauuuggc

SEQ ID NO: 584687 - RNA, 19 nt, Artificial Sequence
  Description of Artificial Sequence: Synthetic oligonucleotide
  Sense strand starting at position 2848 of SEQ ID NO: 318725
auacuaugugcucagaaag

SEQ ID NO: 584688 - RNA, 19 nt, Artificial Sequence
  Description of Artificial Sequence: Synthetic oligonucleotide
  Antisense strand to SEQ ID NO: 584687
cuuucugagcacauaguau

SEQ ID NO: 584689 - RNA, 19 nt, Artificial Sequence
  Description of Artificial Sequence: Synthetic oligonucleotide
  Sense strand starting at position 2855 of SEQ ID NO: 318725
gugcucagaaaguguugau

SEQ ID NO: 584690 - RNA, 19 nt, Artificial Sequence
  Description of Artificial Sequence: Synthetic oligonucleotide
  Antisense strand to SEQ ID NO: 584689
aucaacacuuucugagcac

SEQ ID NO: 584691 - RNA, 19 nt, Artificial Sequence
  Description of Artificial Sequence: Synthetic oligonucleotide
  Sense strand starting at position 2893 of SEQ ID NO: 318725
agcguuuacagagacaaac

SEQ ID NO: 584692 - RNA, 19 nt, Artificial Sequence
  Description of Artificial Sequence: Synthetic oligonucleotide
  Antisense strand to SEQ ID NO: 584691
guuugucucuguaaacgcu

SEQ ID NO: 584693 - RNA, 19 nt, Artificial Sequence
  Description of Artificial Sequence: Synthetic oligonucleotide
  Sense strand starting at position 2965 of SEQ ID NO: 318725
ucagguagauaauaugaaa

SEQ ID NO: 584694 - RNA, 19 nt, Artificial Sequence
  Description of Artificial Sequence: Synthetic oligonucleotide
  Antisense strand to SEQ ID NO: 584693
uuucauauuaucuaccuga

SEQ ID NO: 584695 - RNA, 19 nt, Artificial Sequence
  Description of Artificial Sequence: Synthetic oligonucleotide
  Sense strand starting at position 2991 of SEQ ID NO: 318725
cuuggaucacgauguuaca

SEQ ID NO: 584696 - RNA, 19 nt, Artificial Sequence
  Description of Artificial Sequence: Synthetic oligonucleotide
  Antisense strand to SEQ ID NO: 584695
uguaacaucgugauccaag

SEQ ID NO: 584697 - RNA, 19 nt, Artificial Sequence
  Description of Artificial Sequence: Synthetic oligonucleotide
  Sense strand starting at position 3128 of SEQ ID NO: 318725
ucaaacauccacugcgauu

SEQ ID NO: 584698 - RNA, 19 nt, Artificial Sequence
  Description of Artificial Sequence: Synthetic oligonucleotide
  Antisense strand to SEQ ID NO: 584697
aaucgcaguggauguuuga

SEQ ID NO: 584699 - RNA, 19 nt, Artificial Sequence
  Description of Artificial Sequence: Synthetic oligonucleotide
  Sense strand starting at position 3150 of SEQ ID NO: 318725
cacucauuagguuggcuau

SEQ ID NO: 584700 - RNA, 19 nt, Artificial Sequence
  Description of Artificial Sequence: Synthetic oligonucleotide
  Antisense strand to SEQ ID NO: 584699
auagccaaccuaaugagug

SEQ ID NO: 584701 - RNA, 19 nt, Artificial Sequence
  Description of Artificial Sequence: Synthetic oligonucleotide
  Sense strand starting at position 3152 of SEQ ID NO: 318725
cucauuagguuggcuauua

SEQ ID NO: 584702 - RNA, 19 nt, Artificial Sequence
  Description of Artificial Sequence: Synthetic oligonucleotide
  Antisense strand to SEQ ID NO: 584701
uaauagccaaccuaaugag

SEQ ID NO: 584703 - RNA, 19 nt, Artificial Sequence
  Description of Artificial Sequence: Synthetic oligonucleotide
  Sense strand starting at position 3153 of SEQ ID NO: 318725
ucauuagguuggcuauuau

SEQ ID NO: 584704 - RNA, 19 nt, Artificial Sequence
  Description of Artificial Sequence: Synthetic oligonucleotide
  Antisense strand to SEQ ID NO: 584703
auaauagccaaccuaauga

SEQ ID NO: 584705 - RNA, 19 nt, Artificial Sequence
  Description of Artificial Sequence: Synthetic oligonucleotide
  Sense strand starting at position 3212 of SEQ ID NO: 318725
gccuuaauggugggaaugu

SEQ ID NO: 584706 - RNA, 19 nt, Artificial Sequence
  Description of Artificial Sequence: Synthetic oligonucleotide
  Antisense strand to SEQ ID NO: 584705
acauucccaccauuaaggc

SEQ ID NO: 584707 - RNA, 19 nt, Artificial Sequence
  Description of Artificial Sequence: Synthetic oligonucleotide
  Sense strand starting at position 3558 of SEQ ID NO: 318725
accagaaauugaggaaaca

SEQ ID NO: 584708 - RNA, 19 nt, Artificial Sequence
  Description of Artificial Sequence: Synthetic oligonucleotide
  Antisense strand to SEQ ID NO: 584707
uguuuccucaauuucuggu

SEQ ID NO: 584709 - RNA, 19 nt, Artificial Sequence
  Description of Artificial Sequence: Synthetic oligonucleotide
  Sense strand starting at position 3592 of SEQ ID NO: 318725
ggagacaagugcucugaua

SEQ ID NO: 584710 - RNA, 19 nt, Artificial Sequence
  Description of Artificial Sequence: Synthetic oligonucleotide
  Antisense strand to SEQ ID NO: 584709
uaucagagcacuugucucc

SEQ ID NO: 584711 - RNA, 19 nt, Artificial Sequence
  Description of Artificial Sequence: Synthetic oligonucleotide
  Sense strand starting at position 3594 of SEQ ID NO: 318725
agacaagugcucugauacc

SEQ ID NO: 584712 - RNA, 19 nt, Artificial Sequence
  Description of Artificial Sequence: Synthetic oligonucleotide
  Antisense strand to SEQ ID NO: 584711
gguaucagagcacuugucu

SEQ ID NO: 584713 - RNA, 19 nt, Artificial Sequence
  Description of Artificial Sequence: Synthetic oligonucleotide
  Sense strand starting at position 3686 of SEQ ID NO: 318725
cagaaauagugauagagau

SEQ ID NO: 584714 - RNA, 19 nt, Artificial Sequence
  Description of Artificial Sequence: Synthetic oligonucleotide
  Antisense strand to SEQ ID NO: 584713
aucucuaucacuauuucug

SEQ ID NO: 584715 - RNA, 19 nt, Artificial Sequence
  Description of Artificial Sequence: Synthetic oligonucleotide
  Sense strand starting at position 3727 of SEQ ID NO: 318725
ugaggaagcccugagucuu

SEQ ID NO: 584716 - RNA, 19 nt, Artificial Sequence
  Description of Artificial Sequence: Synthetic oligonucleotide
  Antisense strand to SEQ ID NO: 584715
aagacucagggcuuccuca

SEQ ID NO: 584717 - RNA, 19 nt, Artificial Sequence
  Description of Artificial Sequence: Synthetic oligonucleotide
  Sense strand starting at position 3771 of SEQ ID NO: 318725
uggcauaaugaaugagcua

SEQ ID NO: 584718 - RNA, 19 nt, Artificial Sequence
  Description of Artificial Sequence: Synthetic oligonucleotide
  Antisense strand to SEQ ID NO: 584717
uagcucauucauuaugcca

SEQ ID NO: 584719 - RNA, 19 nt, Artificial Sequence
  Description of Artificial Sequence: Synthetic oligonucleotide
  Sense strand starting at position 3812 of SEQ ID NO: 318725
auacauccucgaugaaaua

SEQ ID NO: 584720 - RNA, 19 nt, Artificial Sequence
  Description of Artificial Sequence: Synthetic oligonucleotide
  Antisense strand to SEQ ID NO: 584719
uauuucaucgaggauguau

SEQ ID NO: 584721 - RNA, 19 nt, Artificial Sequence
  Description of Artificial Sequence: Synthetic oligonucleotide
  Sense strand starting at position 3887 of SEQ ID NO: 318725
aagguuggcauguguuauu

SEQ ID NO: 584722 - RNA, 19 nt, Artificial Sequence
  Description of Artificial Sequence: Synthetic oligonucleotide
  Antisense strand to SEQ ID NO: 584721
aauaacacaugccaaccuu

SEQ ID NO: 584723 - RNA, 19 nt, Artificial Sequence
  Description of Artificial Sequence: Synthetic oligonucleotide
  Sense strand starting at position 3892 of SEQ ID NO: 318725
uggcauguguuauuugcua

SEQ ID NO: 584724 - RNA, 19 nt, Artificial Sequence
  Description of Artificial Sequence: Synthetic oligonucleotide
  Antisense strand to SEQ ID NO: 584723
uagcaaauaacacaugcca

SEQ ID NO: 584725 - RNA, 19 nt, Artificial Sequence
  Description of Artificial Sequence: Synthetic oligonucleotide
  Sense strand starting at position 3896 of SEQ ID NO: 318725
auguguuauuugcuacaag

SEQ ID NO: 584726 - RNA, 19 nt, Artificial Sequence
  Description of Artificial Sequence: Synthetic oligonucleotide
  Antisense strand to SEQ ID NO: 584725
cuuguagcaaauaacacau

SEQ ID NO: 584727 - RNA, 19 nt, Artificial Sequence
  Description of Artificial Sequence: Synthetic oligonucleotide
  Sense strand starting at position 3923 of SEQ ID NO: 318725
gauggaacugcucaaguug

SEQ ID NO: 584728 - RNA, 19 nt, Artificial Sequence
  Description of Artificial Sequence: Synthetic oligonucleotide
  Antisense strand to SEQ ID NO: 584727
caacuugagcaguuccauc

SEQ ID NO: 584729 - RNA, 19 nt, Artificial Sequence
  Description of Artificial Sequence: Synthetic oligonucleotide
  Sense strand starting at position 3931 of SEQ ID NO: 318725
ugcucaaguuggcugaaau

SEQ ID NO: 584730 - RNA, 19 nt, Artificial Sequence
  Description of Artificial Sequence: Synthetic oligonucleotide
  Antisense strand to SEQ ID NO: 584729
auuucagccaacuugagca

SEQ ID NO: 584731 - RNA, 19 nt, Artificial Sequence
  Description of Artificial Sequence: Synthetic oligonucleotide
  Sense strand starting at position 3932 of SEQ ID NO: 318725
gcucaaguuggcugaaaug

SEQ ID NO: 584732 - RNA, 19 nt, Artificial Sequence
  Description of Artificial Sequence: Synthetic oligonucleotide
  Antisense strand to SEQ ID NO: 584731
cauuucagccaacuugagc

SEQ ID NO: 584733 - RNA, 19 nt, Artificial Sequence
  Description of Artificial Sequence: Synthetic oligonucleotide
  Sense strand starting at position 3978 of SEQ ID NO: 318725
gcagacuccggcuagagaa

SEQ ID NO: 584734 - RNA, 19 nt, Artificial Sequence
  Description of Artificial Sequence: Synthetic oligonucleotide
  Antisense strand to SEQ ID NO: 584733
uucucuagccggagucugc

SEQ ID NO: 584735 - RNA, 19 nt, Artificial Sequence
  Description of Artificial Sequence: Synthetic oligonucleotide
  Sense strand starting at position 101 of SEQ ID NO: 318726
caggaucugucagagaaag

SEQ ID NO: 584736 - RNA, 19 nt, Artificial Sequence
  Description of Artificial Sequence: Synthetic oligonucleotide
  Antisense strand to SEQ ID NO: 584735
cuuucucugacagauccug

SEQ ID NO: 584737 - RNA, 19 nt, Artificial Sequence
  Description of Artificial Sequence: Synthetic oligonucleotide
  Sense strand starting at position 150 of SEQ ID NO: 318726
uucucucgccuuugucaaa

SEQ ID NO: 584738 - RNA, 19 nt, Artificial Sequence
  Description of Artificial Sequence: Synthetic oligonucleotide
  Antisense strand to SEQ ID NO: 584737
uuugacaaaggcgagagaa

SEQ ID NO: 584739 - RNA, 19 nt, Artificial Sequence
  Description of Artificial Sequence: Synthetic oligonucleotide
  Sense strand starting at position 151 of SEQ ID NO: 318726
ucucucgccuuugucaaau

SEQ ID NO: 584740 - RNA, 19 nt, Artificial Sequence
  Description of Artificial Sequence: Synthetic oligonucleotide
  Antisense strand to SEQ ID NO: 584739
auuugacaaaggcgagaga

SEQ ID NO: 584741 - RNA, 19 nt, Artificial Sequence
  Description of Artificial Sequence: Synthetic oligonucleotide
  Sense strand starting at position 153 of SEQ ID NO: 318726
ucucgccuuugucaaauau

SEQ ID NO: 584742 - RNA, 19 nt, Artificial Sequence
  Description of Artificial Sequence: Synthetic oligonucleotide
  Antisense strand to SEQ ID NO: 584741
auauuugacaaaggcgaga

SEQ ID NO: 584743 - RNA, 19 nt, Artificial Sequence
  Description of Artificial Sequence: Synthetic oligonucleotide
  Sense strand starting at position 548 of SEQ ID NO: 318726
aggcucgcgcccuuuaauu

SEQ ID NO: 584744 - RNA, 19 nt, Artificial Sequence
  Description of Artificial Sequence: Synthetic oligonucleotide
  Antisense strand to SEQ ID NO: 584743
aauuaaagggcgcgagccu

SEQ ID NO: 584745 - RNA, 19 nt, Artificial Sequence
  Description of Artificial Sequence: Synthetic oligonucleotide
  Sense strand starting at position 557 of SEQ ID NO: 318726
cccuuuaauuaguaagcgu

SEQ ID NO: 584746 - RNA, 19 nt, Artificial Sequence
  Description of Artificial Sequence: Synthetic oligonucleotide
  Antisense strand to SEQ ID NO: 584745
acgcuuacuaauuaaaggg

SEQ ID NO: 584747 - RNA, 19 nt, Artificial Sequence
  Description of Artificial Sequence: Synthetic oligonucleotide
  Sense strand starting at position 1089 of SEQ ID NO: 318726
gcgcguccugcugauucau

SEQ ID NO: 584748 - RNA, 19 nt, Artificial Sequence
  Description of Artificial Sequence: Synthetic oligonucleotide
  Antisense strand to SEQ ID NO: 584747
augaaucagcaggacgcgc

SEQ ID NO: 584749 - RNA, 19 nt, Artificial Sequence
  Description of Artificial Sequence: Synthetic oligonucleotide
  Sense strand starting at position 2211 of SEQ ID NO: 318726
gcaaaucgcugggcugaaa

SEQ ID NO: 584750 - RNA, 19 nt, Artificial Sequence
  Description of Artificial Sequence: Synthetic oligonucleotide
  Antisense strand to SEQ ID NO: 584749
uuucagcccagcgauuugc

SEQ ID NO: 584751 - RNA, 19 nt, Artificial Sequence
  Description of Artificial Sequence: Synthetic oligonucleotide
  Sense strand starting at position 2214 of SEQ ID NO: 318726
aaucgcugggcugaaacau

SEQ ID NO: 584752 - RNA, 19 nt, Artificial Sequence
  Description of Artificial Sequence: Synthetic oligonucleotide
  Antisense strand to SEQ ID NO: 584751
auguuucagcccagcgauu

SEQ ID NO: 584753 - RNA, 19 nt, Artificial Sequence
  Description of Artificial Sequence: Synthetic oligonucleotide
  Sense strand starting at position 2284 of SEQ ID NO: 318726
cccgguggguugugagaau

SEQ ID NO: 584754 - RNA, 19 nt, Artificial Sequence
  Description of Artificial Sequence: Synthetic oligonucleotide
  Antisense strand to SEQ ID NO: 584753
auucucacaacccaccggg

SEQ ID NO: 584755 - RNA, 19 nt, Artificial Sequence
  Description of Artificial Sequence: Synthetic oligonucleotide
  Sense strand starting at position 2432 of SEQ ID NO: 318726
cucagcuucucuuugaagu

SEQ ID NO: 584756 - RNA, 19 nt, Artificial Sequence
  Description of Artificial Sequence: Synthetic oligonucleotide
  Antisense strand to SEQ ID NO: 584755
acuucaaagagaagcugag

SEQ ID NO: 584757 - RNA, 19 nt, Artificial Sequence
  Description of Artificial Sequence: Synthetic oligonucleotide
  Sense strand starting at position 2443 of SEQ ID NO: 318726
uuugaaguccgagaaguga

SEQ ID NO: 584758 - RNA, 19 nt, Artificial Sequence
  Description of Artificial Sequence: Synthetic oligonucleotide
  Antisense strand to SEQ ID NO: 584757
ucacuucucggacuucaaa

SEQ ID NO: 584759 - RNA, 19 nt, Artificial Sequence
  Description of Artificial Sequence: Synthetic oligonucleotide
  Sense strand starting at position 3163 of SEQ ID NO: 318726
cagacacaccuuugugagu

SEQ ID NO: 584760 - RNA, 19 nt, Artificial Sequence
  Description of Artificial Sequence: Synthetic oligonucleotide
  Antisense strand to SEQ ID NO: 584759
acucacaaaggugugucug

SEQ ID NO: 584761 - RNA, 19 nt, Artificial Sequence
  Description of Artificial Sequence: Synthetic oligonucleotide
  Sense strand starting at position 3164 of SEQ ID NO: 318726
agacacaccuuugugagua

SEQ ID NO: 584762 - RNA, 19 nt, Artificial Sequence
  Description of Artificial Sequence: Synthetic oligonucleotide
  Antisense strand to SEQ ID NO: 584761
uacucacaaaggugugucu

SEQ ID NO: 584763 - RNA, 19 nt, Artificial Sequence
  Description of Artificial Sequence: Synthetic oligonucleotide
  Sense strand starting at position 3168 of SEQ ID NO: 318726
acaccuuugugaguacaca

SEQ ID NO: 584764 - RNA, 19 nt, Artificial Sequence
  Description of Artificial Sequence: Synthetic oligonucleotide
  Antisense strand to SEQ ID NO: 584763
uguguacucacaaaggugu

SEQ ID NO: 584765 - RNA, 19 nt, Artificial Sequence
  Description of Artificial Sequence: Synthetic oligonucleotide
  Sense strand starting at position 3527 of SEQ ID NO: 318726
ggacauuguucgcgcucca

SEQ ID NO: 584766 - RNA, 19 nt, Artificial Sequence
  Description of Artificial Sequence: Synthetic oligonucleotide
  Antisense strand to SEQ ID NO: 584765
uggagcgcgaacaaugucc

SEQ ID NO: 584767 - RNA, 19 nt, Artificial Sequence
  Description of Artificial Sequence: Synthetic oligonucleotide
  Sense strand starting at position 3542 of SEQ ID NO: 318726
uccacagagcucggucaaa

SEQ ID NO: 584768 - RNA, 19 nt, Artificial Sequence
  Description of Artificial Sequence: Synthetic oligonucleotide
  Antisense strand to SEQ ID NO: 584767
uuugaccgagcucugugga

SEQ ID NO: 584769 - RNA, 19 nt, Artificial Sequence
  Description of Artificial Sequence: Synthetic oligonucleotide
  Sense strand starting at position 3554 of SEQ ID NO: 318726
ggucaaaucugcuuccaag

SEQ ID NO: 584770 - RNA, 19 nt, Artificial Sequence
  Description of Artificial Sequence: Synthetic oligonucleotide
  Antisense strand to SEQ ID NO: 584769
cuuggaagcagauuugacc

SEQ ID NO: 584771 - RNA, 19 nt, Artificial Sequence
  Description of Artificial Sequence: Synthetic oligonucleotide
  Sense strand starting at position 3579 of SEQ ID NO: 318726
acuuaauuaccgcgucgga

SEQ ID NO: 584772 - RNA, 19 nt, Artificial Sequence
  Description of Artificial Sequence: Synthetic oligonucleotide
  Antisense strand to SEQ ID NO: 584771
uccgacgcgguaauuaagu

SEQ ID NO: 584773 - RNA, 19 nt, Artificial Sequence
  Description of Artificial Sequence: Synthetic oligonucleotide
  Sense strand starting at position 3655 of SEQ ID NO: 318726
gcucccauuguuggagaua

SEQ ID NO: 584774 - RNA, 19 nt, Artificial Sequence
  Description of Artificial Sequence: Synthetic oligonucleotide
  Antisense strand to SEQ ID NO: 584773
uaucuccaacaaugggagc

SEQ ID NO: 584775 - RNA, 19 nt, Artificial Sequence
  Description of Artificial Sequence: Synthetic oligonucleotide
  Sense strand starting at position 3656 of SEQ ID NO: 318726
cucccauuguuggagauaa

SEQ ID NO: 584776 - RNA, 19 nt, Artificial Sequence
  Description of Artificial Sequence: Synthetic oligonucleotide
  Antisense strand to SEQ ID NO: 584775
uuaucuccaacaaugggag

SEQ ID NO: 584777 - RNA, 19 nt, Artificial Sequence
  Description of Artificial Sequence: Synthetic oligonucleotide
  Sense strand starting at position 3676 of SEQ ID NO: 318726
cuguaucuccuuugacacu

SEQ ID NO: 584778 - RNA, 19 nt, Artificial Sequence
  Description of Artificial Sequence: Synthetic oligonucleotide
  Antisense strand to SEQ ID NO: 584777
agugucaaaggagauacag

SEQ ID NO: 584779 - RNA, 19 nt, Artificial Sequence
  Description of Artificial Sequence: Synthetic oligonucleotide
  Sense strand starting at position 3895 of SEQ ID NO: 318726
ugccuuacuuguuaggaaa

SEQ ID NO: 584780 - RNA, 19 nt, Artificial Sequence
  Description of Artificial Sequence: Synthetic oligonucleotide
  Antisense strand to SEQ ID NO: 584779
uuuccuaacaaguaaggca

SEQ ID NO: 584781 - RNA, 19 nt, Artificial Sequence
  Description of Artificial Sequence: Synthetic oligonucleotide
  Sense strand starting at position 3935 of SEQ ID NO: 318726
uguauauccguccaguauu

SEQ ID NO: 584782 - RNA, 19 nt, Artificial Sequence
  Description of Artificial Sequence: Synthetic oligonucleotide
  Antisense strand to SEQ ID NO: 584781
aauacuggacggauauaca

SEQ ID NO: 584783 - RNA, 19 nt, Artificial Sequence
  Description of Artificial Sequence: Synthetic oligonucleotide
  Sense strand starting at position 3965 of SEQ ID NO: 318726
uuccuccaugucuaggaaa

SEQ ID NO: 584784 - RNA, 19 nt, Artificial Sequence
  Description of Artificial Sequence: Synthetic oligonucleotide
  Antisense strand to SEQ ID NO: 584783
uuuccuagacauggaggaa

SEQ ID NO: 584785 - DNA, 4001 bp, Homo sapiens
gtagtctccactttccagtcctcctgacctccaggaatgaacataagaagggggctgacttaccctaagctcagccagatgtccctggtctccaggtctgggtccagccctgccttggggtcaccatcaaagtaggagatccagagcctttcctcagggatcccatagacctgagtcagcagttcccaggccatgttacaagcctcctcctgcagcagaaaccagcatggggtggggggggaagacgggtgagagggagaccccactgaagtaatcaagccacatgagtttagctcccgacttaagacaaaagcatttctgctgccatcttgttcccagaataagccatgaaccattactgcctctgagtgttttcctgcccagaaagcttcccccttcttctaagtcctatcttctttcaagtcccagaccaagtcccactttcacatgaaattctctgcctactctagcctagagtgatctttaactccagtaagcaccttagcattgctgtttgaccatttattcaaacaacaatttttgagtgatcattaggcagaaagtacagtctctgcccttcagggacttacaatccaatcagggaggtgaggtaattcctgttacaccggctcaactagcactttgcctccacatctggtatgaggccctgcctaagcagacagtacaatggaaacaggacaaattgactcccttcttggctgatcactgatccccagagactcaccttaaaatattcacccccaaaggcccaattgccaagcatttcaaagaaggtatgatgggaaaggtctcgacccacatcttccaggtcgttatggtgtcctccagctctcacacatttctggctgttggccacacgtcggaagcctgccatctcgcttcgtggatccacggtgcccagaaagattggcttgaactggaagcacatagagtggggagggggagagggatatccaatttctcagtagaagggaaatgtggggagtgaggatagggatggctgttcagaccgaaggctgactgtgcccctgagagtgcagtgtaatcttggtctatgaggacaaactgggagcctcgggacagccatctctggtgtgtggggagcagagaagaggtaaacaaatcatgaaccggagaccctctgcctagtaaaataggcaaggtaaaagaaggaggaatgtgttgggagctggaaatgggacgctgaaaggtggcatcctccgtctcagcttcttcaaccacacccaataacttcagggaacaaaactgagactcatttagtagggagcccagacggcctctaaggttaacttatgccgcccctattttacagatgaggacaatgaagtctagaaaagatgagtggttgataaaaaccaaaaccttagagaatagtactcagcaaacaataggtgatcaataaacatttaatgaaagcgttatctttatttaaataacgaataaatgaaatcagacttctccctcgggattccactccagccatttctggacctaatactcaatcccaatccagaagttcccagctcaagccctccccaagccctccctatactctgagcgccgtacccccatcactttacccaaccaagcaccgccctctttccccaaaagctacgaactccgcctctcgcttcttttgcccaatcctgcagcgtctttctcaccagaaaactcacgaactccgctccctatcagtatggttcggccctcacctggttcatgcccgcattgacaaaaagcaaactggggtcgccgcggggccgcacggaagcggagggcaccagccggtggccatggcggtcccgaaagaagttcagaaaggcggccctcacggccgaggccttggctgcagggggctccgatgagagcggccgatggctgaggccccgccatgcgggcgaccttcgaatggcccgccgcagcctccgggctgcagctgccactgacgctgccatcgtagctccgggcagtgactttacgtggtcaaagagtgacgagggaaggaagccaggcgtttcctacagcggcccctggcggtaggaggactcagggggcggcctctgccgccggggtggaagcgatcgattgggtcgctggcagagtctagcacagcgcccggcacatagtaggctcttaattcattcggcattaagcaaatattcattgagagcctactatgtgctaggcattgttttgggcttttagggtacaaaattgacaaaatgccctgcccactgaaatccgtattctagcagtaattgctgttgtgcttattagttttgcaaagttacagatggggttgcaataaacaggtgtggattcaacttcgtgtgtgtgtgtgtgtgtgtgtgtgtgtgttttgtgtgtgtttttccaggctgagggaagaaggcagagagtgacaggggagtatcagcattcattcaagaggtattcaacaaatatttattgaagacctagtatgtgctaggcactgttctaggcatttgccagtttccttggaccttggcatcagacacggccatttttgcccgtgaagcaggagtctataggagaacacagaagccaaacagcatctgctatattattaattgcctaacatttggtcttctcatttgcctggggatcagagagaatccaggtcgtcaaggcaggaggaagctgttggctaatagctgcagagatttcactctctaagccttctaatgccctaaggttttgtgtgttttcgtttaggataagagatatacctgttctacctctcccttctgtctttccatagtaacagctgtgaccctgaagccaacaggcccttgtggatgcaatcagggtgctcatggggcttctcatgatgcccttggcttgggaaattaaacagattgggaagacagaagagaatctgccaaagctaaaactcaatagaggttccagagctgaggtcagtgtaataaccgagaaggccttagccatcagggtggtctcttttagccacgattctgtgtgtgttaagttatttggggtctttgtatacatagtttctctgcggaatctacattggacttgaatttctatagtgatagtaaattcttaactttgtgttctgacagcacctataactcctattccatgatcccctttttctccctttgcccacatagattaaaggtgttgttttgaaagtgtgtttggcctgttttggtttttccagtgtttctggaacagaaagctaaagccagctggggatttctgtgtgattaatgacttttttatttttttgagatggggtttcactcttgttgtgctggcgtgcaatagcacaatctcggctctctgcaacctctgtctcccgggttcaagcaattatcctgccttagcctcctgagtagctgggattacaggcatgcatcaccacgcccggctaattttgtatttttagtagagatggggtttctccatgttggtcaggctggtcttgaactcccgacctcagctgacctgcctacctcagccttccgaagtgctgggattacaggcatgcaccactgcgcccagctgagattgatgatctttagacaagactgtgaaattatttcccaaactgagatgggagtgttttgccatacaaacctggcagggcctctactcagtactgacatcaactttttttttttcagattttgcccagaaagtcattgtgttacattagaaactccaaacatggatctagtgtggagccatataatttttttaaaacagctttattgaaatataatttacatgctatacaattcgcccatttaaataaagtatacagttcaatgccttttagtatatttacatagagttgcccatccatcaccacaatcacttttagaacattttcattacttccaaataaaaccccaaatcctttagccattaacccccaatcgtctcatccttcctagcccttggcaacc

SEQ ID NO: 584786 - DNA, 4001 bp, Homo sapiens
aaggctgaggtgagaggttgctggagcccaggaggttgaggctgcagtgaactgtgattgcaccactgtacttcagcctgggcaacagagggagacgctgcctcaaaaaacaaaacaacaataacaatcccccctcccccccgccacacacacacacacacacacacacacacacacacacaagaaagaaaagaaagaaagaaaagaaagaaggaaaagaaaaaaatatatatatttcctaagatgtggggacccaagaaagaacactgggcccttggaggcataaactggccccaagttggccatcaaccagcctcatcaccccttcaagtctcttttcctctctgaatctcactttcctcaccagtatggtgagcagtgagtctcaagttaaagccttctgaggccctttcctgtcttagattctcgatctctctaacccttctcagcaacacacacaaggctgataagtgaagtgaagcacaatttctattgatcacatgatggtctttcttgctttcccagggggcggatgaatcccttccttggataggagaagctgtgtatccgcttggtctgggaggaatcctgatttgtttcttacacagagacaaaagtctagaagggtttaatcacctagcatagacagccttctcagaagagcagctattaaaaattggcacagtcttttgggaactcagtctaatgagaaagcaagaaagacctcttggatagagacacttccccccatcagactaggaactcccaaaggcagagaccacaccgtcctcctatcttctcggcagccagaatgagactaactttagtcatctctagccatacaagaactaaatacaaaatcaagttgagtttagcatccacaccttatagcccttaattggggaaggcttaatgtttgattttgctcttcttgtctatctactgcttcctcttcagctgagcctaggtatgcttttcttaatctggaaacactaaggtttcatgggttgcagtggtgagaaactgagcctacaacttaaacacatcatcgcttttggctaaaaacgttgttcccccaattctgcctccaattcatgacagctgagtccgggtagctgaaaatggacaattctgatgatttctgatactcatcggacctttaaaaacatgccaggcgctgcactatatgcttaaattcattatctcatttaaacctcccaacaatgagactcagagaaggcaggtacttgcccaagaacagccacattgctgctaagtagcaatgcttagattttattctacttctgccctactccagagacctcgctattctggtgacactgccggaagatgtaggccgcgggtgagatctgcaggcacacatggacagatgccttgcgcccgtctctacccacctcggggtgcccaagtaacaggcactgagcacggcgaggagcgcgtggggcagggcgctgagcaccagctgggtgaagcagtggcctgtggtgtccccctcccacagcgggagcggccacgctgcgctgctgccgcacagctgggccagaagtcgttccatggacgcctcacctgaagggaaagttgagggtgacggctgtgcagggtaacagccggctttgcctgcacttcccagccgggtctccctgtctccagccccgccctggaaccgggaccgcccgtcgcttccgccccgaagccagaccccgcccattctcgcggtaccaagggtaaaaacgggaggaggtttccccagtggatttctggacgctggtcacccaccttgccatctgtttttcccctcccgtttctccgcccccaggcatccggaacctcaaacctgaagaagctgctgtgcaccggattccgatatcctgagaactggtgtatgcaaaaaaaaaaaaagtactgcccggccggggtgctgggcccgccccggctggcaccccacctagaggttggaagacctagccggcgctattcgccacgcccatatgctggtagctgcacgcatgtgcactgctctctgcttcggctggcctttgcacgcaggcgcgctggtgcagacgcacagttgcgttttggtacgcttttgtggcctgacttgcgttaaggatccatccctcccttagtgcaacgtcatttataacctctcacgtggagtattcgctcacaactgtgtaagcttactagttggcacaagcattgcaatctccatttcttgaagaggtggggagccgggcacggttgcgcgcctcggtagtccctgcgcgcccgtagtctctgcgcgccggtagatcccaggaggatggcctgagcccaggagttcgagaacagtccaagcagcatagcgagaccccagtctcagatagatagatggatggatggaaattcaaacatacctgccccacggacaaataatgccattttgggacacactgttttcccttattattctagggctgcatgaccttggacaagttacctaacttttttgagcctcaacttttttttgggggggggacggagtctcgctctgtcaccaggctggagtgcagtggcacaatctcggttcactgcaacctccgcctcccgggttaaagcgattctcctgcctcagcctcccgagtagctgggactacaggcgcgcgcaaccacgcccagccaatttttttgttcgtatttttagtagagacggggtttcaccatgttggcaaggatggtctcgatctcctgacctcgtgatccgtccgccttggccttccgaagagccgggattacaggcgtgagccaccaccccggccgagcctcaacttctttatttgtacaacagggacaataccaatactaaagtactgttgagagagttgaataattaatttagagtgcttagggcaagtgctttgcctagggtagtcctccaataaatcttttaaggaagcagtgggaagaacataacctttataattatacggacctgggtttgaatgcttttagcagagggatgttgggcaggttacttctgcatctttattttattatgtttgtcaggcatggtgttggtatccgcctttacataggtgtgtacagtgcttgaagaagaaaagctaaacaaatgacaattatggttatcccacttaatctcagtaagaagccccatatccctcaacgtcaagaattaattttcctatttttaaaaactaagagatgtaggtttgcatttcacaatctttagtaattaattaacagagtcttgctacctggcccaggctggtcttgaactcctggcctcaggtgatgcgcttgccttggcctcccaaagtgctgggattataggtgtgagccactgcacctggccaggctccacttctaattctaattcacttgctgtttccatcacatctgcagttacttcctccactgatgtcttgaaggtccatccgtgaaggttggaatcagcttcttccaaacttctgttaatgttgatatacgttgtcctcctcccatgaatcccatgaatcacagttttttatttatttatttatttatttttattgatcattcttgggtgtttctcgcagaaggggatttggcagggtcataagacaatagtggagggaaggtcagcagataaacaagtgaacaaaggtctctggttttcctaggcagaggaccctgcggccttccgcagtgtttgtgtccctgggtacttgagattagggagtggtgatgactcttaacgagcatgctgccatcaagcatctgtttaacaaagcacttgcaccgcccttaatccatttaaccctcagcggacacagcacatgtttcagagagcagggggttgggggtaaggtcatatattaacagcattccaaggcagaagaatttttcttagtacagaacaaaatggagtctcctatgtctacttctttctacacagacacagcaacaatctgatttctctatcttttccccacatttccccc

SEQ ID NO: 584787 - DNA, 4001 bp, Homo sapiens
tgggtcccagctctggccctaaagacctgtttggagccagacagatgacttcctacctcccagggtggccacatgtattcagagcttactttgtgactggcactacactaagcattatctcatgagatccttacaactctacaaggtaagctactactattctcactttacagatgaggaaggggaagcccaaataggttaagtgacttgtctgaagtgattgaaccagtaagtgtagagccaggatttgaacccaggtctacctttctccagtctcagctcttaactttgaggtcactctcactccctcaggtagtgtgcatgggaagacctggggacctgggctgggtggggtctccagatagctgagggaccccaagtacccgctcaccttaacccgcgcatccttgtgctgtagcatttcctggttgctggccatgatgcgggtggcaatcactttgttgacgggtaccagcagcagtgccaagatgagaccacccacgaaggccacgcctacctgctggtacagcaggtagagggtgatggccagttgcaggggcaggccccaggcttcatggaagctcccagcaaagttaagcagccgttcagagtcagtgcctagtaggttcagggcctccccagtaggagggcggctgggccccagctgtaaagccttgcagtacaggatgttcagcacagccccccgtgcctgaagtgttaccttatatacctcatacccatactgattctgcagcacagcacccagcacagccccaccggctagccccagagcatagagcaggccgtggcttagtggctcctgcccctcttccaggaagcccaccagtagggagagcaacaggggccctgagaatcccaacatggtccccaccagcttcagcagtccaagtgccagatagcaccgtccaaaggccccatacaaggccctccacagccgtgccccctcctgccagtgtgcctggaagacacgagccaggtaggttggctgcagtctgtgggggaggcggcaaatgtcctgaggctgccggagctctccacaggccccacgggccagcaagggtgccagccaggcataggaaaagcgtgacagccaactctccccatcttcagccacctcaggttcttgatcctcgggcaggaggggctcctgagcccagggttctcgtggtcccccaggagctgcccatcccagtgcataggccaagagtgcagccagctgcaggatgagcaagcataggcgggccatgggccctgggagaagtgggggcagaagtgtgcctcgctggcaatgccacaacacggtcagcactagggctggagctggcagcaaggctaccagggccaaggccaagggaccccgggagtggccatgaggggaatgtgccaacacccacagggccaggctgtggctgatccaggccacagctgccacgcaccctgccaacacctctagccctatgggtcctgggcctgcccctggtggcaaagcaactggaagaaggtctagcagcgggaagacggaaagcaggaaggaagctgcaagtcggaggcgccatccaggactgcagggtaggatgtaatctggactcctggggacaagggggaagacaaggaggcacatcgtggctgactcaggagccagacatacccctcacctccaataattcacttacctaaggaatcaactcccttcctgccttgcacatcttatccctactccactttacctcagaacccagggtcttttctcccaggaagtcttcccagatgaacctaactcattttctgaccaactgagctaaccggccacctgaacctaactcattttctaaactacccacaccatttctgattcatgtttttttttaaaccacagacattaacaattttgaggtaagattgtacttaacatgaagactaactaggaaaaaaaaaatcctgggtactacgtttgctactttggtgatgggatcattagaagcccaaacttcagcatcacataatatatccatgtataataacaaacaagcacatatgcctcatgaatctaaaattttaaaaaaaatccaggctgggcgccgtggctcacgcctgtaatcctagcactttgggaggctgagacgggaggatcgcctgaggttaggagttcgagaccagcctggccaacatggtgaaacccccatctttaccaaaaatgcaaaaattagccaggcatggtggcaggcacctgcaatcccagctactcaggaggctgaggcaggagaatcgcttgaatctgggagatggaggttgcagtgagctgagatcacgccaatgcactccagcctgggtgacaggggaagactccgtctcaggaaaaaaaagaaaatccaaagttttcatgcagataactgataaagggtacatattcatttttacaaaaggatccacctaacagtacccttaaattcacctgaagcactattaaatgaataaaaatcggacttacatacagcttttatattctaatatggtagcctaaactttataaaggcttggaatattctactctctttccactgattatagaaggtggtgtggattgcttttgcgactcctttagctaaagaaaaatatctctttttgcttgtgtttatatcttcttggcataaaaaaatgtttttaataaacaaaaggtgatctgtctgcattaagaatcaaatacaggggctggtcacagtggcttatgcccgtaatcccagcactttgggaggctgaagcaggcagatcacttgagatcagcagtttgagaccagcctggccaacatggtaaaacccggtctctaataaaaatacaaaaattagcagggaatggtggcacacacctgtaatcccagctactttgggacactgaggcacgagaatcgcttgaacctgggaggcggaggttgcagtgagctgagatcgtgccactgtactccagcctgggtgacaaagagagactctgtccaaaaaaaaaaaaaagaatcaaatacaggaaaacgtatctgcagcagtgagtatcaggatgtcttgaaagttcatacaaaaagaggactgagtctgttacaccctttgtggcacggctaggttactaaaaaagtttacttgtaagctaaaatgcagagtcttgctctgtcgccaggctggagcgcaatggcgtgatctcagctcgctgcaacctccgcctcccaggttcaagcgattcccctgcctcagcctcccgagtagctgggggttttcttaaaagtccacctgatgacagttatttgtagggatttagatgggaataaaaaatcagcctttaagaattctatttctgggctgggcatggtggctcaagcctgtaatcccagcactttgggaggcagaggcaggtggatcacttgaggccaggagttcaagaccagcctgtgtaacacagtgaaactccatctctagtaaaaatacgaaaactggccaggcatggtggcacatgcctgtagtctcagctactctggaggctaaggcaggagaatcgcttgaacccaagaggtggaggttgcagtgggccgagatcgtgccactgctctccagcctgggtgacagagtaagaccctgtctcaaagaaaaaaaaaatttttttctatttctggctgggcatggtggctcacatttgtaaacccagaactttaggaggctgaggcagaaggattgcttgagcccaagagttcaagaccagcctggacaacaaagcaaggccttgtctctactaaaaataattttttctttttgagacagagtctcgctttgtcgtccaggctggagtgcagtggtgcaatcttggcgcaccacaacctctgcctcctgggttcaagcgattcaagatggggtttcaccatgttgaccaggctggtttcaaactcctgacctccagtgatctgcctgtctcagcctcccaaagtgctgggattacaggcatg

SEQ ID NO: 584788 - DNA, 4001 bp, Homo sapiens
gccatttccttttagaaatcctcagaaacgcctaactcagcattcagaagttcaccttatctctttccacttcttactctcctgtccattactgctttcagttaatagtctactagtcactgggttacttaagtgtcaaccttacttctcccttcatttaatcagttctcagttccgatcaatgccgcctccttagtaactctttattcttcaggccttggcttatccccttaccacttctcacctagatcatggccagagccccctaaatggtctccccgcctccatcttgaccagttcaaggccattcattctccattgctcagtgctacaggtgaactgttcataatcattccttatgcacttcaatgggccttccttcttaatgtctttaggattaaactcctcggaatggcatctaaagcctttcattatctgtctcctgagcatctttctgacttcatcacactagtcaccaggctctagtgggaccagtcaggcttgcctacatctctaccttccacaaacttccttggcttggaatgcgcttccccttgctaattcacgatgatctttcaagaataaactctggggagcagatgtagtggctcacgcctgtaatcccagcacttttggaggctgaggcaggagaattacttgagcccaggagtttgagaccagcctaggcaacatagccagatcttgtgtctacaaaaaattttaaaaataaggtgtggtggtgcatgccagtagtctcaactacttgggagactgaggcaggaagatcctttaaacccaggaggtggaggctgcagtgagccatgttcatgccactgcactccagcctgggtgatggagctacaatgtgcctcaaaaaaaaatactcagctattacatattcttgggaggctttgctgacactcccttacctgtctgagtagatgctcctcctctcttctacagtcccataacattcttaagcaccttcatcatactctgacaaccactgtctgtctggttaatgctctgacccttcaccatactgggttgtcccttgagggaaagtcttatcttttatctctacattcccacttcctccacacagtacctggtatacagtaggcatccaataagtgcttttaaaattagttactgtgtacctactggggttagttgtgtccatttatgtcccccttaaaactgacttcaaccctgggaggatatcttcatgtttttttccttcccctctcaaagcacagtatatagagtgcttaattaaaaacaagcgcttaacaaactttcgctgctttttaagtaaaccttaaccctcattccaacatcaaaaatctacactcttgctccagttgagtgagaggggtgtcttaagaaagaaaccatgaaggagtcaccctctcttgagaaacaagggggatcacaggctcccaaggtgtgtgtatgcgcgcgcagggggaaggggaggtcgaggcagggctcatatattcctggtggaatacagtgtatggtggggcggatgtccaaattttttaagcaaggttttcccatttctccccatctctccctcggtgccatatgctctttcttttatctcgcccagtctcacttaggtcacgtgcgacatctggatctctttcctttaaccccgattccaaacccactcctccccggcaaactcctcccgggcccacggcacgcatgcgcagtaactcccgcaggggcccggtcagtctcgtgccccatgaccctctcttaaaacacgcgcagtctcctctctcttccccctctgctcgtttcttccttgcctaccagcctcacctgatgggctcgtgctctctccgtccccgatccactcgggctccggcggctgctgcttgggcgccttcggcatcgcggtggcagttacagctactgtggcggcgcccggtgctatttccgcttccggcggcggggaaccccgatggggctggctctccaagctggcgcggccaaccccgcccccgggctgcgcacgtgcgagcttcgccgtcatctcgggggcgtggccctggttcagtggaggcgtggcctgcaatgacggagcggggccggcgtccgcttgctccagtcgcgtaaacacatggcgtttacgactgtctgggaagcctgacgccgtgacctcccgacgccgcgagactcaaggaatgaacataataatttcctactagtatgaaggagttgaggcatactgtttttttgtttgttttgttttttgtttttttaaaaagcatattctagtttctatctgtaactcgtttctagttctgccaccgcgatgccgaaggcgcccaagcagcagctgccggagcccgagtggatcggggacggagagaacacgagcccatcaggtgaggctggtaggcaaggaagacacgagaggaaggggaagagagaggagactgcgcgtgttttaggagagggtcatggggcgcgagactgactgggtcatgggcagaaaagacagtgcagaccaatggctaagggagaggtctgatcggtccagtgttgaaatgtgtcacaaaatcccgaagtgtacaattgtaaacagggaactggagcccaacatgcagaagtcacggtgcagtggagcttcggttcatttattttttttggtaacagctttactgagatataattgacatacaataaactgtacacaaaataaaatggcacccaaaataaactgcaaagtatcacttaaataagttttgacctgcataaacccagtaaactatcaccacaatcaagactttggttcacttctaactctaccacttaatatgggagcttgagcaaggtgctcctgtagttctgtcagctctcaaaccactacaatcatgcttttgttgccaccattgtctgaattcacacttgccaaagtcaacagatctggggccatcctactcactctcccatcaatgtttgatagacttggtcgctccctccctcctttgttttcttcagggacactactctctataggtttcctttgcatctaatgggcttctcctgaagtctaaatgttgaagtgcctcagggctaaatctttgacactctccttaatctagacttatcacctatcacctcctgactttaaataccatctataaccaatgaagattcccaaacttctcttgctggcccccaacttctgccccgagctccaggctcatgaattcaactgcttatgggacatcttctctgagatctttaataaatctctctcatacgtacaaaatggagctcttgttcttactcctaaagcctgtctcttccaggcttccccatcaagaaattgcaccacaggtcattcagttatttgggccaaaactgaaaggtcatcatcctctttctccattcctcctcccctaatcaatccatcagccagctaagtctgcctcattttttcattcatctgttcaacaaatatatttattgagtgtatagtatgtgccaggcactcttctacgctcttgggatactactgaataaaataaagatctctgattaggtttccagcaggggagatgatcctatagataaaagaaaatatggatcaagtttaaaagtatcaagaggacagattttagtcttaaatgaggcctcagtaaagtgaaattcaagcaaatcattaaagaagattagttttggccacatggatttccaggagaagggcctttctagcataagaaacagctggagtaaagccctgtgacaggagtgttcggacatacatggggaacaaacaggaaggaggcaagaggggctggagtggcacgagtgagccagagttgtgggaaaggtgaaaagagaagtaaagcagggtctggattgggaaaggtcttttaaattatcttaaggattttggcttcttctgttgatttaaatggaagtcactgcagagttctgagcagagtgatgtgatccaacctacattttaaaaggat

SEQ ID NO: 584789 - DNA, 4001 bp, Homo sapiens
tcagctcctcttcccagttcagccccaacctccaccccacactccctgtttggaacagccataccctaagaggaagaagatgcctgatggaagagggaagccaagccatcttcacaggtcccctctcctctttagggagctggctcatctgccaacaacctgcccatttgctaccccaccacctttgaaaccacactgacctttcctgtacaagtagaagaaggcgaagggagaggagtaataagagatggaccagaatactgaagcctgcagcagagagacagggacaggcaatcaatacacacacacacacacacctgccattccaggcatatactatacactctgagcaagatggacaacctgagggatatcatatcatatttggtgtatgacaccatgaatacagtaggtgctcagtatttgttgaaaagtagtgtgtcaatgtaatggaggctgggaaaatttggtacaggctctattttcttcctctggaattatggaagaattatgtcttccatctccagacataattccatcacatttaaaggcagtctctctgtctactcaagttaatcaagccttttcaattggccctgctcaggacagcccctggcctggtccccaagagatgcgcaaacgtcaccacaggaactgtgccagaaagaacagctgtccctgcagccaaagaggttagttgccagggaggacaggtcactggggaactgcaggacttagcacctgcagatggtcccaagagtaaacatgttttccttacggctcaggttgcccccagagaaagcagtgctacataccaaaggggagtgccaagtatgcacatttagagtgtgcctgtgtgtctgtgttggagaggtctgctgcagagcccagggcatcccccaaccccagggcactgttgctcccaagttagggagggctaagttcaagaggacaggtgggtctgaaagatgcagagtcccagatgccagggtagacataccagtgccaggatgctgtcagcatgtttctccagggcacggggctgatagtacgtatcctgccaaaacagatggcctccttaaggaccctgcccactggcaggtcctttcccttccctttcagaagccctgctgtgtgtcctctggttctagtctcgttgactatctctcttgaaacatccctggcccccacagaaactcctcttcctcaccctcactctgaacctaatttcccacccctgaccatgggaacaaacacagggagctggatttggaagcaaaagtgaaagcagcattggacgatttttgctccttttccacagcctagtttcaaatggattgcaggcgcgtgcatgtggggagaagggttagtttgagaagaaagaaaagacacctagacaatctaagaaggaaagaaaagcatcagaaataagagtagttgactaagaagagaatgtgggtaggagcgggcagtttgtaggagacagtaacacaatgagacaactgataaaaaggaagagaatatttagaacagcctaccaccacccgccagctctccagaatacaatgactcgggtctccaggctaggttgggcgggggttgaggggaggaccgacggatacaggatctgtaaaagtcattctgaaattcaaggcgagggtaaagggaagataaaaacagagccgggggaggcatgaagaggcactgaagaagaggaaactgggagtctgacagcaaaattcaacggctccccagtccgcgcagggtctcttcccgggactcaagactcaactgggaccggcacgaaccacgacacacagggtcggggggacgcggagaggaaagaacaaagagtggcagtcggaatgagaaagcggtaaagagcgaaaaagaaaggaggcggccagtccgtaggcgtgactttaactcaggaagcacacagagcgcagattttgcggataactggcttgacaagcaggctccccttatttcccattatgggcacttctggggagcaaaaggccgtaaagggtttggactgtaccacgttcttcggtggggaggaactcgactcacccaggagctggaatggggggcagtgactgccgttggcgtctcagggacgctggccggggccctttcagagtccctctcccggtagattttgtagagccgggggcctaggacgcagctcagcagcttcgccatggccccggctcgggccgctgctcttccagcagcaggtccccctgccggccccgccctccctgcctctgaggtgttgtgtgcccttgacgtcagcccgtaccggctccgcctccgggcgagttgcgacattttcagtgcttcctgagaagagtttcgcgcagttggagctacgggtacagcagtggtccgaaactagtggaagaccactagaacgcggagaatcagaaaattaccgggcatggttcaataatttttttctgtctcattattggcagactctagagcgacagcggaaacgaggggtgagattaggagtacttgataagagtaaccgaaaacataaggtgtctaggaatgtatctagtacaagaaatgcaaggttttatgaagaaaactataaaaagttattgaaaaggcaaactggcccggcccggcgcagtggctcacgcctgtagtcctagcactttgggaggccgaggcggggggatcacttgaggccaggagttcgagaccagcctggccaacatggtgaaaccccatctctactaaaaatacaaaaattagcctggcatgggtggtgcgcgcctgtaatcccagctactcgggaggccgagacgcgagaatcgcttgaacgcgggaggcagaggttgcagtgagccgagatcttcccactgcacttcagccttggtgacagagcaagactctgtctctaaataaataaataaaggtaaactggcccagcgcggtggctcacgcctgtaattccaacactttgggtggccgagggatgattgcttgcgtccaggagttccaggccatggctcatgcctgtaattccaacacttggggtggctgagagaggattgcttgcgccctggagttccaagccagcccaggcaacatagtgagaccccatctctacacaaaataccaagggggaaaaaaaaaagacctagcagggtgtggtggtgcccacctgtagtcccagctacttgggaggccaaggtgggagggtcgcttgagcccgggagtttgagatcgctccatgcactccagcctgggtgacagagccagaccctgcctcaaaataataacaataataattgaaaaaataaaaaaagaaagaggtaaacgaaaagcttttcaataaatggaaagctacaccatggtcctggatacgaaaattcagcacagtaagatatgcggaatatttgtaaaaagaaaataaatgaatcattactgttatgcatgaactggatcttaaaaccatgatgctgagtgaaaatagaaagccacagaagaatgtatacgtgatactagtatattagattcaaaaacacataaaatttaatgataaagcaagtggagaagaaagagaaaattcagaattgtggttacacagcatagaggatctctgactgaaacggaatattctttttttctgtttttttttttttttttttttgagacagggtctagctctttcacccaggctggagcacagtggcacaatcacggctcactgccctgatcctccacctgctgggctcaaccatctttctgcctcaacctcctgagtagctgggactataggcccacaccaccatactcggctaattttacaaggtctcaccatgttgcccaggctggtctcgaactcctgggctcaagtgaacctcctgctttggcctcacagagtgctgggattacaggcatgagccactgtgcctggcctggaatattctatttctttttcttttttttttttcgagaccgagtttcgctcttattgc

SEQ ID NO: 584790 - DNA, 4001 bp, Homo sapiens
caggcaatcaatacacacacacacacacacctgccattccaggcatatactatacactctgagcaagatggacaacctgagggatatcatatcatatttggtgtatgacaccatgaatacagtaggtgctcagtatttgttgaaaagtagtgtgtcaatgtaatggaggctgggaaaatttggtacaggctctattttcttcctctggaattatggaagaattatgtcttccatctccagacataattccatcacatttaaaggcagtctctctgtctactcaagttaatcaagccttttcaattggccctgctcaggacagcccctggcctggtccccaagagatgcgcaaacgtcaccacaggaactgtgccagaaagaacagctgtccctgcagccaaagaggttagttgccagggaggacaggtcactggggaactgcaggacttagcacctgcagatggtcccaagagtaaacatgttttccttacggctcaggttgcccccagagaaagcagtgctacataccaaaggggagtgccaagtatgcacatttagagtgtgcctgtgtgtctgtgttggagaggtctgctgcagagcccagggcatcccccaaccccagggcactgttgctcccaagttagggagggctaagttcaagaggacaggtgggtctgaaagatgcagagtcccagatgccagggtagacataccagtgccaggatgctgtcagcatgtttctccagggcacggggctgatagtacgtatcctgccaaaacagatggcctccttaaggaccctgcccactggcaggtcctttcccttccctttcagaagccctgctgtgtgtcctctggttctagtctcgttgactatctctcttgaaacatccctggcccccacagaaactcctcttcctcaccctcactctgaacctaatttcccacccctgaccatgggaacaaacacagggagctggatttggaagcaaaagtgaaagcagcattggacgatttttgctccttttccacagcctagtttcaaatggattgcaggcgcgtgcatgtggggagaagggttagtttgagaagaaagaaaagacacctagacaatctaagaaggaaagaaaagcatcagaaataagagtagttgactaagaagagaatgtgggtaggagcgggcagtttgtaggagacagtaacacaatgagacaactgataaaaaggaagagaatatttagaacagcctaccaccacccgccagctctccagaatacaatgactcgggtctccaggctaggttgggcgggggttgaggggaggaccgacggatacaggatctgtaaaagtcattctgaaattcaaggcgagggtaaagggaagataaaaacagagccgggggaggcatgaagaggcactgaagaagaggaaactgggagtctgacagcaaaattcaacggctccccagtccgcgcagggtctcttcccgggactcaagactcaactgggaccggcacgaaccacgacacacagggtcggggggacgcggagaggaaagaacaaagagtggcagtcggaatgagaaagcggtaaagagcgaaaaagaaaggaggcggccagtccgtaggcgtgactttaactcaggaagcacacagagcgcagattttgcggataactggcttgacaagcaggctccccttatttcccattatgggcacttctggggagcaaaaggccgtaaagggtttggactgtaccacgttcttcggtggggaggaactcgactcacccaggagctggaatggggggcagtgactgccgttggcgtctcagggacgctggccggggccctttcagagtccctctcccggtagattttgtagagccgggggcctaggacgcagctcagcagcttcgccatggccccggctcgggccgctgctcttccagcagcaggtccccctgccggccccgccctccctgcctctgaggtgttgtgtgcccttgacgtcagcccgtaccggctccgcctccgggcgagttgcgacattttcagtgcttcctgagaagagtttcgcgcagttggagctacgggtacagcagtggtccgaaactagtggaagaccactagaacgcggagaatcagaaaattaccgggcatggttcaataatttttttctgtctcattattggcagactctagagcgacagcggaaacgaggggtgagattaggagtacttgataagagtaaccgaaaacataaggtgtctaggaatgtatctagtacaagaaatgcaaggttttatgaagaaaactataaaaagttattgaaaaggcaaactggcccggcccggcgcagtggctcacgcctgtagtcctagcactttgggaggccgaggcggggggatcacttgaggccaggagttcgagaccagcctggccaacatggtgaaaccccatctctactaaaaatacaaaaattagcctggcatgggtggtgcgcgcctgtaatcccagctactcgggaggccgagacgcgagaatcgcttgaacgcgggaggcagaggttgcagtgagccgagatcttcccactgcacttcagccttggtgacagagcaagactctgtctctaaataaataaataaaggtaaactggcccagcgcggtggctcacgcctgtaattccaacactttgggtggccgagggatgattgcttgcgtccaggagttccaggccatggctcatgcctgtaattccaacacttggggtggctgagagaggattgcttgcgccctggagttccaagccagcccaggcaacatagtgagaccccatctctacacaaaataccaagggggaaaaaaaaaagacctagcagggtgtggtggtgcccacctgtagtcccagctacttgggaggccaaggtgggagggtcgcttgagcccgggagtttgagatcgctccatgcactccagcctgggtgacagagccagaccctgcctcaaaataataacaataataattgaaaaaataaaaaaagaaagaggtaaacgaaaagcttttcaataaatggaaagctacaccatggtcctggatacgaaaattcagcacagtaagatatgcggaatatttgtaaaaagaaaataaatgaatcattactgttatgcatgaactggatcttaaaaccatgatgctgagtgaaaatagaaagccacagaagaatgtatacgtgatactagtatattagattcaaaaacacataaaatttaatgataaagcaagtggagaagaaagagaaaattcagaattgtggttacacagcatagaggatctctgactgaaacggaatattctttttttctgtttttttttttttttttttttgagacagggtctagctctttcacccaggctggagcacagtggcacaatcacggctcactgccctgatcctccacctgctgggctcaaccatctttctgcctcaacctcctgagtagctgggactataggcccacaccaccatactcggctaattttacaaggtctcaccatgttgcccaggctggtctcgaactcctgggctcaagtgaacctcctgctttggcctcacagagtgctgggattacaggcatgagccactgtgcctggcctggaatattctatttctttttcttttttttttttcgagaccgagtttcgctcttattgcccaggctggagtgcaatggcccgatctcggctcaccacaacctctgcctctggggttcaagcgattctcctgcctcagcctcccaagtagctgagattacaggcatgtaccaccatgccctgctaatttttttatttttagtagagatggggtttctccatgttggtcaggctggtcttgaactcctgacctcaggtgatccgcctgtctcatcctcccaaagtggtgggattacaggcatgagcaaccgagtccggcctggaatattctatttatttatttattta

SEQ ID NO: 584791 - DNA, 4001 bp, Homo sapiens
atgctgagctcttaccaaggcagaacacttacaaagcaagaaaggctccctgcccagaccaccataaataggaaaataacaggtttaaaaacaattgctagcatacataatttgacgttttatttatttattatttaggaaggagagggacaaagggggaaaaatacctattgtgacacaatcctttaaagacccatggccttttataataaggacagaatcccaggactgcagagagcaagatgaagaacaatgaagggggcggagggtgaagagaggttgatgggtataaacacagaagaaataagacctggtgttgcattgatcagtggggtgactatagttcacattaatggattgtacacttccaaatggctaaaagcaagttaagttgaatgttcctagcataaagaagagataaatatttagggtgatggatataccaattaccctgatttggttatacgaatgtaacacattctcacgagtaccgtgaaactatgtctaagaaaaaaaaaaagaaaagaacaatgaggagaggtgagaagcagagcaagtctaaagggaagagcttaatggtgagcggctggaccagaagacaggaaaaggctccagggaaggcgaggtagatgacggccaggcactctaattgtcgcagaatcgatttcggctttgtgcgtgggaaacacaaaggaagcggaaagtcggaggactgggcagaacccgaaactcaccaccaatacacactttagaatgtatttaaggaccctcagggcattgttatttttcaaaagtttggaggcaatgcatggagattttctaatatccaaggaaataaagcctactggaataggtatgtccggaatcaggaaccaactttacacactcgggctgggcacgttttcccagcccttcttcgcaatcgcggacaagcagctggtgcgggtcaaagggtgactgggctccttactccctccggtctggggcgcgctcactccatatttggccattctgctaccagcttggggttctgcctggtagaggtcccctaaccccgtgccctgcagcccatcatcacacggtcaccgccggcaccagtgcagggctggggagcgcggggctgggccccccgtggcggggcggcaccgctggcgcccgggaagggccgcgtcccggaagtctttgtctccgcagctcccggcccggcgccgcgggtctgcctcccccgtggcccgggcgccccgaagcgccgcgagagcgagcacccaacccgggcgacgaaaacggaccctgccccgggctccacgagcccctggtgtcccctcacgactctgcaccccctgatctggagcgcacagagccgcacccacctccggcgctgcagagtccactgccctgaggccaccacgttcctcggggcagcctctcctctcgcccccagcccttccccacccagctctgcagaactggctcctgaaccaccgccaagtgcaaagccgacacgtcgcaccgcggtaaaaatcgttccatttctgccggcttcccagtccgcccccggccggcgaaacgtcacgtgagccgagtgcggaagtcgacccgagaggtgggggcgtgggcggcgcgcgccccacgggaccccaacccgcgaggtctcggcccagccggtcgcagcttccgcgcgccctgagccccctcccggccccctcctgacccgactctcaccgcagcccgcggtgcccggcggcgcaccacggacacccagtccatccctgctacctaagccacatctgcccgggcgctcacgcacctctctgcgcggttttccttcccgccggagaactggcgccgcgtgggtctggacccggttaccttcttcagtgcactggggagggtgaggccaaggaaggaagtggctgaggcaaagagaaagacggctgtggaggaggaggagcagggtagggggaaaagtaagtgtttctgcgctcaagaaaggggccgcccacactcccagggacaagcctatgaggaggaaactcaggggaggagacgtccaagaaaggggctgactgcagacaggtgaagcgccctgggctcctaggaaaacgggcccagagcctggattacctcacttttccaccgtgctactcagagccaaggatcccaggatctgcatctgatcctgggcgtcgatttcctgatggatttctctcccaacgtaagaaacaaagcgccctcaaattgctgaaggctgctagaaagaacgtggcattcatgggttccggatgccgggggcctccagaaaactacgactcatgacttaaaaatggcttaattcgcaaaacaaaatgcaatcttgaaagccaatttgtcagactgcaaagaaattttacttggacatagatagttgttgaccctgggtcagtatcggtttcttcccttgttcattcattatttcatacatttaacttcataattcaatttattcatgctccctttgttttagtcactgttattttaatatatgcgtgtgtgagagagagatgcttaccgtacccagagagtccttttggaaaggaaacagttacccaaactatttctagagcaggggttgcacaaataactacaaaaaacgttccttaccccctccccacccccagcccagctaatttaaattaagagtgatcgcgtgacccaagagcgcacaatccgtgatgtagtcatcatcctgtgaggtgacctggagcaaacagttctcatcaaacacggactctgatagttagtaagccaatcagacactcccttggaaatggaaagtggagaatgcagagacggagctgtctgatgtaagagaaaggttggagctaagagagggtaaggcagaaggggccaaaatgggcttcggatgcaaaacatttgagtaagcagaaaccaggagaatgtagcagcaggttgggtggaggcacaagtggtagaagccagtcaaagacaagctgagaccaagtgatggaaggagagcaacaaagacctgcttcccaggggcatgtgagtgttcagttccctggggctgcactggatccatccacttcccacgcttcattctagtctttacggtgaatacctgtctcctgggtgtgactgaaggagtctctgttctgtaatcttcaacaaaggtctgattcttctaagtgtctcatggcagataaagtttaaggtgactccaagatcttttcagacctatttttttcttttacttgttttatattgttaccaaaatgattgaggcctatttttttctcaccaaaagaaaggtgagaagttatagtttatatctttcacagtcgacataaggcaaaaaatatataattcaagaaaaatatatttagcaattatcgaagcaggacctcgctattttggcctgtgacagggatcacaattcatcagtcagataatatccaatgataggaataatgagtctggagagcaccgcttctgttatgattaggtaattagtattgccctaattgccaaccaaagaaaaagaaataggttactttacctaaagaagtaaacatccttgttaatataaaaataaactcacccaaaagatactttgtttacacatgtgctaaactaagtataacacaagctttatgttaatctataaggaattacaatttaagaaaattgttttgtcggctgggcgcagtggctcatgcctgtaatcctaacactttgggaggccaaggtggacggatcacctgaggtcaggagttcgagaccagcctgcccaacatggcaaaaccccgtctctactaaaaatacaaaaattagccaggcgtggtggcacatgcttgtaatcccagctactctggaggctgaggcagaagaatcactagaacccaggaggcgaaggttgcagtgacccaagagcgtgccactgcactccagcctgggcaacagagtgaggctgcatctcaaaaaaaaaaaaaaaaaaaaaaaag

SEQ ID NO: 584792 - DNA, 4001 bp, Homo sapiens
gaagtgggattttcaggggaccctacagacgtaggcagccaagagtcaaacaaaacaagcatatgcaatagtcataattatgctagtatgacagtatgaattaggtgactcagccaggcacatacaggagttcggagtggggacagtggaagcccacaaaactccatgtttgggccatcagtagacacttggtctgagaaacacagtaaaatgtctgcccgggtagtcacgatcattctagtatgaggtagacaggaagcagagcagggccaggaaatggaaggggccacccaggccctcaggagtccctgacaagggaaggtccctccatgctctctgagggtggcggggctccaaagatcctggccaggagccctttgttggagcgggccttgtcctgggcagttgccaggcgagcccgttcacgtccccctggccgtgctgctttacgggccctcagttcctgctcagtaggacgctgggcaaatgtccaggagccatctgggcgagcagggtccccatcggccgcaagaaagcgttgtccccgttccacactttgaagatagaagtcggtctcacgcttggcttgagcaacctccgctctcaagcgctgcctgcgcacctggcgctcaaaggcgaggtgctcgctgaggtgggaccaggtgaaacggtgcaagtactgtgggcagaaaagaagaaaagatcaggatagtgcagattagggagaaagatgagacaaggggacaaggccaatgagaggccatggggatacttgggccagagttggggagaagggagggtgagaggtgtggcagaaagatctatcttctcaccttgaggttccaaagatcataacggaaggggctgcgcctgcgggcacccataggcgtgttgtgtagactggccgccacgcgcttggctatgcgcttgtcacggaactccacccatccctcggtgtagtccttggtgtaggaccgcttttttcctccggcagctgctgctgccttcttcttgcgtctcacgaaccggtctgcgcgccaaagacaaagacccgtccaggacgcctatgcagcactcactcaaaagcacctcccactgcccgcaacgttcttcacatctgccagtgggagtcccacctgaagagtttttgcccaggaggaagggaactgtaaatcgcaccctttcctctagctaactcaattctttccttaattgtccactccttaatctggccagccctgaacgctgcttaaaaccggcacaagtcctcagcctcaatgtaaaattgagggtggaaagaagaggggcggttgatcaaatagtttcttgacctaggcagcaatgctaaagagttatgttcagttttgtagaaaagctgacgagacttttactcaggttgtattcatgtaacaaaccagtaaacaggtccggaaagagaggtgaacagagccgggataagaacacaaatagtaacaatccgagaactaaagaaccaccagacacactgcgctacccactctccccatatcccctccgcccgcccaccccagcatcctcacagactgattcaccagccaggagccaagcaccgcactccccacccccaaaatccagcaactcgtgcctcagcctcgcgcagcgaagcaacaggacatgcatgcttgcaccccgccagcgagcgacaacctcctcctgtcaccgtcagggcctgcatacttaccctcagcctgaaagaagacgcgtccgacctcgccataggcgctgagaaggttgcggacgtgcaggggccggaagcgcggcgggatatggcccaggtacacaatacctggcactacccgtttcttgctgccacaggccgcttcttcggattcctcctgctcctcctccgcatctagtgtctgttctgtcccttccagcggctcttgctccgttgcggccttctccgattcctctgcctccatgttgactgacacgagcggcacgacggccgtaaagtgccttgccaactgacgcaaaacgcgtgcgacggcctgagacgagggggcgggtccaaggtggtgatgacaaatgaaaggaaatgattgggcaatacagtcgggtccaggggaaggccgaggggagagggaggaagtggtgtgtcaggtcggaagcctgattcagagcgtggaagcgggatgggaaacttgggttaggctcagattcccggtcagatctccaactcaggacaggcagaaccagaaaaggcagatccccaaatataacctaccctatagaacgccttgtcgagacgctaaaaggcgggttgatgccggctttttagggaattttgcagaacaattttagagaagtttctatgtgttctagcgatcaaaatagcattttattcaagggccccgggtgcgattccagctgaggaatgactcaccttttaaagtttataaatttcatttaaaaattttgagttttgaggttttaactatttctggaaatttacctcggaattttgaatattttaaaatttaattttgaaaacagttcaactttggaaatttaattagatttaatttttgaaaatttaagttgtgaactttcagtttaatattttacatttgattttgtgaatgtctgaaaatttaaatgtgtgacaattatttgaagaatttgtttggcatctattacacgtgtgtattgatacattatccatatgcatacttatgttgcaaatacttgtcagaggcgcacaagcctccaattctggcgaccccccggcggcgcgcttatttctgctctccctgggtctgtcctcagattccctatcagatcacaaaccacttttccttctatgacctacgcaaccgcagaacggaccgggccacggcggtcctgctcccaccaggcggcctgcggaccatccctaagccaagctcagggcagttttccccgcgcgggctcgggtcctcagtctcttatcgtcgcccgagggcgcgaccagcagggggcgccgtccccacccttgaggcgtttcagttcttcccatcggcgccagcgacaagctgactgcaaaggacagtgctgggaaccgcgtacaagtaatccggttagctttctggaagcagcccggggcgagtttgatgactatcaacataaatccgtccttgctgcggcctgacaaaatttcccatctcgctccaagagcgcagagtagcccagagaatggaagcagggagtaaatgtgtccactattaaaatcagagatgacagtttttgccagtccccaagtatatttctaaagtaacagggccctgcactctttcatggagtgtctaaaagtctaataatagacttctcgaattcaaacacgcctgtttcattaactttattgaagagaactttctgtcaggtaggtgtccactgctccttttttgaagaggagcggggtacgatgagagcgataaactccgtctactgctatttaattataaacactgacatcttcaaaacacagtacagttaatgaaatgagaacacgtgttggggtggctttaaaagatctggagctaggggaggggcatgatggatgcaagagtgtcggtaagttgtgccagtgtggtggctaatggtagctattagctattttctctactttgtatatatttgaaattatcattaataaaatgtttattcacaccaagtatcaatataacagggggtgctaaaggaccgtgaaaccgacaaaaaaaaaaaaatgaagccttggggcagcgtgttcttcccgttccccacattcctcatgatcccttctcaacttggtgaaaatcgagtcccactcaactgtctgtgaagcaacccttgttagcaattttcagggtggattattttccttctctgagcgtcttacaaattcctgaataagcaagctgcacatgcgttctccaagtttccttatttcaggcccagaagagacacttttaaaaatggaactcctccgagccggattcgaa

SEQ ID NO: 584793 - DNA, 4001 bp, Homo sapiens
ggctaattttttgtatttttagtagaaacggggtttcaccgtgtcagccaggatggtcttgatctcctgacctcatgatccgcccacctcggcctcccagagtgctgggattacaggcgtgagccaccgggcccggccggccctgcttcgtaagaatgaaaaggcagtgggccgcctgtagtcccagctactcgggaggctgaggcaggagaatggcgtgaaaccgggagacggagcttgcagtgagccgagatcacgccactgcactccagcctgggccacagagagagactccgtctcaaaaaaaaaaaaaaaaaaaaaaaaaaaaggaaaagaaaaggcagtgtaggtggtgtaggtcagtggtctaagttcattcacaaaaagcatattaatgaagctaagtctttttgtttgtttagagaaggggtctcactctgtcacccatgacggagtgcagtgacacaatcactgcagtctcaaactcctgggctcaagtgatcctcccacctcagcctctccagtagctgggaggcacaggccatcatacctggctattttattttttgtagagacggggtcttgctttgttgcccaggctagtctcaaacttctggactcaagtgatccttcctcctccgcctcccaaagtgctgggattacaggcgggagccaccctgcctggccaagaagctgagtctcaagctggatagaagctactgacagggctggaagaagggggccaacaggaggaatcataacagagggaactctgagcaaaagcaaggaggcaagaacttgagtgagtgagagagtgtgtgagtgtgtgagagtgtgtgtgtgtgtgtgtgtttatgggctgtttctaataagcctgacttctcctggaatcactgagacttacctgctgccaagacatgtccaaagatgacctcagacacatcttccggagccacagtggccctcttcaagacttctttgatgacagtggagcccaggtcctggacaggaacagcagctaaggcaccattgaaggaacctacaatagaaaggcggagagcgtggacatcacaagcctgcgggtaatacgggaaccacctacgagcaggggagcctcatgaccctgtttggcaaggccacgcgaggaggcagtgccctctcctcccacacgttcctacacctgctggtctgagcaaaggtcaaggtgggtgccacaactcgcagcagccgagggctggacaggcgacctccagaacggcctagggacgccgctgtagcccttctatttccccaaatccgaaggactggatgcgaccccatgcttcccaaacaaaaggaaccggcgggtcaagggcgttgaaaaccatgcggcacgaaggagacgaagtcacgacttctagccattgtgtgacagcccgaccccagcccaaagccgggctcagaccacctagcagttccgcccctgccgcaggcattaccgatggcgcctcccggagccggccaatcaggggccccggaggagaacacctccctacgccaaccaatgggagaggcaggccacgcgatggctctaccccgggagccaatccaagcacgagggacggagtgcgcacatcgggagaggagagggtggggctgtagcaccaggtcagggaacgcgggagccgcagggttccagggatcccgcggctcctcgcggcttggcctgaccggcttcctccacatacgcccctctcctacacaagtccggccctcggcgctcctgccgaagcagcaggcgcctcggactctgcgcggctcccgccggccactcacctatgatggtccgcgccgccgagacgatgaccacaggatctgagcctgcattcatcttgcttctcctgccgccgtctgccctgcgctgcctgcaagctaggcaaagctcctcctcgcagcccacaggcctgccgcgggcgggacctgaggtagccccgcccctcgccctccacctccccgcgcaccacctccccgcgcatcccactgtgcgcaggcgcaaggccggagcaggggcgggcggaggcgcgcggggcgcggggcgcggggcgcggggcggaagtgaggccggggcgcggggcgcggggcggaagtgaggccggggtctgggcttgcgggcagaaccgcggacctcggacgcatttacagagcgcctgaaaccccagtgtttctggacaccccaatgttggagttccccgacttgacgtcttgggcttttttttaaaaaatcttagggtttctcgaaacagtaaagactggggggtgacaaagacttatctctcgttcagctcaggactggaatcccacgggcgagaatctcgagtgcgagcccggcccgcggcgggtctcagcacagctctgatgggtccttttgctctcggcggcttcgggaggtcctatgcgtttctcctggcgccagtcattcgctcgcgtgaggggcttgctaggagcgtctcggtgcgagccccctgccttctaagatcaactctggctgtgaacgggtgaggacgccgggagcgtcttagcgtcacaaaagttcctttggttgacgtttggacagtgaaaggagcatgtaacaagtggggtcagttttgtttaaaaccctttctgacttcccagcctcttactgggcaaagttcataatttttctgagctttctagggtttccaggcaagcttatgaggggccaccgttacagcaacttgttgggaacacctggatagtggaacaagaaagctttgtcacaaagtcatgaaggggaaaactgttgacggacctggagaatcttcctgaagaactttaaagttgattgaaagaatcattaaatcctggaaacctacattaagactttgcagagatatgcggatgggtcagataaatcagagaaggtaaagagtgtaggccccagaggtggggcaatagagaaggaaaaaaattgcataacagtgcaatttcaggagaaatctttagggtctggaatagtggtgaaatcagctgtctactctgctaagaactcagcagcacactgaagtctcttcagttgtcttcaatgtgtttcctgtcccctaacatatctgagtccaaggaattcaaggaatgcctcccgtggcttttgctctattctatcccattttccccttactccctggccacttctgagtctttgtgggcttactctcacatccccttaacatgttccccaaggctcctactttgcaccagctccctgggtaataccagtcattcctacggcatcaatcaccacctgtatactgacaagtctgaaatccttacatctaacctcgtctcctaagctgactgaccctcttcatttaaattcttacaagcacatcaggtcgggcaccttggctcacacctgtaatcccagcactttgggaggccgaggagggcggatcatttgaggtcagcagtttgacaccagcctggccaacatggtgatatcccgtttctaccataaaatagaaaaattagccgggcgtggtgccgtgcgcctgtaatcccagctactggggaggctgacatgggaaaatcgcttgaacctaggaggcagaggtttcagtgagccgagatcacaccactgcactccagcctgagcgacagagagaaactgtctcaaataaataaaatttcctataagcacatcaaatttgacatattgaaaccaaactcttccagcctgtttcttctgtaatctcagtgagcagtgaaactatcttctgttaaccaaaccagaaatttacctctgaaactccccctaaacatcacttcttccagaaaaaccttccaatctcctgcatttggtgcagcatcttacccctaacttcctctttcaacttaccatgtaattcctagtttatctgtctcctctactgactacataagctttccaagatgatcctgttacactgctttatgcacagctcctagcacattataggcagttatga

SEQ ID NO: 584794 - DNA, 4001 bp, Homo sapiens
ggagaatcggatctggaggcagggaacctagggctgtttcacgctgacttcctagaactaaattgaaagtaaaaccctaacttcccacaccaagtaacaaaagaaccagaggcttctccctttccaaacccccaccttttctgtgtggcagatgggaaattgaaagtacctctgattggttgcaaaaagcaaaattacgctaagaagtaagttatcccttaaaaaaaattattctttctgcaaccaatcagatcttcccataggagtgtaactatgtaacttcaccatctgattgcacgccacgtcttcgtttgcatataagggcaactttgtaacttcactttagcctttcattggttgcttttcacagccaattgtgggtcaccacttcatttacatgagatgagtaccaagtggccaataggagacttcaatggggtattagggcccctgagctgctgctccacaccccaaacacaggagtgtcctttcattttcagtaaatccctgcttttggcggggcatggtggctcatgcctgtaatcccagcacttcgggaggccaaggcaggtggatcacctgaggtcagcagtttgagaccagcctgaccaacatgatgaaaccctgtctctaataaaaataaagaattagccaggcttggtggcgcatgcctgtaatcatcccagctacttggaaggctgaggcatgagaatcacttgaacccaggaggcggaggttgcagtgagccgagatcgtgtcactgcactcccgcatgggcaacagagcaagactccatctcaaaacaacaacaacaacaaacaccttcaaggtctggcgtggcggctcacaccagtaatcccagcactttgggaggcggaggcaggcgtttcacctgaggtcgggagttcgagagcagcctgaccaacatggagaaaccctgtctctactaaaagtacaatattagctgggcatggtggcgcatgcctgtaatcccagccactcgggaggctgagtgaggcaggagaattgtttgaaccagggaggtggaggttgcagtgagccgagatcgcgccattgcactccagcctaggcaacaagggcgaaacctcatcctaaaaaaacaaaaacaaacaaacaccttcgggctttgtgagtgctggtctcagaaaagcactcagtcttcctccaagggctaacttacttcttcaggagttgggtgcctttgagaaatttcccaaaccactacagaggaacaacttctcccttcgttcaccactctaccaagcacttggcttttgtaccttattgcaattatttatcttctaatcttctagagcctagagaattagactgtaatgtgccttaaatgcagaggtttctcttactcttctctggagcaatgcagacgtttgttggttgaaggatcaaactccaaagtccctcccagccttggaactgtctccacgagtcataaccatacttatctatgtttagatagagaacttacgcgttcgacccagcatatttaggggctccattaaagtaataatcattattactaaggtgaatttacaggcgtactagaacacaacctaacaagagataattattcaaagctcacaacggcaccaagcacggtgctttcttttccttcattagaagccacggcttctcccctacctttcccatacctttcccaaaactctctcaaaattgcgagccttggtcatggcctttatcacctcccgcagagactgagtcatgctggtcatcgtggacggttttccagcctttgggctttgcgcaagaacgaacttcggaagagctggaaagtccagaagttagtgaaagaaggaggacacaaagggcgaagagcccgcacccttctccgcccctaggagcgcaagaggccgggagtcaggcgagctggcagccccggtggtccgcgatttgctcactgactttcctcgcacccttgtgacgaagcgcgcatgcgcgcttcgcacccaccgccccggcggctcccttgcggcgcagctgcaccagttttccgagagcagcgcatttccccgccgggcggttgatgcgggagcgccatgacacaggcgcctgcgcagagccgcgcgttggcctcctgttccgcttaaaggggcggtgcagaggcggcaggaagatggagttggggagttgcctggagggcgggagggaggcggcggaggaagagggcgagcctgaggtgaaaaagcggcgacttctgtgtgtggagtttgcctcggtcgcaagctgcgatgccgcagtggctcagtgcttcctggccgagaacgactgggagatggaagtacgctttcgctgtcctcgcttccggctccattacctaggtcggtggagcgcacaaacctcatcccttgtgcctttgtttttcagagggctctgaactcctacttcgagcctccggtggaggagagcgccttggaacgccgacctgaaaccatctctgagcccaagacctagtaagtgatgaggggagcgggagccagtccgcacggaggcagtttgataccaggtagccctgcgcgtcctgggacctgccgtggagctgggcggacgatgctgaggcagatctccaagctgcgtagccagaggagcagggcttgcgttgctgctgctgcgcggagttgcgccccagcagcggatctaacactgcaccagactgtcgcttcgaacgtgatttggggtccagggaggaaaagatggaaatgtaatgtttaactcaaatgaaaggaaataagtaagcgagaggtttgaaacaaatgaacgaaggctaaaccttctatcgaaaaatggcaacttggaagtctccttgcttcctgtattgtttatttattctaggccctaggctgaccggccagaataacaggtttgttgttgttgttatttttttttaatgcacacctactcctgttatttcagtgcccctctccagttcctgcacttaaaaagtgtagctgccttacaaggccctctactatttggctccataacttagaacctgcctttccaggttccaggcctatcaaacttttacttttttccaacgggtcattttctcctgtctttgaaacttcgtaaagatctttattacctgtgcctggaatttttttcttttcccttccttgctaatatttgtcttaaagccccaagctgagacatgatttatctctaggaagcttttcctgatgtcctaagtctgggtaagagtccccttttaggtactcttatagcatcctgcatgacccctgttacaataccttagtccgtattataattgctgttcattattttatgtctcctactagactgcacatctagtaaggagtatctgttttgtacattgttaatttcccaaagtctgacacaacatttgacacataataagctcccaataaatatttactgaatgtataaaattctcccagctatatgtacaacctgtaaaattgactgttcatagtggagactttattttccctttggtcttttcagctacactggcttacagatgtgataagatattttctttaggttcctttctctgtcttgcctcttgttggggaattgtttactcacccacagtgatttgtctctggctcccgttttactaaccagagcaagttggactaggaggtgtttgcctagctcaaactggccagtcagatcctctccttggtttcagaattaggaccaagagagtcaagtctgagtcttcctatggagctggaactgtaacatgttaacttagcacctgtgaggattcatacatatctttttttgtgtacagagaagctgagaacagaggtctgcagagagacaatgaagcagagggaagttgaagtgtaggattgagagaaagcccttaactgcccttccttaaacatggctgtatttctgtaccaggctctgtgacatgtttgtttccttataaattctcctgttttggtcaa

SEQ ID NO: 584795 - DNA, 4001 bp, Homo sapiens
tttggttaatatagacaaatgcaccataggctactatagagaagaaagccaggaagaagacggacagttaaggagaatggaaatgctaactaccagtgtagctatggcaattattatactaagaattttatttaaggtaagtgtagaattacacagagatcaaggtacacagaagagacaaatcatttattcatgcaaaaaatatttgttgaggatcttgagatggagagattatcccaaattcaggtgggtcctgaaggcacccacagaaggcaagaggcgaagtgataacggaaggagagagagagagatttgaaaatgctgcactgctggctttgaagatggagggatgggtcataaatgtcacttcagtacctggaaaaggcaggcttccagaagttattcggccctgccaaaactttgattggggctcactaaaatttcagacttctggcctccagaactataagagaataaacttgtgttgtttttagccaccatgtttgtgataatttgttacagcagccataggaaactaatacatgcagcaaagaggaagaaaaacatgctaaaataggaaaaaacttacaaaccacatctctggcaacactctagtatctagactatataaaggactcttaaaactccacaataaaataataatcccattagaaaaagactgttttcatctatttgtgctgcgataaaggaatacctgaggctgggtagtttataaagagaagaagttgatttggctcacagttctccagactgtacaagaagtatggtatcagcatctgcttccagtgagggcctcaggaagcttccactcatggcagaaggcaatgggagcaggcatcacatggtaagagaagaagaaagaaaggaggggatggtatattctcatgataataatatagtgagaacttgccactataaaaatgatttatgaggtatcctccccatgatccaaacttcccaccaggccctgctactaataccagggattcaatttcaacatgaaatttggaggcgacaaatatccaaactatatgagaaggcaaaagacagacatttcaccaaagaagataacacacatagcaaataagtacacgaaaagatgttttcacatcattagccggtagagaaatgtcaactaaaaccacaatgaggtatcactacacacccatcagcatgactaaagtgaaacgtaaaaacaacatcaaatgctggcaaggctgtggagaagtgatattactcatatactgctggtcggaatataaaatggtacagccacactggaaaatagtttggcagtttcttaaaaagctaaacatgcatttaacttatgacccaacaattccactcttgggcatttatcccagagaaatgaaaacctatgctcacacaatgtatgtctgtgtgcacaaatattcataacagctttatttgtaatagccaaaaactggaaacaactcaaatgcccttcagtgggtgaactgctaaacaaactatggtacacctgtaccatgggacacaatgcagcaataacaaggaatgaactatcgataatctcaacaacttggatggatctcatgggaatcatgctgaatggagaaagccaagccaaatggttacagattcatgtacatagcatttttgaattataaaattatagacagagaacagattagaagctgcagctataaagaggtagcacaagggagccatgtggtagtgaaacagttccagtggtggttatacaaagctaaacatgacaaaattgcataggcacgcatacacacacacacacacacacacacacacacacacgtacaaataaaactgatgacatcttaataagctctgcagttttcccaatgcatttttcctggttttgatactgaactatagctatgcaagatgttaccactgaaggacactagacacttgggtcctcccagtatattattattgtaatttcttgtgaacttataattatttcaaaatgaaagttaaaaaataagtacaggtaaacaaaaaggattttgcaatgggaattaaaaagagatgtttagtgagtttagagaaatatttggtgttacggacaatcccagaaaaacactaggccaagaaggaagggtggtcaagtgtgtctaattcagcaaggtggtggcaatttaggtggaatggtggagatgaaaaccagtagcttgaacagtgacttatctaagaggttaaatttttaactccagctatactttccccaacaaacctcttaagagaggtaatgttttgtctgcatctcgagtattctggttctgagagcttgaacataagagcttacaatttattgaaagcttactttgatccaggactaatttaagcattttataagtattaattcatttcatttacaagcctataatgatcttccccattttacagatgaggaaactgaggcacagggagatttttttttatacatgtatatatctctcactagcgcatgtgagagagctgggactagggcatagacaacctggctccacttattcatttgttcaacaaacatttgtggagcacctaccaagggccagattccagggctctctgccactgttctgcctctaacttctactttagtaacaacagacacttcaccgatcagctgctttatcagggtttgagtttagagtgaatcaagggaccaaatgagagagaacagttggcaagagagtgagacatggaaattttaaggataaaaaaaatggcaagaggagttcaaggctgtagtgagctatgatcatgccactacactccagcctgggtaacacagcaagaccccatctctaaaaaaagtaaaaaataggctgagcacagtggcccatgcctgtaatcccagcactttaggaggccaaggcaggtggatcatcttaggtcaggagtttgagaccagcctggccaatattgtgaaaccccatctctactaaaaatacaaaaattagctgggcatggtgatgggtgcctgtaatcctagctacttgggaggctgaggcatgagaatcgcttgaacccaggaggcggaggttgcagtgagcccagattgtgccattgcattccagcctgggcgacaaagtgaaactctgtcttaaaaaaaaaaaaagttaaaaaaaaaaacaaaaacggcaagagaataaacaaatggaggccatgtgatcaggattttctgtaaaaatatctcctgaagagctctacattggctatgtgggccatctcaaacctgcagaagagaatgcagggccgagtggaaaggacgtgagtgggatgggagatgagattccatgttgcctgcaagttctgtcttgttcacctggagatagcacccacgccaccatgttactgggtttgtgccttccattccttcctttggatttttctctttttccgtctagcaaatttatttcatttcactcctctcaatattatcttcatgtttattttgagtaacacagttttttttcctgaaatgccttccactgctgtccgaaacagagagcaaatatgagcgatcggaatattttaaaaggacaaataacgtcattgttgaggaatggccgagcctgccatgctgaggatgagtgggtaagcaactggaatggtaggcaggggagggggcggtgagaataacacaaagccccatggaagtgagttgaggggaactcctttacaacaattaacatgtagatttgcttcactaacaagttcacaatagatttaattaagctggaaatcaatttcaccccatacccatatcatactttcaaactctcccaacaactctactgtcaagtctgatcacttcttcacaaatgcaaaaaagctcaggcaaaatgggtctgaaatttgtgcaggtagctttgaatttaacctttcttgccttttttagggggaaagaccaagatcagatactatttaaaaatggctacaaggtttttcat

SEQ ID NO: 584796 - DNA, 4001 bp, Homo sapiens
cttttagaaatatcatgttcaggtgaggtgtggtaactcacacctgtaatcccagcactttgggaggctgaggtgggacaactgcccgggcccaggagttcaagaccagctcgggcaacacagagagaccctgtctaaaccaaaaaaaaatcttctaaaaataaaaagaaattttaaaaagaaatatattcatagcctttgacctttttcagtattagggtatacatctttccttttacgtcggaaagtacttagattttatataaattatatgctacggttattaaacctgtccttttatatatgtcgcaaatattttccttctttgtatttcctttactttgtatctttttcttttttgagacagggtctggctctgtctcccaggttggagtacagtggcacagacacggctcactgcgacctcaatctcccaaggctcaagcaatccaccttcctcagcctcctgagtagttgggactacaggcacatgccaccatgccctactaatttttaaatttttatttagtagtgacggggtctggctaagttgcccaggctgttcttcaacttttgagatcaagagatcctcttgcttctgccttccaaagttttgggattacaggcatgagccactgcatctggccatgctactttgtatctttttaaacatgtagatgttttcaaagaatttctagacctctctggctttgacattttttgtctcttaattgtattataaacacctagggatgtgattccatagtttacgtcctcctacacaggattaaggaggcagctgcttcttgggttttagcatatacaagtttcttcaaggtcttaaaggaaaaaaagtacttgttaggagggctacatgtcactgggcaacaggaacttttcagcttcattataatcctatagcaccaccgctgtatatgtggtcctataagattataatggagctgaaaagtgctagcgagcttcttaactgggataaaagtttgtttgtaaacgtatgtaaatgtatttacatgtgctagcccagggtcaacctaaaaggtagcgaaagtgtttagcccagaagtctacatagaaactagggttgtctacctccataccaccctgaatgtcccccgatctcggaagctaagcagggtcaggcctggttagtacttggatgggacaatagggctaaggtgagtagatttaatgctccaggataacgacctttaccgacaggtcattgtgtggcacgtggctgtatgtagttattaaaatgtaaatacatatatttacaaacaaactttttttcccagttaagaagctcgctagcacacagcattctgttgaaagccccctttatttcgcagtcctgaagggagtgagggaaggaagtaaaagggcagaggaaataatgaatgaatgcgagacgccgattgtacagggacttgtttccatactgctctctaccagaaacgttctcagtttccttccttctgctggacatgttccaagggccaaaacctcaaataatgtgactttgtagattggagagtgtgtgaccacagaaaggaaagggaggcagcacgtgccagccggcgacagaatgttaagtctgcagcatactccaccgcaatgaaacaaataatttgtgtatttcctccccttccttcgcccagagccactgtgagaatgggctacagaaagtttcgaggcagtaaagccagttgttcacccagaacatctgactgccataaaaattatggtgacgagaaagaacgtttgctcaaatgccggggtcgggttgagggctggagaaaggtcccaccccgcagcatctacctcccgggctcctcaccatgtgcatcgcctcctccatccacttttcggtctcctctgccgacaccgagcacgcgccgcttgcagctggcttgggtgccgccttcgcctccatacccagccaccactcagctacagagcccgcggcagaggaggagcgcgggcagcggaacgcggcgggcccgggaccccgtttccgggggtagtctaatgaaaaggcactcgggagctatttctgaacggacctgggcttgtcggaccagtgagcggcggcggctgcgcggcggcagcggcagaaagcgtagctgctttgctgtagtccacgcccccttgccgctccggtgacagtctctgcggaaagtcacgtttgtgatttcgggagagcacagaacgggacgacggcgctcttgctgggtcatctgggccaggtgacgaagaaacagtttcctggtgaagcagtccctcacccctagtcagcccacacccctagggcctaaagatgctgaggtctgtatggaattttctgaaacgccacaaaaagaaatgcatcttcctgggcacggtccttggaggtgggtgacaacgtgcttgaaagggggcattgggagaagggggtgggagaggtgacttcttctaaaataaggacaggccgggcgatcctagtctgggatatgtagagggagttcgatcaaccatgggatgaaaagggaggtggccaacctccagggttctcccatctctgcagttgagaaatgcctctgtgccctttgccctgtcaccgactcttaactctgtttctcacctatccttttttctcacggacctttggagaactcatcacagtttaagtttctgtttcaaggcaccattctcttacaggaactttttaaaaaaaattctgctttcctgtgagattctgcatttctccttggcactcttgatactttggctctcacccttctcaggagtttaataataatctagggaagttacctataggctgcacttcgggtggtggttaaagtcgatttgaatttttgaaaacagcgcagttgtcctaaaggactgaaagatatggattagataaagaaaaacaaatcaatattttagctctgtttctgccattttagaatacaaactatggcagtaagaaaaatgcttgagggatgttgtgcaatcttcctcaggatcttcaaggttgggatcattgtaatctagctgacataactgagttgcacaggcccagaggagatttagaaacagataagataaaaatcttgagacgcttttccctcatacaatgctcatgtgataatattcagggatttgaaggagggaataaaagttttgtgaattatatgaaaaggacatctaggaactataaaagaggaaatttgttagaacttgagtttttgagaaatagtctcatcacttattacatgctatgtttacaaaagtacttaaaatcaagaacagagtttcccaaagaatttggttggcttttctcttagtattagattgtattctgttctccccaaacaatttgaaattaacagtacgtattagattgtattctgttctccccaaacaatttgcaattaatacctttagcatcaatagttcagattttggtgatgcttgaaagtttgaaacagagttcttgttgctgagccaaggatggtgttttgcatgtctctgaggtctatcacacatcaataataagcatatgtaaattttgaacaccttcgagaaatcctttatatataaaaggtattttctgatatcttcagtcgctagtatctaatgtatatttaaattatcctaagactacagagtccattttatttataaaagctaaaaatatatgtgtgattgaagaaatacaaataaagtatttttgcgtttactgaaggaaggaaaattatctctttagcgatctcagaaggaatactccttcagcttatggaacaactttgtagtagattagaaataatcacaggggaagcaaaagagtatacttaaacttataatttttttaaaaaactaacaagagctttatagttacagaataagaggaatgcaaaaaatagaaaagttcagacggccagaaagagaaaataatcctagtgttttatatcaaaaaaggagtcagtctgaaaaga

SEQ ID NO: 584797 - DNA, 4001 bp, Homo sapiens
tgcattacttgtaaccatcagtgacttagttatttgtgtgtgtgtgtgtgtgtgtgtgtgtgtgtgtgtgtgtgcgcatgggggaggggtgtactcaaaattcttttgcaatcctttaatatctcctagttaagagagtcattcattcattcactaaacacttttgagtgcctactatgtatgatcttggaactatctaagtactaagaattcaacagtatgtaaaatagaaaaggaaaatccctgccttccctattgggaagacaaatgaaaaaaaaaaatgtagtttttaaaaagtgaaatatatagcatgttaaatgagcaaaaaaataaaagtcaataaaaaaataaaacagtgaaggaagacagggagctttgttttgttttgttttattttggcagagaagtagaggttgtaactttaaatcaggtggccaaagaagctaacaggagaaaatgacatttaggtaaactcctgaaggaagggagagggaaaaccatatggatatttgagcagaaaagctttccaataggggaaacagcaagtgcaaaggccctgcggtgggaacaatcctgagatgactcagggagtggagagaaggctagtggaaggtaactttagagaagtaatacaggcctgattctgaagggcgtcctcggccttggacctagaggaatggaagccattagacaacgctgaaaagacctgactttggtacacagaagtaaagcaatcctattaaaattacatatgtaatatttatataaaattatatatgtaatattacttatatatgtaatatctaaaatttaagctagtaaaaggaatggattatctgccgggtaactggaaacctgcttatgagagaggttagaactaagggactagagattcacagacatgggaatgagtctgggagaagaattcacaaagaaaaagagtttaaatcctagggatcagtgaatcatagggatcagtccaatgtggaattcttcagccagggaaggaaatggagaaacaggcatcaaggatgtaagaattcaatttgaaatgattgattgcatcgccctccccatcaggcagagcatgaagaacatgaatgatcccactgaagcagggcgggcagctgggattctctcacagtgggaatgaacattagaaatggtgtaagttcaaacagccccaatcctatgctgtggataactggatatccctagggaaacagaccacagaaaataataatcatggggaagtacatcctaagacacaacacctaacaccagcccaggacaaaggcaccataaaaattccatgagcgagggtctgtttactttctcagagtaaatgttagtaacatgaactatacatttataatgttttaaggtttagaagccactttacgtctgactatatctgattaaagatcgtagtcgttggactgggcagatgcaaactagaaaatcaccattaaggtgaaatgtgtccatgtctgtctgtcactcgctgtctgtatcatttccggggccatgaagatgtggctttaaccagaagtatttgagatatgcctctttcttaggaaagctatggcctttctaactgcctgagagggctatgaagaagaggaggggtggcagattcacccatgggagctgaacacccaaagcaagaaaatcaggggctctgggaaaggaagtgagtcaagacaagcaagagagaaggatgagagcgagcacctccaggatctggtttaccagagaagacaagctgcgaggaggccactaaacttctgccctggcacagtttgctgcagggaggcagccccagaactagtggtgaggtcgaggggctaggccaggggagggacggacaggcagaggtcccttactctttcgatttatccgatccgtgcgccgagttgatacgatgcacctctttctttttggtttgtttggaggccatggcagaagccgatctatgtagggctgagctctgagcaaagagcctgcgggcgcgctcggctccgcgtctgcgttgccaggagacggcgtcccgcgtccagcgcccggagagcgggggcggggccctgggggcgggctctgcggcctgtggctgcagagggacgcaagagcataaactgaaatcccacatccccgtggaggaacttggagttggtgtctggggagaaatcgaggttctggggcacgggtttggcattaggattactgggcagccctgattaattggagttctgcaggacctacactgcctggctttgcccttcggaaccatagacatatatcgactcttgaatatccaactatttgaacgtagatgttatcctagtaccaccccagttattctcttggctaaatataacaagtaccttcaataattactaaggagacattacagacacgctgaaattgtcaatggcttgaaaacctggggtccagaaattaacacagtgggtgtaaggaaggcaaaataatgacaccttgagtcgctgagggctaggtgatgatatctgtaataaaaccaataaggtgtcttgttgttcgaatgaaagagtgagtccaagtcatgggctcaggtggtcctttgcagactttccagaaaaggtccaggggccagatgacacagacagaaccaagtaaaatgaaacttattagggcgcaggcttaaggctcagtcatcagtggtgatttgttagttatcttgccttgggctagtttttccctttgagtctcagtttactcacttataaataggagatgcctattactcacttataaataggagttatacctaactcacagttctgttttgaggataagatgcaaagcgcagcaaataggagccactctttcagagatgacagaccacctggtttcgaggagcagcagacagcgtgaatgaatgaagttggccaggtaaatacagagtagtggatactatgcttaactgagacatgcttagactgcaagagcttgcaaatttatcaaaacaaaacaaaatattgtgttggttcaatataacctcacttcagagatatctgacacacagcccttaggcctaggaccactactactggttggtgtctttcatgagcctagaaatagttaagtatctttaaataaaagaaatcccctccactcatgggactgggcacatgctcacagttccacctgtgcaggcaagaggcagcttcctgcagagaaaatctttcaacttctctgacaaatgaatgctcagggctctccactcagcatagcctatggtttgtcagactatcccaatcttattactattggattactactgggggttacctagatgacagacagccccttcgttgtatttctatatgcaaaataaataaattccaagtcagcagtgttaatattatgactacaagactgccctgcaaacatctcctatatatgtaaagacaatgaacacatcatgaagattctgctttgtttataccataattcaaatttccagagaactctcttgaatgaaagtagaggactaaatggtgagaaaaattatttactaccaaattttgtcagagtaatcaaatttatagctataagtatatacaaagactcttggctgaaaacagcacaactttaagcagccaaccccacagagaggtgagtttcttcttgaacaagggctatcctgcagccattgttaatggctgcaagatgccaaaagaattagggaagataagccttagaaatcaaaagatctacatcccaccggtattttatggacaaataactccaggcgaagacaagcaaaatgtcttgccaaaagttgctgggttatttattgatggaatttggactaaacacattaaagtcagcattgccagtttaagccaaacatatcactactccactcagagcttgctttttaaacatctattaaattaggataaagtaagggggttgtcaccagaatggaataagataatcataaaagatgtgacgag

SEQ ID NO: 584798 - DNA, 4001 bp, Homo sapiens
gtaaggttgaagaagaaaggatgaacttagtaaaaggaaaaactaataggatttggtagctgatcaatcagggaagcaaaattgggattaacactaggaaatgatagtatcattgacaagataagagacttttctcactcttggaaaataagggctcttggaaatgtaggtgagctagaattaaaaagtcaggatcagttgtgtgtgtgtgtgtgtgtgtatacaaagaggtaagggagctagttaatgagtgtggtgataaatctattcttagccacacatagtgtgaggtaggacattcatactggaattggattttattagaaagtcagtcctaactacagacacacttcccttttagtggactgtttttcatagaaagccaatagagacacaaaccttaggggtgtgtgtgtatgcgcgtgtgtgtgtgtggttttttgttgttgttgtttactgtggcactgctagttatacaaaaaacattttttgttttgtttctgtttgtttttctcataaaattccatgattgaaacaagtagtcaccttgaagttttcaaagacactagagctgtgttcagggttccaatttttcaggcccaaatcaagaggccactaaccaaccagtgaggaggaagcagccactttgggcctctttgattttaactctctccatttccacgtccttagcatttcagagtgtcacagtttctgaccacatacattctccgcttgtcaaatgaggattacaattctgaaaacagatgtttatgtggcacccaagattttagtcaaaaacctcaaatattaattcacatccccaaatgattccccattattagcttttaactttaaaagtatttttttaagctattcctcaaagtatttttcataatctgcttttctcccattcattcacacttcatcagaatgcagtcagccaggttaggaagacaagaaaggagtaagtcataagattggtttttaaatagttgaaaatgtgtatttgccattcggttgggtgatttgtcctttaagatggagcctgaacctataaaaaattgaggtgggagctgaacatggcaaaatgtgtttgcttttcttagataaatctgttagtctgtgtgtgctgtaaaatggcattattccttcattggaaattacacttcctacacaccatacgccactctgccttctcttcacagacttccccaagcaaagttcaaaatgcctcctgcatttgtagttaatcccatggtgaaaccattagcatggtcccctctttgagctcatctgaaaagagctccaagatgagattttttttttcaagagagcatttaacaatgagccagcatagaaatgttaactatagataatttccaaattgggtttatcagagcaaattgttaagtaaacaaaaaacccaaaactcacaaaacggtgaagaaggaagacaaataacaaaattgtgtatttaataaaatccaaagatgatatgtgtggcagcactgatattctagagaaatggatcggttcctggtacggacatatggacttaccagattaagcagcgtcatatatttccaccttgcaccatttgccaagattttgggtttcacctcgtcttttccttcctgtgagatgtaataattgaggaaagtataccagctcagaacaaggaagtggtatatgcatgtagaagtcttcgtcatggcgagtgctgaccggggcaccgtgaatgtcttgagtactttctggcgtccttctgtgggtcacagcctaagtccaacagcaggccggagagctacaaaccacacccctctgggactgagagttccaacacaggctgaatttggttctcttttaagctcctttcctgataaacttcagaggcaggattactgctggttttcagatgcctgcatttagataatgatagataatctgtagatttgcataaaatacaacatgtgggctttgagaagggcaggtagcaatgcaagagctgtacattgtactgtttcactagggcactggggcaggggcatggttaaatgaagtaagcatgaaatactaggaaaatctagcgaaatacttccatggctgtagtctcttttcttttcatttgcatataacaaggaagttgcaaccttatctcttgagaaaaggaggagcaggttgataaaccagatcatgggtgtgcttagggcatgaacagtagaaaggaaaagtgtgttgtaattttgctcctgaggtctctgagattctagaaagtctgcaacaacctttgatcctccagggagcagctccaatggtttcttttcttttttttttcacttttgtaactataccctagagaaccaagagtaacccagggctgtcctagacactccatttgcataggcatttctgtgccctgggagggaagaagcagcacaggagaccatccttactatggccatgaccccaaaatacctgactttagacattgctgggagagggtgagagtccccgctctgccatgaataggatgagacgtggctgggctaggcagcatgccggactaggctctgactcaggttccacagaagggaactgaggaagaactagaagtggatgccttgtgacatcgccagcttgtttccctgggcaactgactccgaggggtgagcaaatccctcagagaaatgctcctgacacagttatgtaagtctgtaattggtgcttttcaatgacttaaccagggcttaaaagtactagcagaaagaactgtaggctggacaaggaggacaaaccataaacaaacccacctcctaagagtcaacagactcccaatatcaggattgggagatgggaggagagcaaacctgagcccgccatggagttctgcattgtaaccatgtttttttttttttttttttttttcatctgttggggctgctataacaacatactgtaaactgggaagcttggaaacaacagaaatttatttctcagttctggaggctggaagtccaacatcaagatgctgacagagtgcctggtgtttaatgtgggtcggtttcctggttcataaatagtgccttctggctgagtcctcatgtggtagaaggggcaaacaagctccctgaggcctgttttataaggtcactaatcccattcatggagatgctgccctcatgacctaatcacctcggaaagctcccctctcctaatgccatcaccctgggagttaagatttcaacataggaatttgcagggaacacaaacatagaccatagcaaaccattctcaaaggaaggggtgatctgggaaatgggtacataaaactctgtacaaaactccacagcctgggctaaattgcaaataataacagaagctaatacttttatagtacttactgtttgctaaacattgttccagttgctttacacatattagctgattagcactctaaataacactatgaggtaagtactattacgaattaagtacattttcagatgaggaaattgaagcccgatctgctaaaaggatgtgttcaacactttgtaagaggcagagctgccgtctgaactcagtgtgatggttaatattgagtgtcaacttgattggttcgaaggatgcaaagtattgctgctgggtgtgtctgtgagggtgttgccaaaggagattaacatttgagtcagtggattgggagaagcaaacccaccctcagtctgggtaggcaccatctaatcagctgccagcgtggctaggataaagcaggcagaggaacgtggaaggactagacttgctgagtcttccggacttcatctttctcccatgctctcaggatgcttcctgccctcgaacatcggactgcaagttcttcagcttttggactcctagatgtataccaatggtttgccagggactttcgggcctttggccacagactgaaggctgcactgttggcttctctaattttgaggttttgagactcggactgatccaccact

SEQ ID NO: 584799 - DNA, 4001 bp, Homo sapiens
ctggtcctgaggccctatctcagggaggatcagcacagggctggggggaaggggcaagggcacaccctggtgggggaaggggagaggagactatttcaaaacccttgtctttttgtctccatatcttcagataccctctcttcctcctcagctcctagcctgcctttccctcgttagccctctgccctccctgttgctagttatggttcaccctacctcccagcccctctctccaggtcactcacatccttcatccagtggatttgaggagagggctgggcagggacttcacaggtcagggttacggttccaccaggagctactgctccaccttctggctccaccaccaattggacctcctccagaggcacaggctctgggagttggaagggttttgaggtggagagttacacttgtgagtgatcccagtggccatgggcttgactccctctttccctaagggtcagacttccagaacgtgctcacgtgagcttggggccctccccacctatgctcaccccagacacggggctggatgggggctgtgcgcaaggcccggtgtcggggaaggcctgggctgaagctacaggagaaggtgggacggggatctcctccccgggctggggtcaccattagctccgactgcagtgtgaagagccctgtctcagggtgtctcctggtctgttccttcacagatactcctatgatgggaggataagacaaattatcccagggtgggtgtgggagtgagatcagggagaaggcagcttggggggcaccttaggactcacccttctcattaggcaccaggggcttcccatccaagtgccagctaagagtccctgcagggtagcttccctctgacacacatgtccccacctggggaaagagtggtgacctcagaatcctttgaaaatgagagatgccacacacccacacccacacacactcgcctcctgttcacagggccgttttctacttctcctgctttcttccactaccttattgggaacaccagccgtgagttcagaggcagaatctacaatttctggcttcccaggaatctctgaaggaggaaaaatccagtcagaggctgtaattgtgaaggttctcaaactctgtgtgtggaaatgaggccagtggaagtcagaggccctcatgggccaaggctggggttgaaggctttttcttaggtaagagggaggccttggagaagaccctggaattcttacggtagacacggactcggtagttggacttggtctcctttccattcctgttcattgcctggcaccggaaaatcccctcatcctggatcccgacagccggaaggaagagggagccgttgggaaggacacgagccacactgtcccaggggcctcctccctggggagacaggaccttccaagcttctgtccggcctgtgttctagaagcagagaagcagggcctaaacagtgcaaggcctttgggaaaggactgtgaggcagagtgacggggatccaaatcattgctggtctccctggaagttgggaggctgcaacaggagccccgcttaccagtttccattccagccgctggggtggtttcttgggggcccccttacacttcagcaccagtggctcgccaatccgggctgtgatgttttgagcacctactactgcccctgggagatagcaccatggtagaggggtaggaagggaatgagggctaacaaaatttggacagggtgggtgagggaccttgaaaggcacttcctcgggttctgggaaaagttctaggacgactggggtgtggggttaaagtgctttctgcagggagggtcagtggggttgagggagtggctcaccccacagactgaggaccagcacccaggctccaactgctgttccggcagccatcctgcttccttccagggtcctggctctgtctgcccctctccctgctgtggcctccgccctaggtggggcctgcaccctctctccagcccccatctttcagtcgtcttgtcacagggaatgctaggaattcatgcctttgggacaagagtccttcaggtactagagaaataattatcaccccacccctgggtactaccagcctctgggtacagtcacttccctgggggatggggagtgtaccctctagggtctcattccctcagagcccccgatcctatttattccatcagtccatcagggctgcctggtgacccactggagccccatcttgattgcgcaaagttgcatcaatagggttcaggccagactgttgtctgcaagggtgcaattgggcctgcatcatgaaggcaaggctggggaacaggagagaaacctgtttggaacttcgtgaaagaaaatcattttttttctggggtttctcatgttttttgaaaaaaattctcaactaaacccagggaaaaaagaaatttctttatttaaaactgcattttgttttttttctgtgaaactacacaagtttacaagtgaggagagaactgcccccggcccatgcctcccacccccccacccatcacacttccaacctgtccccagtcctgcccggatctttaatgggaggggttccccactctgacagtcttgtaaaatcctgagaatgtctgaggggatcagatggtagctagttcagggctgaggatgggacagtgttgatgttacttttcccccacatctggctttttgcaacctcctccctctccctaccccttgattttggtgtgacaaaaagatacctcatttatggggaaattgaggaagatacatatacaagcaccccaacccatatttaacatatttggcaataactcccttcccattcttccccctccaattttcaaatagtagttttttaaaaaattaaagacatgtcactcacaggggaagatggcatcttcaatttcctcaaaattactgagtccagccctgcccaagggttgtgggaagaagggggatgagaggccagcagggcaagcccttcactgcctccacatcaaatgcggcagaaacctgcctgcatgaacaaagaacacctaagggattttagggggcaaagcttggtgccctgtaaaatttacttcctgatggacaggcctggagccaggggggcctctttaccagttctgtttgtccccctttctcttaccagaacccctttggctatcacccctaatatgggaaagtaagaaataaaaaaaaaaaaagacaagaaatcaacatatttataaaaaaaaaaacaagctacttccccaaactaaattaaaaattaagaaccaccaccaccaccaccaccaacaacaacaaaaacaacaacaacaacaaaaaaaacagatggatcccagggtttctttttctttctttaaaaaaaaaaaagttcaaccccaaagcccagtcaataattccctaaagtagcagaaactccctccgaggtagatatctgagtcagacactctcgtccaccgagcgattctattggtttaagatgagctgcgtatgaggtaagtaagccgtccggaggggcgggggtggggatgcatgggggcgtggcccatgtcctctgtccagaagtcatgtccccatttttggcatctctgattgggcagggctggcgtctccacagattccagagcatacaagtggggtggggaagggaaagtgggggagcccaggagagaaacagaatagttgcaagtgggagtatgtgtgtgtgaggtgtgggagagggagagagaaagacagaggagaaaaaggggtctgagaaataggtttctcggtatgtgtatgtttctgtgtaagaaagaaagcgagagaggaaaaagatggaaaaaagggagagacagaccccacactccccttagaggccccattcttcctgccatgtaattagcacccccagcacagagagtctcgttagggaggggatgaccccattggcccttctctgtcttgtgcttctcctgtattggggtttgtcctctggaagcct

SEQ ID NO: 584800 - DNA, 4001 bp, Homo sapiens
aaggacagggactctgtcttatctccagtgccaggacaataggagatggagtaggtgctcaataaacacttgctgaacagattctaaggctgtatacccacccatagagccacagttaatgacagagatggcggttctgatcacaaattagatagttatcctcttgagtagaagtgactactaaaagaagtcactgagaaagtaacgaacacaccaagcctaatggtaaccgactctgaatagatacatgcaatacatagccataatgaaggcagagtaacaataatcaggaagaggtcatctcacaagagaaatgtaccgaatgggatcaagatgccacagggaaagatgctgctctcatcaaatgtgtgccaacagtgcaaagaatggaggataatgtccataaataaataccaacaatggggttcacagcaggattgaccctgtgacatgcattgagctcatggacacagactgtacacagccactggaaagataatgtttgtgtagagaggtatgggccagggaggtcaccaaggtaaggcatgcagggatggttctttgcagacctggagacccagttaccttcttctcttaacacttgatattaagtgaccctctttggagaacaaaagtccaaggatttagaaatgcaatggagggccaaatttaatgagcatacggctcacaaaatatactgatgacaaatttataacacacattctatggtcctgttacatcagtgtatcatgcaaaggcgcatacacatgtgttctgtgaactgtgactgggaaaacacagcaaacaggccaattcagtcagacatcagagtgtggggtattcagccaagccatgggatcccacacatgaagactactgcaaatggtaggaccatggacatgtcagccaaagcaaaataaggtatataaccttcacatgctgaaataaacatgccaaaacataaaatgtgcaagtaacatgaaattatagaacaggtgcaatatatgaaaactcacacacatgcggtacttaaaacatgtcaaaactggatgtgagacatggacacaagaatgaagaatgggcaattctgatagaaaataacacaccatttctacacagcctatggatagcattgggacaacctagttgcacacaagccattaaacatgtcaaaggcacacagactcaatgtagaaaacatggctcccataaggcatttgtgtgtcagtaagggtctagcagtgtggaaggccactgagaaacaagaggtcctgtgcctagatggaaacagaggcacctaagggtattcctaagaggcaaattctgctggccttctcccctcatgacccttcaagagtcatgtggggtcaaagggcaagaaaaggaattggggaaggtgtagggaattccctctccaggattccctgtgcacgctcccagtcccaaattcacaagggtttccatttctcctccctcccaggtctcttccatccttcctccctctcaggtcccctctcctatccccagcaaccctcttcccagtcggcccctctcctttccccagcaaccctctcccccagtcggccctcccagacccaatctctccccttcccctcatcctagtcgctttcagcaccctcttccctcctcctcccatccctttcccgcccacacctcagaggggtagggggcctggggggctggccccctccccagccaggctgcggcagcggtggtggcggatggctgtgtctctgtctctgtcggggtgtcggtgccaagggggcgacgggatttgggggtgtcctagccccggccgatggaggggaggtgggagtgggaggttgggcccatagcggtaggaatggtggggggctgtccccccagcaccctccctccctccctttctgctgtctctctgagggctggggctgctgccgccgctattcccccgccacccctccccaacgcctgctggtttccggggccggccaggaagtggagggcggtgatgggcagcctgttttgccaatcgtctcccagaaactctggcatctcctccccacatctaccagtgtcctcttgcgagccccgccccagggctctccctcggtctttgcccccatctctggctccagctgcatcttttttttctctaactccctttcagctctggatcccctggtgctgtattcctccttccgcacattccttcctttattctccatcagctctcttttaactgccacttttacttggtctctttttttctcaactccggttatctgctgcttattccccccaactattcttaaggaccccttttcccgtacccattcaattctaaacatttatcaagcatctacctaccatatgacaagcattaagttcacctctcttctttttctctccaggactccatctcactccatctcactctccagtcctctggtctggtttcctttgccctttgtccctcactatctcccagcagtccagctcccccctccacctgccttctctggcctttaaagagaagagatctctttggccttatccctgaccctttccttttccatgctcttttacctctgtaccttttctttcctacttccttcgtatcagtctccttacttgcccaagctgagacaaccccttctcacaacatacaatatgggtacatcttttcttccaatggaaatttggcttcaggggtgctttctagaaaaataaaaagtgaggaagaatgccgattcctctggaatgcgcgtgcctccttaatttggtagccatgtatctagttttccaccccctcttctcttcctccactcccattatccctttactaggatcattccatcacttcactctccttcatttccacctttccctctcaatatcttccttcctaaacctcaagcttcctgaatcctcatctgccccagtccttctttacgcaactgctaacttctcatctttccttactcttgagtcacatgggatcttttatcaaggtcccccctctagccacacctttaccctgcattagtttacatgccctcgggaagaggattggtagtgggaggactgttacctaattctgctcctttagtcacagtgagggtcagtgattgtaggaaaagcccaaactccccggggtccaacctgggaagaagaccctatttctgatgggcaaattataaagaggaaagggcgggtctagcctccgcgggtctccttaaaaggggcgggctttgtcccttttgcaccactcacaaaggggttgagcccagagctttcctgctctgaaggtttaaaacggagttgaagtcaatcctgttctactctgtgtacaacattaagaaaggggtgggcctttagttcagttttgctctgtaaatcacctaatatggggagggctgagtcgtccagccgaatgagttgggttaacaccagcgccgcagatcgatgttcccactatccaaacgtcgggctaatcccagttctgctcccttaactaaaagggaggggcagacccaagttctgctctctacgtcaccaaaggaggttggagccattttgaaccctgcgaccctagtgttttccctcttttcctagctcttcgccgtctttcccgatgtcggccaatcaggggaaaaggaaaaggcccaatcagcagaaagtccacagctgaaggacccggatgaagcgagcctaggactttgaagtgcaagcctcgccaattgtagagcagtcaccatggcgacaagataggggtgaagaggtggaaaaagagaaggttaaaccctcacaggattggcccacccccgtcccgccgcgtgctgcgcaggcgcgttttacctaaccaccattttccgtcaagttttagccaatgagttgatttggagccatacgctccaaagtccaatagcaatccggacattctctaaaagaggaagcgaaggaaagaaaggggcttatagtgggcgaggtctataggt

SEQ ID NO: 584801 - DNA, 4001 bp, Homo sapiens
tgctggtttccggggccggccaggaagtggagggcggtgatgggcagcctgttttgccaatcgtctcccagaaactctggcatctcctccccacatctaccagtgtcctcttgcgagccccgccccagggctctccctcggtctttgcccccatctctggctccagctgcatcttttttttctctaactccctttcagctctggatcccctggtgctgtattcctccttccgcacattccttcctttattctccatcagctctcttttaactgccacttttacttggtctctttttttctcaactccggttatctgctgcttattccccccaactattcttaaggaccccttttcccgtacccattcaattctaaacatttatcaagcatctacctaccatatgacaagcattaagttcacctctcttctttttctctccaggactccatctcactccatctcactctccagtcctctggtctggtttcctttgccctttgtccctcactatctcccagcagtccagctcccccctccacctgccttctctggcctttaaagagaagagatctctttggccttatccctgaccctttccttttccatgctcttttacctctgtaccttttctttcctacttccttcgtatcagtctccttacttgcccaagctgagacaaccccttctcacaacatacaatatgggtacatcttttcttccaatggaaatttggcttcaggggtgctttctagaaaaataaaaagtgaggaagaatgccgattcctctggaatgcgcgtgcctccttaatttggtagccatgtatctagttttccaccccctcttctcttcctccactcccattatccctttactaggatcattccatcacttcactctccttcatttccacctttccctctcaatatcttccttcctaaacctcaagcttcctgaatcctcatctgccccagtccttctttacgcaactgctaacttctcatctttccttactcttgagtcacatgggatcttttatcaaggtcccccctctagccacacctttaccctgcattagtttacatgccctcgggaagaggattggtagtgggaggactgttacctaattctgctcctttagtcacagtgagggtcagtgattgtaggaaaagcccaaactccccggggtccaacctgggaagaagaccctatttctgatgggcaaattataaagaggaaagggcgggtctagcctccgcgggtctccttaaaaggggcgggctttgtcccttttgcaccactcacaaaggggttgagcccagagctttcctgctctgaaggtttaaaacggagttgaagtcaatcctgttctactctgtgtacaacattaagaaaggggtgggcctttagttcagttttgctctgtaaatcacctaatatggggagggctgagtcgtccagccgaatgagttgggttaacaccagcgccgcagatcgatgttcccactatccaaacgtcgggctaatcccagttctgctcccttaactaaaagggaggggcagacccaagttctgctctctacgtcaccaaaggaggttggagccattttgaaccctgcgaccctagtgttttccctcttttcctagctcttcgccgtctttcccgatgtcggccaatcaggggaaaaggaaaaggcccaatcagcagaaagtccacagctgaaggacccggatgaagcgagcctaggactttgaagtgcaagcctcgccaattgtagagcagtcaccatggcgacaagataggggtgaagaggtggaaaaagagaaggttaaaccctcacaggattggcccacccccgtcccgccgcgtgctgcgcaggcgcgttttacctaaccaccattttccgtcaagttttagccaatgagttgatttggagccatacgctccaaagtccaatagcaatccggacattctctaaaagaggaagcgaaggaaagaaaggggcttatagtgggcgaggtctataggtagtcccgagcaaattgcttatggctttggttatgactgacaactactcagacgaataaagccctccttggccaggcgacagcgtgtagcgagttattaccaatcccttggcattgcacattgacttagaccgtatcagccaatagccattgtgcgaaggcaggactgcactaaccttttcccgcccctaccctttgggccaatcctttcttttgaattctttgtgactggcaggcattcagaccaatagtgattaggaaaccttgaagcctgcccaacgatcgtgggcaggaggtggtttctggtttgttggggcgtgtgtatgtgtatttggggggactgaagggtacgtggggcgaaacaaaaccggccatggcagcagcggaggaggaggacgggggccccgaagggccaaatcgcgagcggggcggggcgggcgcgaccttcgaatgtaatatatgtttggagactgctcgggaagctgtggtcagtgtgtgtggccacctgtactggtgagaatcgaggaggggggcgggaggtggtgggtctcgcttatatactggagaggctaggagcgaataatcatacagtcatacagataatcggagggcacgttcccataggtgaagcccgacaggagacataagactttgctggtatgtgtgggtgggagtataacggtcgagatctgtggaaagaaaggtcttaggaaccaggagctgaggcacgtgatgtgctgagaagagaaggtggggcggggagtggcaggacaatgtgagacccgagccaccttaccccagagaagtgaggggtcttagctgtgcaggtggaaacaagtgagacacaaaggttaagggaggcacgcatcagttgagtcggggagaaccaggaaatatggatcacattcagatgagatctgggagggggctggtataagggcactgtggagaggcagacttgaaaggttaaagggtcataaagatagggacattattgagcttgaaagtgagtaatgggggaatgtgctagtaaaggggtttggtttggagtgatggggttggggttgaaaagaggagacccagaaagaggtggctgaaggaaattagaaattaacttgaaaggcagaaaagagagggcacgaaaatttgtatgtgtttgttggggagaggagaaaggagagggttgagtgtgttgaggatggacagagctttaggtgttggaagatcagacaagcaggaaggctaactaagttggctggcatggtagaggttgcagaaaatctgaaaagcaacagcaggttgcttgggaagaggggttagatgggattctgcgaagtctagggtctgtgtctctcttttctgtagctagtttgacctttttttttttttctcccccatccagttggccatgtcttcatcaggtgcgtactcaggagatgaagagggaaatggggaggtctgaggagctgtaagaccctcttgtatactggaaaccaccttttttctccccagtggctggagacacggccagaacggcaagagtgtccagtatgtaaagctgggatcagcagagagaaggttgtcccgctttatgggcgagggagccagaagccccaggatcccaggtgagagactggaggtgttgcttagggaagattgaaggcttctgcccttggaaaacggtgtggaagatgggaggagaaaaatccctgttaactttctctctccacttcctcagattaaaaactccaccccgcccccagggccagagaccagctccggagagcagaggggtgagtcttcttgtccagttgtgtcccttccttgacagatttgccggcttcctgtctgactttttctgcctccctagggattccagccatttggtgataccgggggcttccacttctcatttggtgttggtgcttttccctttggctttttcaccaccgtcttcaatgcccatgagccttt

SEQ ID NO: 584802 - DNA, 4001 bp, Homo sapiens
ctctggtttgttttgtgccatgctattttgccccattttcaggtaacttttctacctgaattacttaggacctctggatttatagcagatttgataagacatagatgatagcatatttagataaggatcacagcaaacagaacctcactgaaaccacccattcttcctgcttccacatggcagggttgctcaaggtttataagtaatgattttggctttagcagccggaaggtatgagggctaagtgaccttcacacatgtttatcttaaattatagataattttaagagtcatgaatgggattactacttatctattttataaaagctaattatttgggatgcccatcagaagaatggtatcccttatcaaacgcttccttagacgtactgaataaaagcatcagtttagccggtacctgttaagaggctatgtctttctaagagatgtgttatttgattctaattataattaactttgcttattactaagtagataataattttctcatttcatattttttctgaataacagtttttctccccatagagaatattcagaagatggaatccttttaacgtagaactcaagatgtgccctgttctccctgcccgcctcccatttccctaaacacacacacacacacacacacacacaaacacacacattctcccttctctcaagatactttttttccaactgagagtcgttgactaatcacagatgagttaatccttccacagttttgaaaaagtctagcaaccctcaccttgaagagagtgaatagcgtggctaatccatctaagaacaatgcacgaaaacgaaaaacggagaatcctgcccggcagttaatttgttactcatacttgttgaacttaagatttggagctaaataagtgcagatgagagcaaagacccatcttttaaatatttaagcttttaggcaaacctgggcaggcaatatcacatttatcagtgcgaattctccaatgctctctaaaactttatttcaatgatctcacctcctgtaaggaattaattcccccttagcttgaccacaggatcaatatcttatcttaagaagtgtttaggttttctaaaaaaagaccagacactgaagacttacataaacatcaaagcattctttttttaattcctcgatatggagaaattcataggccgaaaattaggtaaatagagaggtaattaccaatgcctgtttccttgacaactcccctcccccacccctcctgtgatagggaaaaaccaaaatgaaagtgaggaggggtagccacaagccatgctggattttagcaaaccaaagcaagaagcagagcagaaagctgcaaactagacacaaaatacaaataaatcaatgtatatcggggctgcatattgtgtagtatttttgtggttgccatagaaacgtcagcgacggaagaacatgttgcatgacacaaaagagagcaatatgtaataggaacattccccccaccaccaccccccgcccagcttcgtctatagcagagaaaatgctttagccccgggagggggctgggtgggtgggtaaatgaagccaggaacagcagcttgaaatcacagcccagaaagggacgctcacccggcccagcacaaagcgagggtccttttgtaccagcagagcctctcttcgcctccctccaggcgccccctgcacctttcccccgcccgccttgcactccccccccgcccccggagcctaccccttccagaggtcctaaggaaatccagcccaggagagaaaaatatgctgggaagaggaatgcaaacatcagccacacccagcggggaaggtgcctgcgaacggcaccaggaccacatacctccttcctggcagcctttggcacatggacttagaaaccagaagctgagatggagccggctgggttcagaaattgccactagtttataagagctgtaagtcagccaacactggaaagaaaaagcgagactccacccatggggtggacccttcaggaagaaaaaaaaaaaaaaagtggtcctcagctgacgtctctccccacccatgtcacttccttttaaagctacaagttagcagttgccgagagggaagagcgagctggtgtaatatgagtcactcccttccccttccaattagtgtaaggcagtgcttcagttggcttcacgtttgaaatcgcttttgaaatctggctcgggaagctgccaggataaaaaaaaaatgaaagccccctggaagtggccttgctttctctcccctttctcccaaatcctgttgcatccctgcgccctaacggctcctctaacctcaacccagactccggctccgtctgtgttgcaacctggaaattgtcctcagttggctcatttttaattcagcaagcgtaggatcaatatgcccaccctcaaaactctcccctcacctctcctcggtccgctgtgctggaaggagattgcgttgcactcagaagagtccaaatcatcttaaacaaaataagcctcagcactcaagagattgagatgttatgaagtgggatgaaagaagcttggaggtcgattgatgtattttctgttttcaaaccttagcaccatggttgattaccactgcacaggcgtgcacacacgtactgtcgcatgctcacatgcacgtggcatttacacaggtgtatcagagagggtctgggcagacctttatagtaaaagtgtcttcacaatttttaaaaagggtgggctgttgaaagtccagaaatgccaggatctagaaaattatttcaatttcaaaatactgaggtgtattcctttcaaatgtccactattacagccattgtcaaaataatatttaactatttacttgactcctgggttaaccttgttctttagatgtttataatctataaaggaaaaatacatgtgctcacaaatagcccaagcacattgcagaattactaacagctatgcaagtgtcaaaaccagtgtgtcatgaagacagaatagaaagtgcttttttgattgcgatgggggaaggcattgatcattcaggaaacagggtttggagtgggtcctatgggaggtggcatttttcttgtctgtgatgagagacggggagagtgaagcagaatgtggtggaagagaaaggatatgtgaggcaaacaaaaaaaggatcagaacagaaacccatttgtagcaataacttgttttaatatccatgtgaaaataaatttgaccacagagtaatgcttataaaagatttttataaaaagttccttgtagtcatcatctctcgtaacttttcgaactatgttttacgacccatgtgcttctagatttggtggaaacttgagtttttcaaagtgtttttcaagtagagttacactgtttttcacggttgaattctgaatggtaatttatttcaaaacctacaaattgcataaattcctgataatgttataagtacagtcagtgatttcagtggaaatgataggaaatttaaaatttggacaattgtaacttttatcctgatctcagtactttaacatcctcattccattattacattacaattattattatacttattattgctaacactttgcctgtctagacaatgttgctcagtcccagttatctcagatatagctgagaaatatgggagaaaaagttactatttctaaaaatttaacatagaaattcaaaattcatggattaaatcctatgcttttttttttgagacagagtcttgctctgttgcccaggctggagtgcaatgatacgatctcagctcactgcaacctccacctcctgtgttcaagcaattctcgtgctgcagcctcccaaatagctgggattacagacatacactaccacacccagctgattttttgtgtttttggttgagacgaagtttcaccatgttgcccaggctggtctctaactcctgacctcaggtgatccacctccacctcccaaagtgctgtgattacagg

SEQ ID NO: 584803 - DNA, 4001 bp, Homo sapiens
aaagcgagtaaaaaagactcaggcttgagctctagtgtcaccacttactgatgtgtggccttgggcaagctacttaatttctaatccttggtttttccttgtctgggaatttaaaatggcacctattttagtactgtaaggagaagagaaaataccaaaaagcaaagtaatcagtacattgcaataaaattactttatgtccattattattgtattaaaaataagtaaataattacaaataaaatatataaatcatatacttatttactattaacagcttaatacacaactaaactaataaatactaatattatgtaatgataacacagcaaatacagtacagaaatcatctctaattttttttttttggagacagagtctcgctctgttgcccaggttggagtgcagtggcacaatctcagctcactgctgcctccgcctcctgggttcaagcaattcacctgcctcagcctccctggtagctgggactacaggtgtgggccatcacacccagctaatttttgtatttttagtagagatggggtttcaccaacattggccaggctgatactgaactcctgacctcaagtgatccacccactttagcctcccaaagtgctaggattacaggcgtgacccactgcgctcagccatctctaaatcttaatatgtactacagcaaacatgatagaattaacggctaatatttgattagtaacctctgcaaaaaatcagataggactttaaaagacacctctgattcttatatattccattattttacaacttctccctcacaaaccctttcacaggagcgtctaagagatattacacaggaaaattaaatggattacatttcatctcattttattttacagacaacctgattatcagccaatatgtggctcaatatcattgggagaaaaaactgagaggcttgataattcgctccttaaccaaatgttatcgcaagggaaaaaaagacaaacaaaaatcctgtatacaaaattcaatgaataaatcaacaagattcttcataagtaaacaagattctaacttcataaatattattcctcataaacaagattctaggtatggtttaaaaacacttttggtatttgaatttctttcaagcattctttaaaaaatttcccagagtactcataagaagcaatcttcctcctaacgcccaagcagtaacagcaactgttaatgcaacaggtgaaaaaatcgttggcatctctttctcaaaagaaaggggaaagctttattttcacaatagatgtttttacaggaatgctaaacgcagcacaacctttgataaggattcttaaatggtctacatttttgttctatttttatgcatctcgaaacaaccctattaatataatttggctcttataaatataacaaattgatcaccttttctcagacataattaagaaggctttgacaggttgaagattcagccccaggttgacactctaaaaggaaataaacacactcagtacacatctgatttaaaagcatttaaataagaatcgggagtaggaaaggcaaagattgaattctctatcagagcaccatgctcaactctccggggacacggagaccagtgaaagaagcgcaaaagtacggtgaggactctcagaaatcgcattcccccgggacacccggcccacgctcgtcggtcactacgctatcagcctccgcgctctcggactccagcagccccgacacgccgcccaggagagggccgggcaggccgagcaccccggcccgcgctcccgccaccagcgcacccatgatgtactcacggagaggggtacgcagaaccgcccgtcccgccggagccgacacccggagcagtgcaaatcaactcccccagcctagcggcgcgtgcgcgaagtgaggcggccacgcagccacctaacccgccagcgacccgtgtcctgaaagcaagccgcggctctgtgccgcagtgcggacagcgcgccgcctgctgacgtcagcgcctgcctacgccgccgttcccatggcgaccgatgcgtcccgcgctctaggcgaagaccgcggccccgtccccgcgcctccaccgccttcttccaggaggaggggccgtgcggcgcctgcccgggggccctcaggccgcaggcgggcgcgagcttcagggaacttagggggctcccgcctccccggccacgcgagcgggaacagtctcctccactcggagcggtaagggacccggaaatgcgcgggtgcccctacagagtcttgagttttccccgccctcacctccgaaaatgctcttttcgccttagaattgtagctagcgcagggaaaaactgactgggcaaaggaaaactggggaggctgtcatggaagccgcccagaataagaaaatgaatgaatgaggcaaagaaacagatttgtcactccccacgcgatcgcgcccacaaaagaaaacatggttttaaggcgtggaaaatgaagttgtactacagacaaaattttaagaaaaaattatccactgttcctttagagctatctccctgtgtgtgaaaaacaaaacaaaagttaaaacgccatccttttctacacctaatgctccctcccacttttctgatttctgccacaggcgccatcttcagctctgagtcaccagggctggaaaaatactagatgcgctactcgtggactcgtgaatacactcgtgaatacaggccatttcctgtacctacagccacccgctgtaagctgttgcttcatttgtacagtaagagtttatggaggccagcttttccattcttactgacattgccacaccttacaaactatatgtcttgtgcttccctaaatcctgtgaggaagcaacgagaaagattactaatccaatgcgtaccgaactgagctgttcaactttccgttctaaacatactctcctagatttctatcttgctgtaagccaccacaatcctcccagtgttttagtaagaacagtagagtatcctaaatgcatcttatgccaaagcatatccattctctctttttaacttcctcagatgggccctttaccagttctctgactccagtttgactcttaaattctccacactgctatcagaatgacctgactaaaaatgtaaatcggataatggcactctcctgctgaaaatttttgaaaggcaatctgtaagagaaaatgattactttgcctaggatacaagattctccatctccctgactagtttcatctctcgttagcttcttgttccaattttatgcaatattgaatcatgtgtaccatgcagttttatgcaacattgaattatgtgtaccatgaaaaacaatccatagcctttcacgccccgtccttactcatattgtcctctcttcctgaaaattcctccttttacactcctgcatcacagccaaatgttgtccatcctttgaatcttaagcaggttgactgactccttcaaacactcctactccctattagacttcggatactcattctatatattagactttggatgctcattctatagtttcatagtttactttgtattttctctatccccagcatctaccacagtgtctatgaaatagttggcatttcatgaacatttgttgaatgaataatggataacatatattgagctccttctaggaggtatgcattgtaggtgttttatgtacttttcatctgtcctcacaactgcatttaagtacctgcttttccaaagggaagttataactctgactgctcattcttagtagggtgttagtttcagaatacaatccccagactagcggatgtgtaaccctgttatcatctcttgcttctccatttacagtagcatgcagaggtgcagtggggtgggggaggtcagggaatatttcatagcagaagtgacatttaagtaaagaccaaaataatgtgtagagttgtccaggttaggaagggtttccaggtagaagaaggtggcgtatagtgt

SEQ ID NO: 584804 - DNA, 4001 bp, Homo sapiens
ggcctgagtaccttgtttggacatgtgtttttgacctgcctgcattctttgaggttaaggctgtcttacacagctggaatcccccttggtgcgtgaaaccatctgctgtagtggacacactatagcgttgttgatggattgttcatatggccaaatccttgccacctttccctcaagacctgtctctccttcccaaacccaggaaaaaaatcacccaaataaaaactaagctgacttgatctggaggagggggtaatttatttaatttgttgactctggcttacaattttgtcttctgtttccatatctgggtcattagaagccccttcaatcccatcatcccttttcccttcaaatcagggcaactcagagatagctttcttggctggggggcctgttggcttttccttttctctcgctttttcctcatacatcaggatcctggttgagatgggaagaggcacagggatcagggaacactcctctcaagggaataaatcatagggtgctaggaaaggctagaaggggatggggatgtgagggtggaagggggaagaggaagggcaggggttggagtttctggggaccaggactatggatagggatggggtcgggaccttggaagggtccctctaaggatggaagaagggatgatgggcaacgtgtagaaatgttgagcctgtggacaagggtagggatgggggaggagaaaacaggtaagtacaggggaggttggaaattgacactcacatttttaggatggcagatctcttgcccagcatcatcctgagaaagtcagggtagctgaacgtctccccggagccactggacacctctccaattaatttctttagctctaggtgagtcttggggactccaagtttctccagcattcgtttcagggacatgatatctgggggcagaggatggggatggggagaaggtggggagaccctctctctcctctcccacttccgcatccccattctccttcctcccactgtggtaggtgggccccctcccaaatcatgaggaatggagcatgtaggagagacctctgtcttcttaggcctgcacaccaccctgcccccgcaaatcacccgtttctcaccaatatcgccatttccattaaggtcaaactccatgtatttctctgggtgaggggagagagcagaagggataagcgctgactggagggttttcagcaggggactgaggaaggggttgccaaccaactgctaggtggaggagacaacgtggaaggaggaggaggggcaggcagaggaagtggggttggggagttgaggggccccgctagggtgtaaggagctagaggggatgctgagagaggcaggcccgggaaagggaccgcagtgtggcaggagggcaataaaggcaggttccccttttgctaccacaaaagtaaactttttatctctgctgttcctgccttgttcttgtggaaatcctaaccctcctacccccagccctgtctccaccgcctacagtttccccctcacctttgaagccttccagtttggagggcagatcctcatcactgctatatttgggatcgtctaggaattgctatggaggggaaaataagagccagggtaggccctccccatccacgccccatccccctggctctgcccccttagttcttccttctaccttgttgatctcatccagcctctcttcctgctgggccttcagcagtccgaaagcttttcctcctgtggggtgaaaaaaattaatcagccctcatccctcccttcctctccttaccctgacaccagcccgggctaccctaggccagctgactgccctcctagcccacagcccaggtctgtccatctcattcctccgatctaatgccgctgcctatcccaccctccctaccctgtaaatccctggtttggctcatagctcagcagatgctggtagaggtggggagacagaccaagctggaggcctctgtctgcaggctctccttctctcccaccagtcttctcagaagccttcctcccaaacttcccctttcccctcattccttcctcctctgcctcccagacctcacttccccatcaggttctgctgacactagcaccccaggaaggagggggagcctggtgtgaaatgcagattagaaaataacattctcccaaattcctcttaaatgagagcccagtgtgcgcatgaaacaaatattttgataagccactggaggtgtgcaggaagggcaggaagacaccagggatatttattctcaggaactagtatttttgaacaggtccaaggttcaggtaatgataagaccttgcattttgtcaggtttcatgagtctgggcaggcagctgtggataggaagacaaggaagggctggctgaatttttctgctctgtagatcggagaagaatctgaagtctgctggcagctccaggagggtgacaagatgggcacagggtttagaaagggagagaaacctcactcccagcctggcagctccaaggaggcccttaaaaatatggaaatgtctaacaaaacattttaatttgtttgctttagaatgtgcaacgtaaccctctcatcttatctcctttgaaatctttagtaaaatctatagagatcaggaatttaagagtttaagtagattctttggaggaactgaaagtggtacttaaagaaacagcgtttgtggacagaagagccagggagtgaggctgacatcaggtttgcacactgcacgtgcgtgcacacatgcaggcatgtttgtgtgatggtggtgctggtcactgtgggttcaacagagtggatgatagcctctgacacatgcctccctaggcataacctttatcccctctgtcactctgtttggccagtcgcttcttggagaggtgaggacagcacatttccctcattgagatttcctggtccaaactccctgcccagggctccatctaccctgccccggcattgatgaagacacctttccttctcccttccccccaacatatttccttttctgtagctgggagttttcacttctcactgccctctccctgacccaagccaggtaggggagatgctggagtggcctctggctgctgctgctgcttttttttttttttttgagtcggagtcttgctctgtcgcccaggcgggagtgcaatggtgcaatctcggctcactgcaaccactgcctcctgggttcaagcaattctcctacctcagcctcctgagtagctgggactacaggcgcccaccaccacgcccagctaatttttgtatttttagtacagatggggtttcgccatgttggccaggatggtctctatctcttgaccttgtgatccacccacctcagcctcccaaagtgctgggattacaggcatgagccactgcacctggctggactctggcttcttgacttccctttattgcagctacattctcctgctgcagagagagctgcaaccctgtactcccaatgttctcagtgcctgctgggaggaactcacttctttattcatacgttcactcaacagatatttactgaatgcttactatatgccagacatgcctctaggcccagagaacccaacaaatgaaaactcttgtcttcatggttgatctaattggggaaggcagacaatacaaataaataagtatattaaaggtgctaggtggccaggcgcagtggctcacgcctgtaatcacagcactttgggaggctggggcaggcggatcacaaggtcaggagttggagaccagcctgaccaacatggtgaaaccccatctctactaaaaatacaaaaattagcagggcctggtggtgcgtgcctgtaatcccagctgctcaggaggctgacgcaggcgaatcgcttaaacccgggaggcagaggttgcagtgagctgagatcgcgccattgcactccagcctgggcaacagagtgagactccgtctcaaaaaaaaaaaaaaaaaaaaaaaaaaggcgcca

SEQ ID NO: 584805 - DNA, 4001 bp, Homo sapiens
ctgcattctttgaggttaaggctgtcttacacagctggaatcccccttggtgcgtgaaaccatctgctgtagtggacacactatagcgttgttgatggattgttcatatggccaaatccttgccacctttccctcaagacctgtctctccttcccaaacccaggaaaaaaatcacccaaataaaaactaagctgacttgatctggaggagggggtaatttatttaatttgttgactctggcttacaattttgtcttctgtttccatatctgggtcattagaagccccttcaatcccatcatcccttttcccttcaaatcagggcaactcagagatagctttcttggctggggggcctgttggcttttccttttctctcgctttttcctcatacatcaggatcctggttgagatgggaagaggcacagggatcagggaacactcctctcaagggaataaatcatagggtgctaggaaaggctagaaggggatggggatgtgagggtggaagggggaagaggaagggcaggggttggagtttctggggaccaggactatggatagggatggggtcgggaccttggaagggtccctctaaggatggaagaagggatgatgggcaacgtgtagaaatgttgagcctgtggacaagggtagggatgggggaggagaaaacaggtaagtacaggggaggttggaaattgacactcacatttttaggatggcagatctcttgcccagcatcatcctgagaaagtcagggtagctgaacgtctccccggagccactggacacctctccaattaatttctttagctctaggtgagtcttggggactccaagtttctccagcattcgtttcagggacatgatatctgggggcagaggatggggatggggagaaggtggggagaccctctctctcctctcccacttccgcatccccattctccttcctcccactgtggtaggtgggccccctcccaaatcatgaggaatggagcatgtaggagagacctctgtcttcttaggcctgcacaccaccctgcccccgcaaatcacccgtttctcaccaatatcgccatttccattaaggtcaaactccatgtatttctctgggtgaggggagagagcagaagggataagcgctgactggagggttttcagcaggggactgaggaaggggttgccaaccaactgctaggtggaggagacaacgtggaaggaggaggaggggcaggcagaggaagtggggttggggagttgaggggccccgctagggtgtaaggagctagaggggatgctgagagaggcaggcccgggaaagggaccgcagtgtggcaggagggcaataaaggcaggttccccttttgctaccacaaaagtaaactttttatctctgctgttcctgccttgttcttgtggaaatcctaaccctcctacccccagccctgtctccaccgcctacagtttccccctcacctttgaagccttccagtttggagggcagatcctcatcactgctatatttgggatcgtctaggaattgctatggaggggaaaataagagccagggtaggccctccccatccacgccccatccccctggctctgcccccttagttcttccttctaccttgttgatctcatccagcctctcttcctgctgggccttcagcagtccgaaagcttttcctcctgtggggtgaaaaaaattaatcagccctcatccctcccttcctctccttaccctgacaccagcccgggctaccctaggccagctgactgccctcctagcccacagcccaggtctgtccatctcattcctccgatctaatgccgctgcctatcccaccctccctaccctgtaaatccctggtttggctcatagctcagcagatgctggtagaggtggggagacagaccaagctggaggcctctgtctgcaggctctccttctctcccaccagtcttctcagaagccttcctcccaaacttcccctttcccctcattccttcctcctctgcctcccagacctcacttccccatcaggttctgctgacactagcaccccaggaaggagggggagcctggtgtgaaatgcagattagaaaataacattctcccaaattcctcttaaatgagagcccagtgtgcgcatgaaacaaatattttgataagccactggaggtgtgcaggaagggcaggaagacaccagggatatttattctcaggaactagtatttttgaacaggtccaaggttcaggtaatgataagaccttgcattttgtcaggtttcatgagtctgggcaggcagctgtggataggaagacaaggaagggctggctgaatttttctgctctgtagatcggagaagaatctgaagtctgctggcagctccaggagggtgacaagatgggcacagggtttagaaagggagagaaacctcactcccagcctggcagctccaaggaggcccttaaaaatatggaaatgtctaacaaaacattttaatttgtttgctttagaatgtgcaacgtaaccctctcatcttatctcctttgaaatctttagtaaaatctatagagatcaggaatttaagagtttaagtagattctttggaggaactgaaagtggtacttaaagaaacagcgtttgtggacagaagagccagggagtgaggctgacatcaggtttgcacactgcacgtgcgtgcacacatgcaggcatgtttgtgtgatggtggtgctggtcactgtgggttcaacagagtggatgatagcctctgacacatgcctccctaggcataacctttatcccctctgtcactctgtttggccagtcgcttcttggagaggtgaggacagcacatttccctcattgagatttcctggtccaaactccctgcccagggctccatctaccctgccccggcattgatgaagacacctttccttctcccttccccccaacatatttccttttctgtagctgggagttttcacttctcactgccctctccctgacccaagccaggtaggggagatgctggagtggcctctggctgctgctgctgcttttttttttttttttgagtcggagtcttgctctgtcgcccaggcgggagtgcaatggtgcaatctcggctcactgcaaccactgcctcctgggttcaagcaattctcctacctcagcctcctgagtagctgggactacaggcgcccaccaccacgcccagctaatttttgtatttttagtacagatggggtttcgccatgttggccaggatggtctctatctcttgaccttgtgatccacccacctcagcctcccaaagtgctgggattacaggcatgagccactgcacctggctggactctggcttcttgacttccctttattgcagctacattctcctgctgcagagagagctgcaaccctgtactcccaatgttctcagtgcctgctgggaggaactcacttctttattcatacgttcactcaacagatatttactgaatgcttactatatgccagacatgcctctaggcccagagaacccaacaaatgaaaactcttgtcttcatggttgatctaattggggaaggcagacaatacaaataaataagtatattaaaggtgctaggtggccaggcgcagtggctcacgcctgtaatcacagcactttgggaggctggggcaggcggatcacaaggtcaggagttggagaccagcctgaccaacatggtgaaaccccatctctactaaaaatacaaaaattagcagggcctggtggtgcgtgcctgtaatcccagctgctcaggaggctgacgcaggcgaatcgcttaaacccgggaggcagaggttgcagtgagctgagatcgcgccattgcactccagcctgggcaacagagtgagactccgtctcaaaaaaaaaaaaaaaaaaaaaaaaaaggcgccaggtgcctatggaggaaaacaaagtagggaagaggggaca

SEQ ID NO: 584806 - DNA, 4001 bp, Homo sapiens
attctcctgcctcagtctcccgagtagctgggattacaggcacctgccaccatgcccagctaattttttgtattttagtagagatggggtttcaccatgttggccaggctggtctccaactcctgatttcaggtaatctgcccgcttcggcctcctgaagtgctgggattacaggcgtgagccaccacgcccagctgtaaattctttgctttatttaatagcaccagttctttcattcatctacccattcaagtgttttttgtttgtttgtatgttcggttttttttttttgagacggagttcgctttttagttgcccaggctggagtgcaatgatgcgatctcggatcaccacaacctccacctcctgggttcaagagattctcctgcctcagcttcccaagtagctgggattacaggcatgcgccaccacaccaggctaattttgtatttttagtagagacggggtttcttcatgttcgtcaggctggtctcgaactcctgacctcaggtgatctgcccaccccatcctcccaaagtgctgggattacaggcataagccatcggccccggctcattcaagttttaaacattattgagggcttatgatatgtcaggcacaatagcataggtcactttatccccatttttagaaaaaagcctcacagaggctgagtgatttgtcaaagtgacaaagcttatagtggtggagaatgttggttcatggtattccttgctcttcatgaaatctgtcatgggcctgagtaccttgtttggacatgtgtttttgacctgcctgcattctttgaggttaaggctgtcttacacagctggaatcccccttggtgcgtgaaaccatctgctgtagtggacacactatagcgttgttgatggattgttcatatggccaaatccttgccacctttccctcaagacctgtctctccttcccaaacccaggaaaaaaatcacccaaataaaaactaagctgacttgatctggaggagggggtaatttatttaatttgttgactctggcttacaattttgtcttctgtttccatatctgggtcattagaagccccttcaatcccatcatcccttttcccttcaaatcagggcaactcagagatagctttcttggctggggggcctgttggcttttccttttctctcgctttttcctcatacatcaggatcctggttgagatgggaagaggcacagggatcagggaacactcctctcaagggaataaatcatagggtgctaggaaaggctagaaggggatggggatgtgagggtggaagggggaagaggaagggcaggggttggagtttctggggaccaggactatggatagggatggggtcgggaccttggaagggtccctctaaggatggaagaagggatgatgggcaacgtgtagaaatgttgagcctgtggacaagggtagggatgggggaggagaaaacaggtaagtacaggggaggttggaaattgacactcacatttttaggatggcagatctcttgcccagcatcatcctgagaaagtcagggtagctgaacgtctccccggagccactggacacctctccaattaatttctttagctctaggtgagtcttggggactccaagtttctccagcattcgtttcagggacatgatatctgggggcagaggatggggatggggagaaggtggggagaccctctctctcctctcccacttccgcatccccattctccttcctcccactgtggtaggtgggccccctcccaaatcatgaggaatggagcatgtaggagagacctctgtcttcttaggcctgcacaccaccctgcccccgcaaatcacccgtttctcaccaatatcgccatttccattaaggtcaaactccatgtatttctctgggtgaggggagagagcagaagggataagcgctgactggagggttttcagcaggggactgaggaaggggttgccaaccaactgctaggtggaggagacaacgtggaaggaggaggaggggcaggcagaggaagtggggttggggagttgaggggccccgctagggtgtaaggagctagaggggatgctgagagaggcaggcccgggaaagggaccgcagtgtggcaggagggcaataaaggcaggttccccttttgctaccacaaaagtaaactttttatctctgctgttcctgccttgttcttgtggaaatcctaaccctcctacccccagccctgtctccaccgcctacagtttccccctcacctttgaagccttccagtttggagggcagatcctcatcactgctatatttgggatcgtctaggaattgctatggaggggaaaataagagccagggtaggccctccccatccacgccccatccccctggctctgcccccttagttcttccttctaccttgttgatctcatccagcctctcttcctgctgggccttcagcagtccgaaagcttttcctcctgtggggtgaaaaaaattaatcagccctcatccctcccttcctctccttaccctgacaccagcccgggctaccctaggccagctgactgccctcctagcccacagcccaggtctgtccatctcattcctccgatctaatgccgctgcctatcccaccctccctaccctgtaaatccctggtttggctcatagctcagcagatgctggtagaggtggggagacagaccaagctggaggcctctgtctgcaggctctccttctctcccaccagtcttctcagaagccttcctcccaaacttcccctttcccctcattccttcctcctctgcctcccagacctcacttccccatcaggttctgctgacactagcaccccaggaaggagggggagcctggtgtgaaatgcagattagaaaataacattctcccaaattcctcttaaatgagagcccagtgtgcgcatgaaacaaatattttgataagccactggaggtgtgcaggaagggcaggaagacaccagggatatttattctcaggaactagtatttttgaacaggtccaaggttcaggtaatgataagaccttgcattttgtcaggtttcatgagtctgggcaggcagctgtggataggaagacaaggaagggctggctgaatttttctgctctgtagatcggagaagaatctgaagtctgctggcagctccaggagggtgacaagatgggcacagggtttagaaagggagagaaacctcactcccagcctggcagctccaaggaggcccttaaaaatatggaaatgtctaacaaaacattttaatttgtttgctttagaatgtgcaacgtaaccctctcatcttatctcctttgaaatctttagtaaaatctatagagatcaggaatttaagagtttaagtagattctttggaggaactgaaagtggtacttaaagaaacagcgtttgtggacagaagagccagggagtgaggctgacatcaggtttgcacactgcacgtgcgtgcacacatgcaggcatgtttgtgtgatggtggtgctggtcactgtgggttcaacagagtggatgatagcctctgacacatgcctccctaggcataacctttatcccctctgtcactctgtttggccagtcgcttcttggagaggtgaggacagcacatttccctcattgagatttcctggtccaaactccctgcccagggctccatctaccctgccccggcattgatgaagacacctttccttctcccttccccccaacatatttccttttctgtagctgggagttttcacttctcactgccctctccctgacccaagccaggtaggggagatgctggagtggcctctggctgctgctgctgcttttttttttttttttgagtcggagtcttgctctgtcgcccaggcgggagtgcaatggtgcaatctcggctcactgcaaccactgcctcctgggttcaagcaattctcctacctcagcctcctgagta

SEQ ID NO: 584807 - DNA, 4001 bp, Homo sapiens
tcggtgtccccctccaaagagcccaccacctggctgcgccccacctccatttgtcccccagttgccaggtaagggtacccagctaccaggtaacggtgagtggttcagaaggtgccgctgcgggggcagccaggccttcacacgcaatcactggggaagaggcgaggacacgggtggatgctggaggcgcgcacgtgcgcaggtgctcgcgcatccacacacacacacacacacacacacacacacgcacacacaggcacggggtgcggggcgagcagggggaggggacggccttaccagatcaatgaacgtcaggaatttccagctccctccgtaggtctggtgtgagggcatttcgatggccttgtagttacacaggatagagcagtaagacagcaggattgccatccgcagcacctggcaggggacaagcgccatgttcgccagaggcctggaccggctgggcggcaaggagggcgggcgtgagggaggcgccgggcgcgcgggggcgggcgccgtgggaacccgggcgcgggcgcgggcgcggggcggggcggggcgggggcgggggcgggggcggggcgcgcgcccccggggactggcgcggccgcgagcgcccgggtgacctgtactggccgggcgcggtttgcggacgctctccactgccggccgcggcctggcaggcggcgtgtcgtcatctctttcgtcaccttcgtcattctgctcctgcgttcgcagggtcccgggacacccggccaggaggcgccccctaggcatcccaggtgtggatgcgacctctgagtgctacgagggctcgggaagtgcgcgctgatctccagggggaagcgggccctgtggctagtgggcgccgggccgggcgagggggcggggaacctagactgaaggagtggaccccagtgtccacaaatgttcccgccccggaatcgcggtgacgcttcctggggtagttgcagttggccgagagctggtgccccgtgcggagggatccggtgggggtgtgaacgtggggtgtaaacccgagcacaggcagccgcgagtgactttcagtattttggggcaataaggttttcagtgttgacaaacgactgtcaatcactaggaaactctctcaattctgctttcaatgggtaggctacgcagcacttttccatgacagattgaataatgtcatatcagtatataacatcagctagaatatgaactttggacaagaggtttatagataaaaagctataaagaaaggattttcaaataactttctgccacaagattgcattcagctttaaaaaattccaattttggatgtaaaacccctgcgtgtaatttaatactaatcatctggttgttaaactggttttgcccttacttttttcttacactacactaccagggcttaatggaaggaaaataaatataaactggagtccctcctgccttccagtaaatgttgtcacactgaagttgcatcagtctgtgggcaacattttcatttcagccaaccagttgcaggttcggattatgaaaaggcaacataggtatttcctgtggatccatttaaaacaggtgtcctcttcaaatagtctctgagtcagaggatgtggagggagggctggtggggagaagcatagtgctagaggtaaagagaaagtagcaagcaagccatggatgttttcctgaatgtttccaatcaagctctaaactaaaatgaagagacccactagatttttttaattggcattataattatgctaatagaactgatgtcagaagaagattctactagcattaaaacgatgtattattgatgatttttggttaaatcttaatgtaaaagttggctttatttttttaattgtgcatccttggtacatggttataaactgccaaaaaaataaaaataaaaaagagtagatctattgaagatctacctaccttaataatgtgtctggaattggttcctgccggtagattagtggtctcagtgacttcaagaatgaagcggcagaccttggtggtaagtgttacagctcttaaagatggcacagacccagagtgagcgatagcaaggtttattgtgaagagtgaaaggacaaagcttccacagcatgaaaggggactggagcgggttgctgctgctggctggggtggccagcttttattcccttattgtcctctccagtgttctgtttctgtcctatgagagtgcccttttttcagtcctccctgcgattggctacttttaaaatcttgctgattggtgcgttttacagagtgctgattagtgtgttttacagagtgctgattggtgctttttacagagcgctgattggtgcattttacactcctcttgtaagacaggcaagttccccaagtccccacttgtctcaggaggtccagctggcctcacctctcaatagagccttaataaagttttatgagttaatgtgatatttgcaaagtttgatatacccttcctactttacatgttagacaattattaagactccccaaccccattgttacaaaatgaaataatattttcataaagccatttttaatggtcaggttttttgttttgtttttctttttgtttttttgtgagacagagtctagctctgtcacccaggcggaagtgcagtggcatgatctcagctcactgcaacctctgcctcctgggttcaactattctcctgcctcagcctcccaagtagctgggactacaggcgcatgccaccacacctggctaattttttttgtatctttagtagagatggggtttcaccatgttggccaggttggtcttgaactcctgacttcaaatgatccacctgcctcggcctcccaaagtgctgggattacaggtgtgagtcactgcgcccgaccagtttcttttaaataaataactataactcttaattaagtatttagaacctattctgctgggtttgcttttgttttttcatgatttgccaaccatgatcagatagttttgtgctttaaaaaaatgaagcgtttgtataaaacttgactcaaatactattttatgagaatgtcagttcacaatttttggaacttcttgataactattaacatgtccaggcttgctttctgtgcttttcagaccatatctaacaatcttagtcatgttttacagataacttttgtggaaaatattaatctacacacattgtgtttttacagcgtaaacaattgcttttaaaacttcattaggtaagttattactttttatgaactataatacattattcacttctaagtattcttatgatgattccatatttgatttagataatactgttttctatgtatagaagaaatatttgcatgtctttttttttatctttttcattctactacacagttagtgagactggaggagaaaagcctcatccagttgaatttcatcaatagcagtaaacataagaaacaccaagggaagatttcaagaacccgttttagcttcaagctatattctttgattgttgtaatatttcttagactatatatggggctgaagataccctttcttaagtacttctaataattgagacagactgttcattccttttttttcttttggagggggggtgtattagtccattttcatactgctatgaagaaatacctgtgattggataattcatagagaaaaagagtcttaatggactcacagttccacatggctggggaggcttcaccctcatggcagaagataaaggaagagcaaagtcacatcttacgtggtggcaggcaaaagagtgtgtgcaggaaactgccctttataaaaccatcagatctcctgagacttattcactatcacaagaacagcacaggaaaacctgcccccatgattcaattacctcccaccagttccccccctacaatgcgtggagattaagggagctacaattcaagatgaaatttgggtggggacacagccaaaccgtatcagggaggat

SEQ ID NO: 584808 - DNA, 4001 bp, Homo sapiens
cagtgtcccaaaaggagttttgctcacatagcccctcaaagaattctgaaaatctatgcacatatttttaaataacatctcaacatccttaacatagttaagtgtaaacacttgaaaaagggacatctttctggcgctctatgggtggtatgcttgcttcatatacatatgcatcagaacctcagggttgcagatttagctcattcagtatacagaaaatgtctgctacacaacataattggcaaagccaatcctcattgacaagccaatcaacccaataagactttctgtcaaggcaactccgacattgttgttcaatcaaatataaagatagccctggtgacaaccatctatcttctggaagctaaaaggaacagacagaaaagcacacctcagagtcttgtcacgggctcctcacttggatgaatggggagaatgaaaggagaactggcaggcatcacgcatgttcagagggaaattagtttcaagcagagttggaagatgaggatctgaaaattaaaacccttgcaacattctataccctgtgaagtcttgtgggcctaagggtatgtgcacagtttggagactgctgggcaacagaattgaaattccactctgaaagtatctaatataatgcaaatataaggtgttatttttaaaccaaaagcctctctgcatttctttgaggcatcctaagcctttggaaatttttaaaacaggtatcatgttctcttcatcagaatggagggtcaacaagagattataatcttgctggtgtagccaaccaactgtatagtcttggataaacagttcagggagtcccaggaattggttctacaatttctctgagtgctttagaacttcattgcttttgttttaagcctcttcctaataatcttttagcgtgtgtcttagtcacctttaccctgaaattcctaggtccatccatgagttcattattgggccttatgcccatgttctgttctccagggaggttgaagagggccttttagtgccagaaatagaaaaactttcaaaatgatatactaataataacctgcacctgtcaagattatcatattgtgccaacagaggagctgcttatgcaaactactgtaaatttgtacatgggaagacagagaagtgtgtacagtcaccttggaaatgcactttgaacatctctgtctcctaatatgtacggggtaaaggttgaaagtaaattattgacaatgggggaaaaaaacagatgcaaagaagacaactttattaggtgctttctctcccttatgagaaggatttggttctttcaggtgaagttccaaatcactagacaatacccagtttccttcagttgcaacaagttcatcccacggtgggtgctctgaaaagcaccttgagggcgaatgggtctcaggccattcaggatcaggtccgatgcttttgttgaagattcttcccgtgtcacctcttagaagcagttcggtgtccccctccaaagagcccaccacctggctgcgccccacctccatttgtcccccagttgccaggtaagggtacccagctaccaggtaacggtgagtggttcagaaggtgccgctgcgggggcagccaggccttcacacgcaatcactggggaagaggcgaggacacgggtggatgctggaggcgcgcacgtgcgcaggtgctcgcgcatccacacacacacacacacacacacacacacacgcacacacaggcacggggtgcggggcgagcagggggaggggacggccttaccagatcaatgaacgtcaggaatttccagctccctccgtaggtctggtgtgagggcatttcgatggccttgtagttacacaggatagagcagtaagacagcaggattgccatccgcagcacctggcaggggacaagcgccatgttcgccagaggcctggaccggctgggcggcaaggagggcgggcgtgagggaggcgccgggcgcgcgggggcgggcgccgtgggaacccgggcgcgggcgcgggcgcggggcggggcggggcgggggcgggggcgggggcggggcgcgcgcccccggggactggcgcggccgcgagcgcccgggtgacctgtactggccgggcgcggtttgcggacgctctccactgccggccgcggcctggcaggcggcgtgtcgtcatctctttcgtcaccttcgtcattctgctcctgcgttcgcagggtcccgggacacccggccaggaggcgccccctaggcatcccaggtgtggatgcgacctctgagtgctacgagggctcgggaagtgcgcgctgatctccagggggaagcgggccctgtggctagtgggcgccgggccgggcgagggggcggggaacctagactgaaggagtggaccccagtgtccacaaatgttcccgccccggaatcgcggtgacgcttcctggggtagttgcagttggccgagagctggtgccccgtgcggagggatccggtgggggtgtgaacgtggggtgtaaacccgagcacaggcagccgcgagtgactttcagtattttggggcaataaggttttcagtgttgacaaacgactgtcaatcactaggaaactctctcaattctgctttcaatgggtaggctacgcagcacttttccatgacagattgaataatgtcatatcagtatataacatcagctagaatatgaactttggacaagaggtttatagataaaaagctataaagaaaggattttcaaataactttctgccacaagattgcattcagctttaaaaaattccaattttggatgtaaaacccctgcgtgtaatttaatactaatcatctggttgttaaactggttttgcccttacttttttcttacactacactaccagggcttaatggaaggaaaataaatataaactggagtccctcctgccttccagtaaatgttgtcacactgaagttgcatcagtctgtgggcaacattttcatttcagccaaccagttgcaggttcggattatgaaaaggcaacataggtatttcctgtggatccatttaaaacaggtgtcctcttcaaatagtctctgagtcagaggatgtggagggagggctggtggggagaagcatagtgctagaggtaaagagaaagtagcaagcaagccatggatgttttcctgaatgtttccaatcaagctctaaactaaaatgaagagacccactagatttttttaattggcattataattatgctaatagaactgatgtcagaagaagattctactagcattaaaacgatgtattattgatgatttttggttaaatcttaatgtaaaagttggctttatttttttaattgtgcatccttggtacatggttataaactgccaaaaaaataaaaataaaaaagagtagatctattgaagatctacctaccttaataatgtgtctggaattggttcctgccggtagattagtggtctcagtgacttcaagaatgaagcggcagaccttggtggtaagtgttacagctcttaaagatggcacagacccagagtgagcgatagcaaggtttattgtgaagagtgaaaggacaaagcttccacagcatgaaaggggactggagcgggttgctgctgctggctggggtggccagcttttattcccttattgtcctctccagtgttctgtttctgtcctatgagagtgcccttttttcagtcctccctgcgattggctacttttaaaatcttgctgattggtgcgttttacagagtgctgattagtgtgttttacagagtgctgattggtgctttttacagagcgctgattggtgcattttacactcctcttgtaagacaggcaagttccccaagtccccacttgtctcaggaggtccagctggcctcacctctcaatagagccttaataaagttttatgagttaatgtgatatttgcaaagtttgatatacccttcctactttacatgttagacaattattaa

SEQ ID NO: 584809 - DNA, 4001 bp, Homo sapiens
acagttgttttgtgctttcatgcagcacaaggaggaagaagcaaccaagatacataaattagggactttttgaaaaaggcttaggccaataatgcactaagttccataaaatgttttggaattatcttaaactcacacctgtcacagctgctttcatgtagcaaataatcttccagtaagaacactgatctttatttcagtaactgaaaactacttttcagcctgggtccaaaagtatcaccagactccctaacattataaaggggaagaagcaaccaagatacttgtattaggaacttttcttgtgtgtttttaagctttttgccaataaatgcactgagtgccataaaaggttctgcaaattctcttaaaactcacacatgtcaaagctactggatcgtatttaacatgttactgtttgctccatattttgaaattcacagcacatgcattttaagaacatcccaccttggaacacccttgtacattttgaataaagaatagaatcagctcatgtcaggccatgaggtcttatctctcatctacataaacgttgagcttcaacggatatcctatttttacattcgttaaacttaaatcttgtgttaaaaagggaattaactgaggaggctgccacaggtgtcatcttaaatcttgactgtgtaaactggcccttcactatcttaagttcagcatggaggggaaagttcagtgaccagacgtttcttccacaatgcagataccccgagcctctcagagcggacccccagcacgtgtgcggacagcaactcggccgggacttgcgcggctacttacagggtcactttagtggtcactgtcgacctgcccacgccgaaatggttcctgggcttcaagccgtcggcgtcagaagctccaggcgctccggccgctctgcccagctctctgcttcgacctccctctgcccggccgttgaagtggttggggagcgggcccctcttgtgctcgggcttgatctccggcagcagcgagctgctcttgaccgggagctcgcgggggatggcccgcgccgcctcctccccgctctcggccgcagtgcccttggtgactgggctgggatcgggcaccctcttgggtggggactccttggcgggagcccgggggccgctggcgggcggggcgggcacggcctcgagggcacggctcctgcccttcctcttcgtgggggacgaagccgggggtggctgtttgctccggtccgactcccctcggagctgccctttggtaccggggctgggcttggactctgggctcgcagcggaggcaacgcccccgtcgagggctgcccgcggagatttcactttcttttccgccgaggcgttatcgctggccgcgtttggcgccacctcgtcgtcgaacaccgcgtcgtccctggcagcgctctcagggagctcggcgtccgcgccgggggagtcggtggatttctgcgaccccctccgcctccccgacctacggccgctggacctcttctccatgtcgtcccagtcaccgcaatcttccgctctgggagtaatcacgaccggctcgtccacttgtgccccctcagtcttactcaagtagatgtccaaagttagcaccttagcagggtgggcgtgacccttggggcgggctgtgcagtctgcctgcgcggagctggccgtgtgcgctgcgccctcggccggaggctcacctggcaaatcagacgcgcccttggggggctggctgcgggcgttgcggggccccagggagccttcttcggcacacacactgggggctccgttaggggcctcgcctagtcctcccgcgggccgctcctgggtgggcgaccctggcgcacccctcacacccaggaaagcctcctgttcgtggccagcacctggtgaagcgtcctcccccggactgcgggcgggcgtctctgcgttctcttgcctggaggaatttcccggcgaggaatgcagctgcttggcagtggtggtggcatctgggaaaggctctccctctgcctccagaggttctaattggggtgaatcattttcatggcactgctgcacagccacagccgctgcactgctgctccagcgaggtgacagctcggcgtcagggggggctgcggggccaccgctctcggggagctcgccctctgcctctcggggattctcccgcggggagccctcctcgcttgtgtccgtttgcttcagttggctgctctgagatctgctcctctcactctctctctctgggagcttaggagaggctaccacatctttgggagagagtggtttggcatttgatctggtgggactctctaacccgtttctactgtttcttctccttcctgcagtgaatagagtgccaagtttccccaaaactggcttccttctgttgtcttctggaggttgtgctctggactgaaaaataaaagggatgaggagggaacatatgagaatctggtgtttttccccttagacgtacattacagaaccaccagccaaaatgataacagaccagagtttctaattgaaaatgataaagttatgtttatgttacattcattccaacaaaataaactctggttttacttttgaattttgcttaaacaccttaagtttctggcagtagtcagaatagcattttctttgaattataattcttgttttttaaaggaaaatttgaacggtccaaataatcacatatacaaaataaatagttccttgccctctctaggttttttaccttcttcctcaataaagatgcaatttataaacagccgtgcatgtgaccatggggcagcagtaaacacactaaagtatcctaaggcggactttttcccgaaacaccgcccattctttttgtaggagggaaggaggacgaagaaaaaaaaccagtcctagcagccttctcctccagaacagtaagaagccacctgggttcaacatctagtacttgcaacatgaaaaccttaagcaagctcggaggaagcaagcacctgggccccgccttagccggagctccaatgggaggagcgcgcgagcgttcaaacacccgagtgatcccgcggctgcagagcgcatcggaaaggcttttgcctgtgggagttcctaccatgtgaacacggaggagtgcgtgggggtagcgggcgaggttgcaggggtgaccgcctttgctcaccgccccctagagccgaggaggtgtggctgaaggatgcgcttgggactctgcctactccgccccgggacccgttcctcgccacacgtgtggttccggggtcgcacggctggagccccaggggccggcccacctatgcgagggtgccgggccgcctgcgaatgatccgcagcgctcccaggaagggggaaaacctgggcttcttatatctcctggagcaaaacggctagcatccagtgcccgcgccagaaggcgggagggagcgcagaacaaaccaataaaagcaaacccgccaatgggcgcggtggcgctccggggtttgccagagtggggactgggtaggtgcggggcatagaggtgggcaggaagaggaggaggcgagcctgggaaagcgggggagcaggggcggcgagcccagcctggctcctaggagagggaagtgtatttgcgtaaggactcctctgaaaccaggccaaacgtgcggctactgtatttcttaagaatcaacttttaaacattcaaaacctaggtgctagcttgagtcctggcgacgcaggaaagagccccacctttcctggaaaaggaacattcaggacagtaccgactacggggaggttccccaatcaccctttgaagctccattgcgtttgagttacatgcagcaaatggactttggcgatgggaaataggaaagataacgcatgaaattaacaggtcaacaagcatttgttgagacagtcctggtactgtaacatagtgtcaccccgctacagcccagtaaggtcatgctgttaccacacagatgaggaaaggaagct

SEQ ID NO: 584810 - DNA, 4001 bp, Homo sapiens
tttaaaaattgagactagccactaccttaaagaattagggtggcatggtgtgaacttgatgtggaggaagaatggatacgagtgctgcaaagggtggaatgtagcagctgctattagtgcctcccccatatccacttgacatacaccttttctatgcacgaccagcccaacttccaaaatgttagcatgtgcgactttttgcctaagggctttctctggctgccagaacctactctccctgaacacagggtagactggaagttctagggcatcaatgttctgccctatcaggcttcatccaataactgatggaagttggcgaataaatactccagcttccttgcccctcaagaggggataactgagacatgcctcccagtattccctagtgaattcagcccacagagaaatttctctggtaatatttcctttattagttttcttcccctccctgctgctgtttcctgggattacgtctcatataaacaacctgccttcaaagttttgtcttaggatctgattccgggtgaaataaactaagataaagttaaaatggaagtgctaaactataataattgaaaactagaatccttcaggtattttaagagttgctatcctagataaaaacactgtgcaaacatttaactaatattcagaagagttggtttcattatgaaacagaacacagctaactatttttcccagttaaaagatccaagtccaaaatgccagaacggacacggccatccttctagttcttaataaaaggagtaccaaactacagggggaaagaagcgcaaaataacatagacttaagtatttctttacaatttttgtaatttctcaaattttaatttacaatatgatctttggtattacatgaatgttatctgggtatgctataattctataatttttttttaaagtttccttacacttagcagttgagaagccctctagcagaggtttctgaggtttagaggtttcctgggaaacctagaattgccgcctaagataggatagctgcctctcccctacatcttatactcttgcagtaggtgttcagtaaatatttgtggaataaatacttcagtcgttgaaaggagacgtggttttaaaaagtggatttacaaagagaccgttttgcaagaaaagaagctggtctgggggtccccgcaggaggcggggttccgtgcaacagataccaagatgcctccagggcggaccacgacccagcgggccgccggaaggctccttacctggccgcagccggaccctcctcagggaagcaactgcctccagggactccgcggggctgtcgggcggttgccggggagacctctggccgccacgcacctgctgcttggtggggcggggcctcgagaggcggggctgtagttctttgtcatttcttttccaattcgaaatagtcacttttgtacctaatttggcatttataattataatacactcattttcacaactatggaagagagggtacgcgcatgcccatttatgtcgcacacatgaaatgaagaaacctcatttcaagcgcggctccgccacactgcgctagtctctgtcgacaacttcaagtggctagcctcacgcacaaacgtgtggcaaagccacactttccagctttaggtgattttaaaacaatttcttgggccacacagcgtaggtacaacatggattagaggtgaggggaaaactgacactcagtgaaggaccgtcagagggccggcttccaggaaaatgggccgcagcaggcagggaaaacacaaggatctatcctgcaactcggagaacccttttcaaaagaagctacccaatcccaaaccttccgcttttttccaaagagagggaggagataaatagactcaattaatccgtcgactttttctccgcccatgttttcctccaatccttaccaaagatggtgcccttcgcttcctctctcggcagcacgcaggtcccgggagcctctacccgacctctctatgatacgtcctccagccccgctcccgacgtgaggggcggggcttgcctggaggcggggcgcagggatccggaaacacctgatcatctataggtttagtgcctaatgggtgttgttcctggctggacttgatgtccagggcctgaggggttttctcgccgagtctcctggggcggtccggaggctcgtgccctgttgtggggcccccatttgccgccgccatgcccacggccgccgcccccatcatcagctcggtccagaagctggttctgtatgagactagagctgtgagtaccccctcgcggcggggcgcaggcgggaggatggatgtctgccggtgggtgtggggccgtaggacagaggctgtactctgcctcctcctccttcctctccagttcccaaatccctgtcaaacacagccttggggtaagctagctcccttgagctgtgcctgggcgcctttcccctattttggtaccctggacattgcagcatttgcaggtccacttacaagccatggctggaacacgctggaaacaggtgcttgtggtacctcaggaactgttcatgaggttctctgtacgagttactggattcttttcagctttcagaaagtctgttaaagttctagagttcacaagttacagtacaggcaggggtatgaaaaaaatttgaactatgacttgtaacttattttttcctattccatggtataccatcactgcgattcatgtgaattacacttctattggtgaactttttggttctctttttttcttatttgaaaggaaaggaaaacttactttgtttaaagacagataatttgtttggataacatcttgcttttcacttgacttttttcaacataacatttacttttaaaattttattactttgaatggccatgtaaatagtgaataagcagatcagtttgtatttcgattaccagttcctcaattaagggagaatggtgtttatataacttcatacttggtcctttctgtgggtggaaagcaaagttggtacagtatagctcttctaaattggggtgccacagtgatattagggactgtgtttaatattacccatttcatgctaacaagattgcatatgccagatattttcataatgctcttcactatgttatagagtgctttataaactgtttctctgaaacttgggttgtctccattagaggagtatgagaaggcatttaacagtttctcagttataacgtagtcctaatagcacaataacctctccctcaggttaacatgagtagagaattgtggaccttaaattaattttgctgacaactttgattagatctagagcagaaaatgacattatcaaatatactgtatttgcaagtattttcagttctctaatgagacccataaagaagtatcatttgtcattgaaatgaaacctattttctgtaaaatatgctgctaaatttccctcattagaaacataaataacttttttttttttccctttgagacagagtcttgctctgtcacccaggccggagtgcagtggtgctatctcggctcactcactgcaacctctgcttcccaggttcaagaagttctcgcaccccagcctcccaagtagctaggattacaggaatgtgacaccatgaccggctaattcttgtgtttttaataaaagacagggattctccatgttggccaggctggtctaaaactcctggcttcagcctcccaaagtgttgggattacaggcatgagccaccgcatctggccgtaaataaaacacaaatttcagcccattaaaaagctgatcactcatgaggactgcgtgagatattagtgttcagaaagcacaattcatattatagggctcttctgctcagaaatcttcagtggtcccaattctgaagcaagtaaactctgaatcccttagttggcattcaaagccatgtattatttgtcctcaacttgtctatctagttttacatctaatttaatatcaa

SEQ ID NO: 584811 - DNA, 4001 bp, Homo sapiens
cagttagtacttaatatctagggaccatggattttacaagtagttatgaatcaaagactggcggtaaaaactatattattaacagcagtctctcagcccaaaagagactagggcagctaaggaggtcaaggcaattaggtcatggttgtaggttcctttttttttttttttttgcatattgtaaacatctacacctcctgcgataactcacgtactctatcctcaaatttgacataccgcaaatttaactattaaacatggttatccacatctttctacaaggtatcacaagggtacctttgtgatacaagggtatcacaaaatcagtagagtgaagccttgctaatgaacacatgcgctggaaaatagatctaaaataccacgaccagaacaagccacagtcttggcggctgtcctggcccacaagaaatattccagccttgaagactgaagccgataaaatgcagtcgtttcagcactgcgtccagggaagagtacccggaatgctcgttacactgaccccatcctttgagaacttctagccactctagcgtgtgtttggccaactgagtctgcaggcaaagcgctgagcgaacgcgagggcgctggctggtttgcgaaacctgtcattccttctggaaacgcagcgcctgcccaggtttttcctggctctgagcgagctacaccccaggctttctctgcctcgggaaggcggtgcctgctcgggccgctgccgcaggaggactgggtaccaaacccgctcgctccaggcaccgctggcatccagggcggtacgcgacggggaacccgagggtggctgggctccccggcgggctccaccacgagtcctggcctcacagctgactttccgcatctcggagctccggaggcccggcccggggtccattctccacggatccccctccgcgcagctcctccgcctcgggctgcatggctcccaccggaagagtgcgcagaaaggctcagccgccgtgggcagggcgcgggttttattattgcgcatggcgcagtcgcctcccctggagacccgcgacaaagatgcaagccccccgccgcgctcgccgctgctctggccccgccccggcgcgaaagaccctgaaaagcctccaaagaggggttcgcactcctgagtttgcagatgcggctggatgggctgggaagttctctcggcggaaatcggagggacccccccacccccacccccacccccaaagacccgcgcctcccggcgcaggtggcccggcacgcccgtaccttggtggcggggtccgaggcagcgatggcggggtccgcggtggtgtctggcgccgcctcggccgaggggccgccgccgctgggctcgggctcagccggcgtggagctcccctcgggcggctgctccgggctgcgctgctcggtggagctcccggcgcccatggctcctccgcacttctcccgcgcctagccgccgggttacgccttccccaagccgcagggacaggggcaagagccaaaagacgcgcgcccgcgaggtcccgagagcgccttccttcgccgccagccgactgcgaacgcgcccagcctgcgaatgaaggagacgcgctcgcggcaaactccttaaaagaaaaggaaaaaaaaaaaaaggccacctcttagcctccgcccccctccccccggtttttccctcgcttcatcacatgagcacagccccagacacgccctgcagcagcatctgcccccaggctgccgggaccagaggcgctgcgacgcgccagcccaggtccaggcagccgcccacccggccctcgggcgcctcccgtttctaacagggcgactagagctgcggggacgacccagggcctcagaaggcaagagagcaggggagcaaaaagcctgccggggacactggattctctggggtttattaaatgatggatcacccaaggcaggagcttctgctgcagccgactttcagctcgcccaggagcgagtccgagtccccatttgctttcctgcagattgtgtttaactccaaacatttgttccagcctcctccccattagcaggagaaaggcaagcgctccctggctcctcctgagtccgaccatatttgggcacctcacgtggcaagagcagggaaccgagaggttaacgcagtcaggccacggatgaggtgggccacgcaggcccacgctctcctatcctccggaacaagtgatgtcaggcgatgccatcagcagtgctagccgccccccttcccccggggaacggggggaaatgaggctgttaccggaaatgtgcccgtccttctttgagggcctgtgctggaagttacccatccaggccacctctgctccgcgcgatgccgacacatgacagcatagatctgttcctttgccgtcagcctttctcaaaagatgaagactttaaataataccagcacaagtggcttgcatcctttcatttccgacccttgaatataatatgtattacatgagcatggcagccaatcaataagtatttgaactaaattaaatttgtagctggattgcttggcgcaaagcattaaggctttggggctgaaagacaaaatttattccagttgtaactagcaaccgagtgccccagttttcacaaatactttgaatctccattaagaatgaagaaaccagcctggttaacatagcgagaccttgtctctacaaaaaataaaaaaattagccaggcgcagtggtgcacctgtagtcctagctactcaggaggctggggacgctggggtagaaggatgacttcagcccaggaattcgaggctgcagtgagctatgactgtgcctctgcactccatcctagtcgacagagcaagattctgtcaaaaaaaaaaaagaaagaaagaaggaagaaactttcggaatattcacaccaaattccagataaatatctcatactcagatttagtacaattttgtagaaagggtgtaagcagtagttcagcactaggatgtttcatgcctaatgaattgcatgaatcgaatggtaccctgggaaccataggttagttactcaccatcaaatttgttttctgaattaattttttttctttttctttttttgagacaaggtctcgctgtgttgcccaggctagtgttgaactcctgagctcaagcgatcctcctgccttggcctctcaaagtgctgggattataggtgtgaaccaccacactgggcctgttttctgaattaattatttttatttaaaggactacacgaaggccaatttctctggagtttatctcttaagaaacagtatatttgcaaaatgcttagttttaggaatttatacacatttcccccattttgacttaaattttgactatttaggaaacattagaattcttactctgtaccaggcactgttcaatgcactttacataataatctttacaataaccccatgggatagatagtattattctcattttaccattggcaggagggggaggagtaggcccggagaaattaaattgtgtgcttcaggtttcacagccaggagttggaagagcaggaagtccaactggcatctgctttcagggtccacgcttcaccaccgcatggcactccccttccctttcaatcaactgtgttctctcctctcagaggtgttactgaaacgtggcatttggacctcacttaggattttaagagcaaaaagcactgttaaaacctacttgaggccaggtgtggtggcttacacctgtaatcccagcactttgggaggccgaggtgggtggatcacctgaggacagtagttcaagaccagcctgggcaacatggtgaaaccccgtctctactaaaagtacaaaaattagccaggcatggtggcgcgtgtctgtaatcccagctactcaggaggccaagacacgagaactgcttgaacctgggaggtggaggttgcagtgagctgagatcatgccattgcacgccagcctggatgacagattaag

SEQ ID NO: 584812 - DNA, 4001 bp, Homo sapiens
actcagaaaaaagtcatgatctcagaagcaccaccccagctgtgactccctacaatacacatttgcatatttcattcatagaaaagttaatgatctgggggaaaaaatggagatttttgtgttttaaatttttttcattttgtacagtctatttattaatagtttcgagatatggcataaactttcaagctgagtaaatggtagaaaggttagccaagtcaacttgggggtcgaattttaaggaaatctcaaagtaaacaagctaatctataggaagtgagagataattttagtattgctgaactttcacattcttgtaaattccactggagcgcatggctttgcaggagcagttgcattgagaaaattttaagtcctagaaattctacagttgattaaaaaaaaaaaaaaaatgtaggccaggtgcggtggctcacgtctataatcctagcactttgggagaccaaggcgggcagatcacaaggtcaagagatcgagaccatcctggccaacttggtgaaaccccggctctactaaaaatacaaaaattatctgggcgtggtggcacgtgcctgtaaccccagctactcgggaggctgaggcaggagaatcgcttgaacccaggaggtggaggttgcagtaagccaagatcacaccattgcacttcagtctggcgaaagagcaagactccatctcaaaaaacaaacaaaaaacaaacaaacaaaaaaaaagatttggcagcaatgatctcaaatatttaaagaataaagaagtcctgttcctataaagttaaattcacaaacggaatttaattttcttgatgacaggaagagaaaatacgcaggttaggccacagtacaatggcataagactatcaaatgtcaagttagaggagctgtaagagcattctaaaagtttgatgcgtgtaagttatttgctagaagtaggcagtaaatattataattcatactcacggccagattcctagaaagtaagctaaagaaacatacttttttctttttttctttttttttttttttttactatttgttgcctaaatagtgttgcttcctagccaccgattttataataactatggctttattaaaaccaccacttaaagcagagcttaaatgttagtcccctaaaccaccaagtgtacctttattcaaagttcctagtaaacaagtcaaaatgcaaacacttgtaatttgcccagaagaggaatgtattctgtctatgactacggcaagagattaagctttcacagcttattttcaaattcacacaaatctgacatatttctattcagtcggctgctgttgttcctctccacatccctctctccctaaggggaagggtacaaccccgaacaaaatatactaaaggtctcccataggcacagtcaagaagattccagctcagccaaaaatgaaacactgaggttgtctgattcttgctgagcccaagggagaatgttcttctgaagaaaaactcagtacacggagagaaataaatgccaataacggtcccgccactgacctcccgggctccccaccaaacgctcattcaacggaagaaagccccttttcgtgccccgtgcctgccgtccagggaggacaaaagcgacctggcttgtgccttacctgtgatggtgatggtccccagcatattttaagtagcactactgtacaggagatcagcttagcgggtccctgccctccccggcagacgcctagtctcctgcctgccaaccgcaggtggtttcggcgggatcagagcggactgagcgcccagacactcccggaggatgggggagaaccggaggtgccctcggagctgccgcagcgaaaagcagagcgcggatgcatttccccagataattataggcggacccccacccacgcccccacccagccacccacacgcgggctggcgctggcccctcccttgctgagctccaggacttcgggagcgcaaacttccccgcccgggccgcacaagcagggggtcacgtgcttcaccttaaagccctcccccgagctgggctctgtgagtggtcagcgggttctgcagagtcccgggagggtttaaagggtgctgggcatgagttcgatgctggagccggcgcattggatctaaacggttacttcattcctggcaccgatttactaatacttctgtatctcagctttttaagtcatttcaaggaaatagccacacagacagtaaattctccctccattttaaagactgcattctgcatccttatgtttgtttaaaggttggtgtggtgccaacacctcccttcttggcatctgtagcatttgatattttcaccatctgtgtcttacgcatacacacacgttgcactgctctgaagactggcaactctcagtagtgctgtttcctaaactctttgagaagggctctcagaagtgaacttgttccttctaacaagtgctgtcttcaacacttgaccaaggcaacttttcaaaagcagacttgagcatggggtctttttctaaatggcagaagttagctaactttttagatcaaactatgccatgttccaatttttagacactatcatatctctaacatgcaagcacacaactcggaaatcaaagcctatgttaaaagttcagaagatttcaggcagccctagaatacttcaattctttctcattgaagcttcaggtttgttctttgtaaagacacgagtgacgaatgagttggtgtggtctcacaattttaatacactttttttgtactccaattttttgttagggtgggtccgttaggtcccctgggtttgttcccttctttcatcctttccctatttatcacttcatgccttgcctgcctgacccattaacaccagctcttcccctacacaaacaaaaaggaaagttttactattgcacttctcttcagagaatgaagatcttgttcattattgcttggggcagggaggagggaggggagcctcggcgtagaccacagtgggcacagcaaagagaagggtgggcgaggaacaggagaatcagggaaaaatggaagtccaggagagctggctggcatggcacgtagttgcactttttgggcaccagggggcgcgatgcaccacactcgggcccagagtgagcaacgtgaaaaccgcttccttgctggtaaccagaccttgttacaaaaatcagcttcagcctctccaaaagcctggcttccgtttcacatcctggcaaatacccggcctggcgggaacagggaatgatgggccttgtcctgactcagtgagatattgcctggaagctgactcccagacccagccactgagctgcttcccaaccttttttctctagagaagtctcaactctatttcacaaattgctccaattttaataatgaggctggtgtgtgtgaaatgctgctggtactgaccatccttctggagtccacagagccaagggggcagggcaacttggccattcctctcctcccaatcccagccccagagtgtcctggctgtgcaaatcatggataaagacgacttgggatgttgcatcagggtctacattaataagtcccttccccagagatgtcccaggagccgtgggtgatctgggatctgagggcttggttctgcatcatttctcagcaccagtggttggggacaacacaaggctatcatctggtgccacttctgaaatcgagtctgcccttgcagagcagaatgaatctccagctcctctcctttctatcagtccaaattctaacactgggacaagcaacagctattccactgagctggataggaagaaaaagaaaaacacacaaaatgtcactagttacacatttaataccctaaacaacattttcaaaggtcactgtactgctgttcagttttggcactgaaacatttctttttatgacattcatgaagacgctaacacatctgatttgattttttttttttttgagatggagtctcgctcttgtca

SEQ ID NO: 584813 - DNA, 4001 bp, Homo sapiens
tcaacagtccctgataaggaagacagaaaagaacaaattccttctggagttgaaacttgacgtcttcagatggagccaaaagatgcttacagacaggggaagaagagaaacagagcaggagagcaggcactccaggggaaaaccctgagcagtggaacagaaagtgaagagggtggggaaagaattcactatccctgcatcggcccatgccaaggtttttcagagaggagcattccccaagaaaaagatcaaccaacccaaatcttcaggaactacaaataaatcattctgacaaataatctgaagagtcttgggctgccaaatgaatgccaatggtctttgttagaaagtgaatgactttgttgtaaggtcatctcaagttgtaagagcaggactgtcacacactttacagtatcctttcacaagtaaaatttagagcgcagcttattggctccttgttaacaatcaaatgctccacagtttccaatgtttggagacttcagcatttattccaaagcattccccaaagagttactgtaaaaactgtcttatttcccaagtgaacaggtatagcatatgtattttttttttaacagtccctggctagtttcctgaagaacaagcagcaggaaatataaaccagacgtatatctttcagtatctgaaccagatatgaaattccatggacctatttaaattagaatcaagcactgatatgacacaaatgtggttgcaaatttagcaagtatgactggaaacattatattgaaaaggaagtaaaaattccctatttcggggcaactagggtaaggcaaactctattcagcatactaattaaaatgccagtattccatttaacaaagctaaaatgtaagtgaatatacataagccagtgaagaacaaaattcagtgcaaatgtcaccactttaagttgtcttttctaggcacaagccgctgtggaattcaacattcatttaggcaggttcaatggggcttctgctagaagcaaagcggcatcacttgtttagagtggtctcacaggcacacttgaatccaggaagaacaaagcaggggacacatgaaaatatctgcaagtgtctaatatgtgtcattttagaaccagctttacctatttgttactgttgagcattgctctgaaaatatgccagtttcagataagaaaaataaagtctggcttgtacagtatatcaaatcgaatgcagtgatttaaagaaactcaaaactaaactctgactctaatgtagtgggataaaaatgagctgggagaataccaacagaggagaatcagaaatgagttttcagtattttgtatttttaacacagcccatctactgagttgcagtacttttacagttaatttgtaactacacacctaccagtccctttaagaaacacacattaaaaaccatagctgattagtctgctatccttcccattaaaaaaagagcaaaactacccctagaagacaaccgcacaaaatagtcaagcacttaggattctgcacagtacaaatcccacttactgatttttccttcatctcttgagaaaggaaagcagcaaagctggcccatggcactggtcctgtctgtctttcctggtgttcttctccgtgaggaccccaaatagaaattgcagtttatagcacagtctgcgagcacaccctgcctttttcactccacggagcagcacaggcagcttgaagagccaatgcacacgccgccgggggagagaaaggagaagggaacttgctgccgtgagcaaaaaaggctccacctccagtcctccagcctaatgcaactgctctgggactggcattcagtgaaggaagtggctatacgctcccgtattctcacaaaactgtgagtccctggccataggtcagtgccatgtgttctgtctggctatttgcatatgtctttaagaaaggtagtcgagaaaaaccacaatgagccctttctcctacagacaactgcagtaattacacatgaaaattcaaacccccaaaaaaaccatattttctgtctgctacttaaagaggaagagccttcttttatccctaggagattgtggtttatgaatagaaaacccaacatagcagaacactggaatcacaacttgtatgaagtaccattaactacctagcaaactgcatgaacaatagaaatgataggctaagtgtggggaaagaggctatcgactgttatctgtacggtacggcatatcttttaaattcctgctttctgatatattgccttattcccctagtaaagcagtaatcaataatattaattttgaaattataccatcaaatatgtcaacagcctagaaaattacccaaatatagatgcatcactgacaaaaagacaaaagattagggcatctttctgaatgaagccacaaggtgattgagcaaattcaggggcagcaaaacaactaattttaagaaaggctatattttgaactctattacatgaaataacagatttcatgtaattgttcaaaatctgttatcttatagagggaatagccttagtttatgacactctaggaaagaaaaattgttcatagtgccagaaattccaccctgattctttcttactcctctatttactagctaggcacacctatttcccatggattagaaggagagggaacaggatgatgctgaacacctcaagtggttctgaacatagtccacctactttcatgatcatccaaacaaaaagagcctgcagcatggaaaaatgaaaattgtcaattttacaaattatatttgtcgcattaaaaaaaacagtgaagatgctggcaaacactagtatctgttttcaatgctttttttctgaaagatagaattttgataattttgatgcaaatatcaaagagtatttgagagtgttatcaaggaacacagttgtttttatatgtcacaggtacattaatatgcactttgacttccacattagaaatattgtgaagatctatggaataaaaagcaaagatctgactgattaaactggcaggtctatccacataattaaaattaatgtttagagaattacatgtctttaaattgctttcactttttcagactatttaaaatgtaaagatgcttattttaccttggtttaaagaggacactccattctatcatacaatgaacattataattttaagtaaaattccacttttataaccagttgggtttcttcacagcttagtgacttataaataaacagcaactttaaactcttccagtattcccccaaattcaccaatacatgagtgaatacaggtgtatgttttaaaatataaaatgattttgtatataaatgtaaaatagtcctaaaagcaataatataaaccttattaagaccagaaagcaaataaatggcctgtaaccctaaaaatggaaacatcagaacctacagcaaattttgaacactggagacgtgacacagaatgtggttcttcccagccttaacactgccactacccagctaggaaacaccagagaagcccttggtcctctctggacctcagtttcttcacccaaaaataaggcagtaggcatattaggatcctctacagtactagcattatatgattttgtgatcaaaataacaaaggaaatagcctaacaaccagtgaacaattatcctaaacattactttttgtgttcagtgaagatgtatttgcagggaacgttcttcactgaggaaaattagtaactcctggcatttcccaatcaccagcatcagtatagtgataaaacctttagagtcaggaaaccatgggtttaaatcccagatgtcaggtattaacagttatgaaactcatgcctcctggtcagagttttgatatctttatctgtaattcaggtaagttcattataaagcttttaatttgcattgcaaaatagtatttgatggggaggggaagaagagaacagattgtctgatggctgtatttatatgcacctc

SEQ ID NO: 584814 - DNA, 4001 bp, Homo sapiens
gggtgggccgggtgaggtggctcacacctgtaatcccagcactttgggaggccgaggcaggtagatcacgaagtcaggagatagagaccatcctcactaacacggtgaaaccccatctctactaaaaatacaaaaaattagccgggcgtggtggcacacacctatagtcccagctactcgggaggctgaggcaggggaatcgcttgaagctgggaggcggaggttgcagtgagccgagattgtgccactgcactccagcctgggcgacagagcgagactcttgcctctaaaaaaaaaaaaaagagagagaaaagggtatggagagttctcccactgtcacacaaaatgcaggtttcctaactggataataaatgactactcaattttgtgaagtaagtctctcatcactctactaggtaaatagtaaatttatcccagctgagcaagttggctcacacgtgtaatcccagcactcagagaaggactgcttgagcccaggagttcaagccttggtgacatggcaagaccccgtctctacaaaaaaaaaaatacaaaaattagtcaggcatgttggcacagacctgtagtccccgctacttggggaggctgaaacaggaggttggcatgatcccagccgatctaggctgcagtgagccatgatcgcgccagtgcacttccacctgagccaacagaggaagaccctgtctctaaatacatatatacatatatacatacatacataagtacatacataaataagtttattcctaagaacaactggaaagggctaagggcatccattctagtcctggcttagctactaaaaatagtattagcatcttacacgttagtaaatgttgacagctgcgtagaaatcaacaagttacttgacctccaggctttcctttcctcctcataaaaagggaacaaaagtaaaatccaaattattagggagaaatggacaaaacaagttaatagtgtccgaaaatggatgaaaggaggaagtaacctccacaaacatcttaaactttatgagtaaggaaaatatacagatatgctaacaggatcctgaattgcaaagccacggcacttaaacaaggaactggagtatggctcttttctccttaacaatttccattcccatgcatttcctaaatgcaaaaactcactgtcatcattcacttaacaattgtcaacatattcacacgattaactgctatttatatagtacactttaacgtttttatgctttttatactcttctatgagtttatcctatgaaactcttgcagaggagcaccttttctctaattggtttgcggacccttttaccgaaagtccacccctaactcgctctatcacaaagttcagttcacaacaaacgctgacctaaactggaaattcattccgggcgctagtgtagacttggcgccagttttaaaagcggtcatgtccaaacctggcagaaaatcctaaatgagacagtatggtggttcgggtgcttaatatttgtgatataagataaaatcgaaattttactaggttttgtttacatttacccacatcaacaccgtcggaaggaatgtgtactggcatgaactttgtgcaaagggtcacaggatgagaaagggagaaagaaaagtgaaactcggggatgggctcatacccccgcctcctgtcggacccacaatgcgtgcattaaaacgcttcgctacaggcagcactgatgtacaccccggttgcaccgggcttctcggtgctaccctgagtccttttgggaaggagggagactcggagaagggccggcgcgggtcaggccctcccaaagttcgagcgcagagcaggcccaggcccccgcggctcctgtcgcccccgccccggcccgctggacagcccggtctcacccgcttcggggcgctccatggtcgcggcgcatgcgggcggcgcgtctgggctggcggcagcggcggtggcgggccgcgtcccggggctggaggcgaggccgaggcggaggccagggcggggctcggggcctgagggcggtgcgctgggccggcgcggggtccagcgacaggctgcgggggcccgggcggcggaggccaggcctgcggaagcgcggagcttcccaagccgcagcccccgcggcagcggcagcagcggcggcggcagccgcagcagccgcagcacccgcatgccaggccggacgccggaacaagccagaaggggccgacccgagtcgccggtggtacccggattcgggcgagaggcgcggacgcgctcgggcagggcgggggaaactagggccggcgactgcggcgtcacggcagcccaggtcgtctcgactctgcaatgcgacgctgggtcttcgcctgcctgccgagccccgcggcctccgacggcctttggcagccctcatttatttcccgtggcgcagccttgcccctcccacgctttcaagggcgagattgggactaggatgaaagaattctctggcctggtgtcttttgagaatccatgtgcttagttttgcaatcagggttctgattgcagaatatttgggaagagcgaaatgtacaagaacgagaccttgtacttctgtataatgagatactttatttaccttacttttaaaaactgcaaattgtgacaaagtctctaatttttaacaatgatgttatgtttagacattaagaggaaaccagttgctggttcttgtagtataaggtactgcagtgagtaaattgggagaaaaagaaatttacttagtttaaaaaaataaaaacctttcacttgaaacggaatgctattgggattggttttagtgcgaagaaaccaggggttaagaacattaggtgcatccgtccacaaattagcgcctttcgtgaataataacacttcgcttatgttgaatgcatcgtagaatagggatggaagaaaagaagacccctacacagccacaacagctggcgtaaaggctgcacactagaagtcggcaaactagttactctgattttcaaataattctaacacgttgagtttctgatgcccatttatgggctggtaggaaagtacaaccagttcccctaatatttatttaatgcttgagctctgtgctgaggatgtgcaggtaagacaggtcttttacttatggagctgatcatataatagcagagaaagaaacataagtaactgcggaaataaaagctgcaaaaatgtggtccacattcatagtgaagaggatgagaatatgccaccccaaatatgccacttcagcataaggattattcttgagcttaaaacagttcagaaactaaagactcaggaacaactttgacctccccctttctgcctaaaagcaggacataaatttcccttcgtaaaggtgacataaatttttatttttaaagctttaccaggccgggcccagtggctcacgcttgtaaccccaacactttgggaggtcaaggcgagtggatcacttgagtccaggagtttgaaaccagcctgggcaacatagcaaaaccctgtctctaccaaaaatacaaaaattaaccagacgtggtgacccatgcctgtaatcccagctactccagaggctgaggtgggaggatcgctggagcccaggaggtggaggttgcagtgagctgagatgatgccattgcactccagtgtggacaacagagccagatcctgtctcaaacaaacaaacaaacaacaaagctttaccactcacccataccagaaagaggagaatgagtcttacctgcataacaaacccatacattttctagtaaccttcccatactgcaaaaaggctaagcccccttttcctttgtctagcctctccacactttatcatcgttaaaatggtatagaagcccccagttctaactgcctcttcgggcttttagttctttcctgtgaagcatctatgtgcatgtgtaataatccttttctcgtcttaatctgtcttttgtcaatttaatttacacagtccaacc

SEQ ID NO: 584815 - DNA, 4001 bp, Homo sapiens
aaaaaaaaaaaaacactaaagtcagtttcaaatggaagtcaccaaatacagaggtatatacttcggttttttaagctactgataacgagacatttaaatcaagctatggaaaggctttgtctaaagggtgatattattactaaaggctcacacagaaatctttgcatgctacacacaaaggaaacatttacacttctagtccacaaaagcctatcctaggattgtgccaggggcacacaaggatttcaaagtacagaaaaaactgggcatacacatgccctacaaagcagccaaaagacattccccagtctctctcaggaaatgtttcaagatgaaaagcaaaagtctgaagtcccttggaatcttgggttgatttcttcattattctcaaggctaggttgttttcccccagcatactttgttgggcaaaaataaaacatttccaaataaaagcaactcctcagccccaattttcaatgcaatatgcttattaaaagttcaacatttctcaaggtctagacttatagtgtgatcatattacagtactcgggaagagcattttctttgttgttgaccctgctagggaaacaggtcttgactcagccaaagtggcgttcttgtgggtgattaatgacaggcctagatctcgccctagtgacatccatcccccaccccccacccccactatactaaaatcagccgtgtctgaactgaaggaggggctgtagcctcgcctcaaaccacccagtcccagagttaatagctgcaaccaatcgattacggcaagcacacatccagattggggtgaaatgtgaccctttcgcctaaatttacgaataatatcgtcctctctgatcatttccgctggggctccagcgactacggaaacaattccaatcattcggcccaaagaaaaagatgtccctgttctacccaatacgggcaaggcaaagcccctacccacctccaaacactatccccttgacatcagcccatttctattgtgtcttattaggtcctcgggctacgaggacctagtgaaaaacgtggctgccctactactttgctaagaacaagaaccacacagtccggcacccccaccccaggggccgcatcccacaccccaggacccctgttcccagttctctccactaccccggcggccgcggggccgggtcccacctgtggtgaggcgggaggagacgtcgccgaagggggatggctccattcggagatacttctgcggcgaggcggccgcagcggagaaggaggcggcggtggccgcggccgccgacaacggggaggcagcggccgaggtgggcgccgacaatggcgcacatcgcctgcgcttcggggacgccgggctcaacagcgggtcgaaatccagagtccttttcagagtggctccgcacgccatggccgggggcagctgaggcgccgggctcgggtggggtcggggacgggtgacgaaagaagagggtgagggaaggggtgaagagcgggaactcgaggagagcctacccgacgggctcaggagccaagcgggtcgcggagcgccggctgtggaaaggagagccgctgccgccgctgcctccgcggcaggggcagtggccagggacggcccgggtgagagcgggaggggcggtggcgggcagaagcacacgccagtcgcgtcaggggggttcttccgcctcctcaggcgcggctcccccgagagaggctccggccgcccccgccgtccgctcgagctttgcgccgcgcctgaggcgcttctgtgctgagactagatcctttctgaagtcgaaaacagcaccgtggggtgtgaggctggaacgcggctcctaatacgcccgagtacggtcagtagcttgcgagcggcgatcgatgcagagagattgcgaggtagctgccgcagcaggaacccaagcgaacacgtccaaccgcttcccctccctcgtagaactctcccacccgccgccggccccaatatggcgtcaataacaacgccgccgattcaaatccggcggcctcagagcgcttgcgcacgggggcgggccaaaccggggatgcattttgggagttgtagtttttaggtaccgggaggaatcggcttgaaaggcgggaagggaggagtcacagaaactacgacttccgtcatgcaaggcgcgcgattccgagttccgggttggaatttaaatccccctacacagcttgagtgtaagaggaactaagcaaaagagaaaaaaagagaaggttctgagacagtgggagatgggaaagcgaacccgtggcaaaagcaggctaagcgacatagaaatcttttaagattctccgtatagttgctcccacagtgatttcagatctgggaaatataataaaccaatctctagtcaaagttagcttaatttcggtagcgacagtacccaaaacaagacctttcacatggagaggataggagataatgagattatgaaacctatttaggactggcagacagaacaacagtaatagtatcaggttacaggatccttgattcaactcgatgctctacccttcggaggtagctgcttcatccactaatgaaattctgtaaagccagctttgcttctgtaaatgaataggacttgaacgacttacagaatcaaattgttttgcgttgggtaaaaagcaagtggtatcagacattgcattacttctgttgaatattggtgcatatattgtgaactttgttacaaaactaatcaaaagacagtgaaatgtttaggtaatagatattggatggatccattttgtaagcggaaggggaaaaaagtgtttctagaagttgtacttttagtcacatacctaaaataagaatcaaatacagcgctaatttagaaagtgatctgtgtagccgggcatggtgactcacgcctgttatcccagcactttgggaggccgaggcaggcggatcttcctgaggtcaggagttcgagaccagcctggtcaaaatggtgaaaccccgtctctactaaaaatacaaaattagccgagcgtggtggcgcgcgcctgtagtcgcagctactcgggaggctaagacaggagaatcatttgaacccgggaggcgaaggttgcagtgagccgagatgttgccactgcactccagcctgggtgatagagcgagtctctgtctgaaaaaaatgaaaagaaaagaaaatgatgccgggcgcggtggctaacgcctgtaatcccagcactgggaggccgaggcaggcggatcacgaggtcaggagttcgagaccagcctgttcaacatggtgataccctgtctctactaaaaataaaaaaaattagccgggcgtggtggcgcacacctatagtcccagctactcaggaggctgaggcagaagaatcgcttgaacccgggaggcggaggttgcagtgagccaagatcaagctactgcactccagcctgggtgacagagctagacttcgtctcaaaaaaaaaaaaaaaaaaaaaaagtgatatatgtagaaactatcaccagtgcaatatgaaacaattttgtgaatgccaactgtcaaatgattataaatactgatttccagtgctcatgtattcttctttattcagtaacagatgttttatagccattttgtctattatttttaaaccatatttagaagtagttcaatatattcttttttatagacaattttatagaattgtccagtgcttcagagatcagcagtcctgatcacactgtgtcaacaagtaagcccttctagttttaatttaggatatttggaaatatcctacatttcctacatttggaaaatcttttgaaaaagataagcatttaatgaaacagcagcttaactaagacacctactaggtaaatttctagtaaattctaaacacttggtaatattttctgaaattaagatttgcccataagttataaaacctacatttgaaatgtgatgttgtgagttaaattccctatgtttgagggaattca

SEQ ID NO: 584816 - DNA, 4001 bp, Homo sapiens
gtatctcatgtcctcaatgagacctaccctgatgttacgggctgaatggtgctcctggcaaaattgacatgtcgaagtcctaaccccccagtatctcagaatgtgagtgcatttggaaatagggtctttaaaaagggaattaagttatgatgaggtcattctggtgggccccaatccaatctgactcctgtttttaaaagaagaagagattaggacacatatacacacagaggaaagaccatgtggagacacacagggaagattcattcatataaccaactgcttactttacatcctcacttgggcgtgaacagacatctcagactccatgagtctaaaattgaggtctgatgagatacaaagacaaaagctgagctctctgcaagccaatgagaggccttagaagaaaccaactctgacaacacctcgatctgggatttctaccctccagagcggtaaaatgagaaatgtctgttgttcaggccacccagtctgtggtactttgctatggcagccctagcagaggaatatgcctggtcacactgttgatgctgcatcttgccccttccctctggcccggatcctctcctgcttctaccttttttccatattgcactcagcatctctcacatacttatttgcttagatattatgtttgttgtttagagttctgatctctcttctgctccccttccaccccatgtgagctccataagggcagaatccttctttcgtttaactgaggtatcccaagcacctccaacagtgcagggcatacagcaggtgctcagtaaacagctgatggatgaatgagtgctaagactctcttgtactcgtagggatcgctggatgcattccttcagagggagagctttgaaggacacggtaaaaaatttcactgcgttgactccaggtttaataatataatattagaaggaagaaactactttcttagttttcttcttactctattcttcccatttaatggccctccaccccttactcccaattctccagtgttctctatgcaatggccaatagcagcatttatccatttagggtgaaaacctggagaacgctcctggatttctctcttcccctgcacaaaacccaaatctttctacagttctctccgtttccgatcccatgattctggccaggggccctcactaccagccttctcaagggccgctgaagcagcctcctgcgtgggctccctgcagctgcggagatatttcagctactctgaagggccacacgtgctctcacttccctgacacccctcccctttctccccgcccctccacggttaggcttgttgaccataacaagcagctcgcttgtattaggcgctcacgttctgcctcccctactgggcagtgcataacttgatgaggcttgagggcaggggtcgtgtccctagtgcccggctcaaagtggaagctccaaacttatttgtcggtcgtctcccttgttgctctgactttccactttgtataccctggggaactgagcacaggagggaggcgacgcggctggtgtcactttggggtaaagccccctctgctccccgccgtgtccccggccagctctggccccctgcatccgggctctctcaccttggcggagacctccctccagcggcagaaagcctcgtaggcagcgcgcacggcggcgcgggcctctcgcaccccgcagtcggctaccatgcccagagcggcgccgctggccgggtcttgcacggggaaggtggcggcggccgggagccagcggccgcccacgaagctgtcggtgcgcagcagcgccgcagagaggcccgccaggcgcccagcgtagcagcggagctgggccgggccgggcgcaggcccggaggcagggaccaggccgccggcgcgggggcggaggcggcagcctggaaacgtcgacccgaggcgccgggccccacagctccgcagccaaatgcaggtcgccatggcccgggcaacgacggcgacaggaaacaggcaagcgggcgcgcgcgcacgggaacgcaggggtcgcggggaagcaagaggagcgaggaggcgccggggacgcgcggggaaagcgtgggagctggcggaaggttgcagagccacagagcagcgccctctctccgcgtctttctcgctgcaccgccgcgccgccctctgcaccttgccctaagcgccgcgcggcttctctcctggcgcgaccttctcccgggggagggttgggttcggggatggagaaggctcgccagtagatgcacctgcggactgctgtcaccttttcacttttcgggtgctcatttgtcactaactgctcctgagcccccaatcgctgctagagacccactctctccccttagcatcccccaaattcggcatccccggaatttgtgcgcggtccatagatgcgctggtgcctgccctaaatgccaaggccgtgatcacgcttcttcagttgtagctcctgagcacgtagtattgattgggagcgatcgttctctgaggggtcgaagtgtgaccccgcgttctgctgcctggctgcttttttgggtgtgtgtctaggcattctcctagggttgctcccgataaataacagcgctttggaaataaacagactaggatccaaactcaagtctgttgccgacaagctgtgtgaccgacaggttaaccttagtccagtcacttataaaatagaaccatatctaccccattttgttgtgagataacgtaaaatgctcattacagttgccacattaaattcaatatagcgttcaaagtcatactagctaccctagtcaagccactagtaagattaaagttgggtcaccaactagtaaatggaagcatttgtcaaaattgaatcaaccaaggtataaggattgagcatactatccaaccaaggtatttgagcacctttaaacagcattcttcatccgttaaaaaattagacttgggcttaagactctgaaagcagcagggaagcttaaaacctaatgaggataaaaataaaaatagcaggcgtatgctgggaatttgtgggtgcaaatgaagcccagccctatgcattgattttaggttacatatctccctttctcaactcctacagcgttgagagtatcttgctagctttcacctttttctaggacgttgaatttttttctaggacatttgcaaaatgccgaggcagtaactttaaattttgactttgtcttttgctgagtcagatccattgagttttgagccagtcacatatggcagaagtgataacagtagagtttaatcaatttcacactattttgctctgtattttattgcaggaactggggagaaccagggagtcctaatagggatgtgggccagtaggtatcacaggtggggctggggagctggcgtgtttacatctcctgcctgcggagggagtttttgtttttgttttgttttgtttttggtggtggtttttgttttttgtttgttttgttcttgtgagaccgacagactcattctgtcacccagggtggagtgcagtggtgcgatttcagctccctgcaacttccgcctcccgggttcaagcgattctcctgcctcagcctcccgagtagatggggctacaggtgtgtgccaccaagcccagctaatttttgtatttttagtagagacaggttttcaccgtgttggccaggctggtcttgaatgcctgacctcaagttatccgccctccttggcctcccaaagtgctgggattacagggctcatttctactggcctggggaaatcattcaattgaggcctcaatcaactgaggcccagaaaagccaagttaattgtggctgcctctcttgttcaaaaattaccctagcccacttacctttttaaggttctatttcaaacggtacccactccctttcccagatgacttatccattacgcacagtaggtacgatgccaagggcccataaaacttttaggagcactcacaaatgtttaatttattct

SEQ ID NO: 584817 - DNA, 4001 bp, Homo sapiens
attacgttaagtgaagtaagcaaggcacaaaaatacaaatattacatgttctcactcatatgtggaagcttaaaaaagttgatctcatggaggtagagagtacaattatggttaccagaggctgggaagggtagaggagaggatagaggttggctaattaatacaaaaatatggttaaaaggaataagttctagtagagtgacaatagttaacaataatttattgtatatttcacaatagttagaagaaaagatttggaatgttcccaacaccaagaaatgataaatgtttaatgtgatggagatcctaattaccctgatttgatcatgacacattgtatgcatgtatcaaaatgtcacatatgcccataaagatgtacaattattatgtatcaattttttaattttttgttaaaaaagggcttaatgactgcaaagcacaaagcaaaagttgaataaacgggagccactgttagcagcaccagcaacattttcctgagtgatgttttggaaattggacatgcagtttgtatggtaaccatatttttcaagccggaaaaaactatgacttatgggatcagataggatatttggaagttggattgctgagaaactgaacatatctattactctactagctagcgcatccatagctcattctattttctaaaaagttatgagccattagctgcaggaaatatttcagctgaatttggcatgtttgtcatttttaacttcactttggcaaacaaggaagagtggaaaacacaaagctggatttcccagagctgtgttaagtcatttgaagcaaacaaaattgcagtttataatttaaccaatgcattaaccaacatttgcaaacattaatccctaagtctgaaggtttactttaaatgcaagacagatttgaagtattaacaaaaaagaaaaaaaatagcaatgttcttaaaaaaaaactttgcatggaatatatatttttataggaagactatattttaaataatctagttatttgtgccttaaaaagaataaattataattcataaggcattagatgactatatatacatcagctacatttaccacttcagatatatttacattctcagtgcaataattgatagctaatcaaatatatctcaaatattttacaaaattctccaagtaaaattaattctacatcaccaaaaaaatgtaatgcatatgccattaaacactttggataagaaaaaagacgctgttaaatctaactccaaaaatatatgggaatttgattttgagtttcatcattcaaatgattgattttattttactaggtattttgaagacatgacaaattatgagaagacaatctaaaacaaagcccacagttttttgcttgtttgtttattttagtaaagctatactttttttttaattccatggatatagtggtaaatttaagcagtgcgtggtggagaaaagggaatatttaacaaagtgatagctcttacaaataatactttgtactagacactgattaggaaatgtttgagaattgcaaaaaaaaactgcacacagggctgtgttaggttggctagaaaaatgacttactttctgcatataggaagagatttgttctaggtatcatacagtccagttacaaggtacatcttctgagaactagaatcttccttctatcatgtttaacaatcctacatcttcccccaactccctctgcttttagaaaactgttacccataattggccaacatattaaacacatttcagtcttctttaagtgcatatactcacctcgtcttttccactatttggcactctgcaatacacttcccctgttgatgggtcgtaagaatctatatatgagctacaaggtaaaaattttccatctatgaagttttccagcatcaaaagtgcgtttgttccagccatagcaaggaaaaattctgcctttcctctttacgactgagcactcaggttgtccccaccactgtctggactcctgagtgagcctcccccttcccagcccccatcttcccctttaccaatcagtgaatgtgggagggcacctgacgctctcagagagcattccagtctccaaactcagaactaagagagtggctgaatgtttcacagacttctagtacattacctgacatggataattgtgtgtaaaagtaacagctacttacttatgtgttcatagccctttaaatcatcagaaggcatctgtgcatgtgattttattgggttcacaccgtaaactgttcattgctcaaacactgattggatgccaggccccaaagcaagtcctttacatgaatttactcgtttattccacacaacaatcctatatgaagtaaccattacttcctctcttttatagaagaaactgagccttggagaggttagaccatttttccaaggtcacatagttagcaggggatgaactgtagccctttaatctccaaatcatatactttttcctcaatgcatcactgcttaccctgcagaggtaactgaagacagatgccctctttccgtggctcatctgtgtttctttaccttggctgccctctcttggaagagctgtctctccatcccaaaaccggggccacagtggctgctcacatcttcctagatgtgccatggagataaagacaagccaaaaacatgtgtgacacatatagcaagggcttcagatccctgatgtagctgagaatttctacaaattggtaagagaaatgagcaccccaacagaaaagataagcaaagatacaaaaaagcaatccataggaaaaggaacacaattggctaatgaatatattaacaatgttcagccttgttgttaagcaaggaatgtgaaatacagaggtggcctgatttgccaatcatactggagagcatttttaaagattgagaacatctactctgtgaggatgtggagaatcatccctagtccataggcgggagggttcacagaacactgcttggggcaatttgtcagggtctggtcaatttctcttctaggaatctctcctacagaattacgtgctcatgaacaagtacataagtcacaggacatccttttttatcataatttaaaaatcaaaacaacctaaagtccatcaattggagaatattagagtataattgttatattcttaacagggaatactacttagacattagaaggatgcattgttaagtgaaaaaataaaactagtgaataatatatacagcatagtttctttggctatttacatggttgacaggaagccgttttaaactgcttggatattttatggcaagcctatattacttttataattatgatttatagttataattcagttgaaggttaggtaccaatattctaaaattcattgatcacatgagggcacttgctggccgtgcacctccttaggccctctctgcttccatctttattggtctctagatattctccaaaattcttgctgagacttctgacaagcatggtgtggctgattctgggaggcccagagcagctggagtctggagctggcgccgttgcctgtcgctggagagtcgctgacagggactggagacagaaggtagtctcaggctttttctggtgctgcccacggtcaggtcagctggaaacagaatgagagaaatacgcaggtcccagccctggcaccacagagtgaagtaccaagaagtgagcttggtgctgagagacagtgagtaccacccggtgtgtgcataaagacttctgtagcccatcttcctgggtctccaacaactctgcctaatgttgatggactcatcagaatgtttgtctttttgtacagagtgcaaaagattctaatgggaggactatggaagggagatctttttgaagaaaggactttacccaggatagcatgagagaggaattttctgccacgtgacagtagaagaggacagaagccggacacggtgcttctaaagagtgcctggtgctgatcagaactcccc

SEQ ID NO: 584818 - DNA, 4001 bp, Homo sapiens
acaatcgttttaccaaacgtctatcacaaataccatctttctcatctgtgaaatgaaggaaatactaagcttctccatgaccaaagtccgcttcctataatctcacgtgagcctggcacgtagtaagcgctatagacattttaagtgtcacacgaagcttgaaaaaaatgagacgtgtgacattttagctatgactagtatttttttctacaatggaatcgttcaagatacactgctagaaaccgggtttcccgtcgtgccttaaagtctcggtagcacgtgtctgcctggattcccttttccagttgctttttgtcaagggacagctccaagaacagctaacactcctaaaacgcccattggtccacaccctggggccaggctctgagtgcggcccaggagcccattggtcgccgcctctcaatgaagctggccacgccagttactccgctgcaccgccaccctagccgcactcgtgcgcagaggagccagggatccggtggcagggcctaggaaggccattggtggccaccggtgcgaccgccgccaggaacaaggcctaagcatccacgggatctctgggcttttatataagcatggatttccacagcaataccaactaaaacgcctcttcggcgcggtcagcccaagtatctctcgcgtgacggcccgcagtgggagtgggccccagattcctttgctcaagcttaaggcattagaggcattatgtcctggggcaggcgggcctccctccacccgcacctctcccgccccgctccgccggctccgtagcaggttacacaacccaaggtcaagagattggggagcagcccccagcggcctcagcggccgtgtcgagggcggccccggggactgcgccgtctgcccagccgccccgaaaaggctctggcgcagagcatgttaggggagcggtggggccccgccactgcgacataactgctcccgcccaatccccgccgcccgaacgccacatgctgcccgcggccgccgcgggtgggaggcctcttcgccagcccctcagacaaggccgggagggcccctcctatccgcgcccgaggcaagaacaagcgccgctcccgccctccattccccgaagccggcacgcccgaattagcgcctgactaagcccgccgagccacacctgccggaggcaacccgcgcaggcgcccccgacccccacctggggcccctgccgccaactactacggagggaaatgtcgggaggcgcgggccgcaaaaccaccccgggccgcgccgcccgccgcccagcgcgggacgttacctgagcacgcggccgcgccggcctcctcccctcccccagggcaatgccaggcgcggcaaccacggcgggagaagccggctccggcccgcgtggacatggccgctctcccccaaaccgcgcaccttccaaggccgccgaagcgaccccaggccgcagacttgcccccaactgaaagctgagggaactcgggctccacccgtggctggtgcctcggcggcggcgacagcccccaggcccggatgtcagcgagcgccccggggacccaccttgggatagtgcgaagatccccagatccttggtttgcgtcgggctgctgccgggagaaccaaacctccagcagcttctcggtcccttcgaaaaaatgtgcagcttccatcaccgtgagactagcgaacaaccaacaaccacagaaaatcaactaaattaaacctcttctcccgccgctgccgccgccgctgcggattgttccagctgtgttactaaagttcaggttcctttttttttttgctataattttatattaactttttttaaaaaaaggactaataaaattttcccggctttgtgtgagcgaaagttgaacgtgagtcttttggaaatagaggcagatacagttcagtctcttgtattccgctgctttcccgttagagagagtagagcgagcgctagctaatgtcgccggccatactgtgtaagcgagagcgctgcgtgagcaccgcccttatatatcccggctccccccaaaagaccaggaagtgacgcatcgtcccacctccacggcctatagctgctgccgcctgtcaatcactcgcggccgagtggcggctggctggccgagggcctggcggagagcgcggggagctgcccactgcgctgcggctcgggctctggccggctcctgagtgggagttggtgctgtgatgtccagctggggactagaaacctcggatcgaacgcagagtgggtggggagagcgggaacggaatgaggaaaggctgtgcagagctgtttagaaaaaaaaaatgattagcagaaaacatgggtgggtccttaggggtgttggcggggttcagcggggacggtggccagcgctgggttggcgtggtggttttgatcttgtgcagttcaccgcgactgctgaggtacttggccattcttaaaagtgtgttttcccaaggcgaacgcagccaggcgttaaaactaaacatttgtccgtgacgcgcacgttgccaggggtcgaattagaaggcgctttaattctgctcacgccttggctgatgtgcgaatgaaagcagtcctcggctggtttatacaatagccagaagcattgtcttcctatttcagaagagaaaagcaacgtggcgcccagccttggagggccccggctttacccacctcccaccgtgtggctcgccatgcctccgaattggctgagcacagcagcctccgggaagcactggcagctccgttgctccattagctcaactggtgggaatttattcagcaaaactacttctagaaactgaatgtgttaaatataatctgaacttatttgatcatgtttttctttgaattttatcaagctgatgtattaattgatggaggttctccttaccccccaaaatttacagtgctatcttcccatgtgcttaagaaggatttacctggaaattaataaaacagggattccagagctatcactggtggtaacttaaataactatcagtctaatattttataagtgttaagtataaaatagtcgtcaagccatggtcaaacagtttaacctcagatggcaaaactggtaacaaagttattacttttacttgggaatatgggaggaaaaaaacccaagctgacataaaaattgctattgtcacaagacaaaaggacttttcgctatcatccttagaaaaaaactttccccaaagtgaaataagatgatgtcaacatgaaaaatccactgaaaaagacatggtttgggtttgcactctagataccctgtagaatagctcttgtcttacaagaacgtggttcacgtgtctccgtgaaacctgttgaaagaagctatgttgtgagctaggtacataaactactcttgctttgttttgtttgtctgagacggagtctcgctctgttgcccaggctggagttcagtggcgtgatctcggctcactgcaacctctgcctcctgggttcaagcgattctcctgccttagcctcccgagtagctgggattacaggtgcatgccaacacacccggccaatttttgtattttagtagagacgaggtttcaccatgtttgccaggcttgtcttgaactcctgacctcaggtgatctgcccacttcggcctcccaaagtgctgggaggccaccgcacccagccctcttgccatgttttataagcatccaactcaaactgcggattgggacaaaagataataaatgttgcttattttataatgataaaagaatgtggttactctacttggaataaagataaaagaagtatttctgtgttttacaagctgttcaattatttgatggttcttactgaagaatctgcctactaaaccacctcaaacactaattgtggtataaacataatttggcttataattgcttataattagttgcttctcaactactattatgcttttttcccagtgcaatttaagttaatataaaagtgccaa

SEQ ID NO: 584819 - DNA, 4001 bp, Homo sapiens
tctggtaagattcctttaattacgaaaatttcctttagaaatgtaaatttctctttacaaaggaagagttattctttattttaggcagtagtgggataagtgaagcattttcctgtgttggctggatcttaatttattttgctaaaagacatcaatatgccagagtggcgtattttggggtggcatattctggactccttcagttataatttggggtagtgtgtcctgagccccaacacaatgaaatcaatcaacgttcaccctaactaaaggggctttcttaaacattctagaacctcacatcatgcatagaccataaaaaatcctttacaattcaacccaaaggatcgtaaacgcggcttcctccaggcacttttaattgtccttagacagatggccaaagcctggttatgggaaccgcatatgctaagagaaagctgactacagcgccaagaaaatgatgattggctgctggggctcagaagttgcatgttctcctctggccaaggcaggctctaggaaactgctgaaggttcagtttttgaaatacggtttttgcatcgtaaagaaaaaagatcaacctatcaggaagaaccgagcacatccaatcaccaatcaagagcgggaaagaagccaaagcctggggatacccacgcaccaacgaggacgtcattctccagcccccgccaatgagcagcgggacggggggcggggcaataggcggacccactgccctagaaaagaaacaagctgcggtacaactgtcctcaccagccctcgcctcccgagtcactgcagccaacccttcagcaaggtgctgatttaatgctttccatactctctgcgtggggctagttacagtgaagtatccccttcccactagagtaaggcacttctttccagtgtctccccgagaaccgcagaaagcacactggaacttcgagctttctaccttcacaggaaccgggagccgtgcgctacctgagggggaggggcggccctggtacgcaggcgcgcatgctttgtgggggcgaggctgtggtggcccgaggtaacctgggagctgtatttcttacgccggcaaaaccgcccaggccgctgaggccttcgcgacttcatttcccaggagcctccgcgaccatggggcgggccagtgagttcgctaatgagctcgaggaagccacggcgcggcccaccaggttccaaaacaaggaaatgaaggagggaggcgggactgggggtgcctgcgggagccgccgccgccgtcgcggaggaggaggaggaagaggtggaggaggtggctgctgtggccgccgaggagtcccttgctgaaggcggaccgcggagcggcgggcggcgggcggcgcgcgcgcgcgcgcgagaggcggctgttggagaagtggagcggcggtcgcggggggaggaggaggagggactgagcggcggcggcccccgcgtcccgtgcctctatgggggaagcagacaatggattatgatttcaaggcgaagctggcggcggagcgggagcgggtggaggatttgtttgagtacgaagggtgcaaagtgggacgcggcacctacggtcacgtctacaaggcgaggcggaaagatgggtaagagcaggggcgggaggagtaggctcgctcgggtcctcgccctgcccgcgacctggcgggatgggtgggtcggatcccagtcgggccgtgcccgaggggcgaggcggagggggtcgcggggttgcgtccggacaccgactccgaggggcgcccgttccgcccgcctcccccgcgcggccccgtcgcgtacctcgaactcccgcggcgcagcccggtccgaggcgtcggtcccgtcccagaggggcgccctccgagtgctcggagacggcggggggactcgagttgggaccgcggtggaggaggagtttgtggggtctagtctcttgggggaacgcagcgggcaggcagagctccgctgcggagttgccgctccggccctgggtagtgacggtcgttgtggaacttccaatcggctgagcgcctcgcgggggcggcggtttgaaacctcgccggggagcctgtcgggcgaacgcggcctggggtcctcgccagccccacggctctgacccgctgggcaccgccgcccccagcagcgatctccgcccttcgggctggccggcccgttggcttctctatgcagtcctcccatccctgttgtatgcccggcgtcccgggtttctcattctcacattctgaattgcgtaccttcccccttcgaaggagacctgatgggctagctgcgtttcgcaagcggcaacttaagagttggctgaattctctgctacccaccctttaccttgcagccccttgggtatcttgggtattatgtcctccactccatcctctgccagatgactgtgggctggggcttatggagtacctatattatcaagaacggaatacgaagtgacagagctgggcctgaacctttgttttcctaggagttgagggagaactgtaggaacaccttgggaagcctttactggttgtcctcttaagaagagctggataatgtactgagaatacctgtcctttcttggtcctggagggcagacagcagctacagcaggactggtggaaccagcttcctggcaggaattaccctcccccaaagctagggacccaggaagatgccctgtccagcatagactttaaagagagtcaaactctacggaagaggattgtaacggaccatttctgaataaagtgatgatcagccacaatgacattagtaaaatttgaagtgccgcttatctttgtgcgtgctgttataatttgatgtggttggtatatgaactctaggactaaagtacgttgtgtgcgtatgcactaacttcataaaacaactctattataaagtgttttgtcataaggtatcgtgaaaattgcaaagtgctatccaagtgtaaaggattattattattgcagaattttttttttcttttgtaactgaacaggccttaaggtactcagttgtttctcataattcctttaattaccaggtgtccttgaatgcttatcatggaatgtgagatactataattaacatattttggttttggaatatccactccacctgttatactagtgttcttgtgggaattttatcagttatatttggggaaagcacatccagttttccgtttggacattgttaataaatctgaggtgggtttttcccatactcctcatgctaactttgtggtatacttttggttttaaaaaatgtatcttagtgttttttttgttaaaatagctttcttttattagggaacttttgagaagttaaaaattctgcttctgaattgtatttgaatagtatgggcttacaacaaaaaccagataattcttgcttctattctttttgaatatttttcccctctaataaagtacttgattcgaatacacttcctttttgagtgaaatttgttaattagaattaataaagcttctttactagagtaagattagtttgtgtgtcttcaaaatataatgctttttttctaaaaaaaaaaaaaacctctcaggatctgaaagcattagtttaaatcactgtattacgtataagaaaaaccgtaataaaggcttttttcctggatgaaagatctggttgagatttgcaactttacagtaaacacccacgtctcttgtgggttggtagtgggattaattttatgttcattgataccagcaatttgaaagaacatctgtgtcctttgggttcatgttaaatttttttttttttttttttttactgttttaaacagtgggcagatttgcatagtaaaggattttacactccgatcatggtagattacagtttagctctttctagattttattttggttaactcagaaaatgcataatgctattttagggagccagaaatcacataggttacattaaagataaatgattctggtatatataatgtagtatataac

SEQ ID NO: 584820 - DNA, 4001 bp, Homo sapiens
ctctatacaagaaggaggccttgggagttggaagtgtgccttgtctctaagctgagttggatcgcaggcagtctgcttttacatggagcatatgcttatctggaaaggctttggggaggctgatgagtttaagtgggagactaagattaatttttggtgccaccatgaaaaaacaaggagttaataaattcacatttttaaaaattaccattggtttatacctcccaacactgcgactagttgttttctggtctctttaattcctcttcatccctcttctacccttcccccatgtccagtatgacctagagggcagaaaatactccccaattttaatttgtatccctaatttttaaaaaattttttgttaccatatgctaaacaaatactaaagatgacaaagtgtaacatgtatcggtatagacacacctactacactcaagaacaaggctgcagaccagtacagtggctcacacctgtaatcccaacactttgggaggctgagacaggaggagttcgagaccagcttaggcaacacagtgagactctgtctctagtaaaataaaaaaattcaaaattagccaggtgtggtggtcccaggctgaggtgggaagatcggttgagctaaggaggtcaaagcttacagcctgggcaacagagcgaaactctgtctcaaaacaacaacaacaaaaaccccgccaaggctgctattggtgttttggggatgagaaacccccaatcagtataccatggatgggaccaccttggacccaggtgtgtttgtcttcattgcccaagttctttccacttacactggcctaacagaacctaagcatgaatgaattcaacatccaacaggttcgcaaaaggtgtctaacacacaagagtacaatgccaagcatttcattcccatcacttcactgcatgaacacaatactacgaggttatgtacaatacctgcagtttagagttctaaaaactaaggtttaaagaagtgggttttccaaagtcacacacctaacaagtggtggagtcagaactccatctcacgggcccgaagtggctctttactaccacgtgacccatctcatgctacctcgcgggggaaacattcttgaccagctttgagacattcaagtccctcttgggtcacaaataatgctgcacttcccctccagtccccgagatctaccggaagcaacacacttaaaagcccaagataagcttgggtgagctgatgtctggacccaaaccagacagcacgccgactctctggaccccgggagatgccacttgctgaggcttcgccgatggggctcctgaggggtatcggcccctctcctgcgactgcaccctagtgctgtcgtccagggcggggagggacggggtcattcggaggcggccgcaggccagggacctaccctcctacgcgccgcagaccgcggggtactcggacccccgcccccaccgcccttccttcaaactgcaagcgagcaggagaacgagggacgagccccagaagaaagttctccacctccctcgcccgaagttccatattccagggaggcaactgatgccaggcgaagagggaggcgccccggggggaccccctcgcgccgggcgttttcggaggccgcaggccagggggcgaggcgcggtgtccgggtctcctccgcgggcagtcggcgatcctggggtgccgagggagcagcgcccccttcccccgacagcgtcctccccgacctgaggcgcccaccccggtgtaagcgggggtcccagggagccggcgaggtcgcctggtacctttctctcccgcgccggacgtccgcgccgcagggaccaaggccggcgacacggtggggggcgaggggcgaagacggggactggctcccgctggctccggcggccccagggcctcggcgccgcccagcgccgtgcctccagccgcccgcgcgccaggcagcgctctcggctcctgcgggttacctgtggccgagcccgccgcgtccgccgccgcagggccctctgccccgtcccgccggccccgccccacccctgccggcggctcctacgccggtgccgcagcgcctcccagcggcgagccggggcacggcagggaccctcgcgagagagaggtggcaccgcggaggccctggggctggccccgatctgcagccctctcctgggtggggccaccgccttctgaagagtgggaggaagggggcctatagtagggtgaggttttccgcgtgggggttgccaggaagtgtattgggaggggaggagaattagcaggaggaacctcccaccttcactcaattcgtggccaagtggatatttcaatataaccatagctcacttaactggggctgctcagtacaaactgaacaacaatgatgaatgacccagatttattggggtagctggagaggggaaaggaagcctttatttctaacagcttgactataagtatcttgttggaatcatcccatatggaaatggcaaaagcattgagcgagcctgacccccatattcatatcacactttacataccattatctcagtctggttttgtctattttcattcacagccacttcttcaatacctagaagagctccctgaacacaggaagcattcaataagctactgttgaatacatgtaagatggatgggatctcattccaccctttgaagaagcatggacaggtatctgctctccaaaggcggagagatggaagaggaggcaagcagcaccctaaaatggactatcaatcttacctgaggttttgggacaagcttatcacgaatctgatttttttttctttcttgcttaaaatttttttttgagacgaagtctcactctgtcacccaggctggagtgcaatggcaccatctaggctcactgcaacctccgcctcccaggttcaagtgattctcctgcctcagcctcctgagtagctgggattacaggtgcccgccaccatccctggctaatttttgtatttttagtagagatggggtttcaccatattggtcaggctggtctcgaactcctgacctcgtgatcctccagcctcggcctcccaaagtgctgggattacaggcatgagccactgcacccagccgacttttcttattccctctgaaacaggcctggtttccaggagaaaagaaacatgatgatttcttccttttccttaagatgtttgtttccctctctccttcagggatcattaggcaggagagatcccaagagcctgtttccacactaggaaggggaagttcttgattttctcctactgcttctgaaattttcccaaccccatagtcacagctgcagttttacctaacaggatgtgaaatctctcttctgagtatcctttggccttttccagacttttttttcccccttaagatggggccttgctgtgtcacccaggctgaagtgcagtagcccactgcagtcttgaactcctgggctcaagcaatcctcctgcctctgcctcctgaatagttgggattacaagtgtgcaccaccatgcccagctaatttttttatgtttaacacagaggaggtcaaggctggtcttgaactcctgggctcaagtaatcctccggcctcagcctcccaaagtgttgggattacaggtgtgagccaccgcgcccagcccttcttcagatttgtgccccattcctgttgctctacacctggagctgatagaagaacacatttcctttctctgctggcttgtagctccaggtttctctccaggcaggttactaatgagttcctagataaccctcaaagtcaaagtttgtacacatgacctttctttttattttttgagatggagttttgcttttattgcccaggctagagtgcagtggtgcaatctcggctcactgcaacctccaccttccggtttcaagcaattctcctgcctcagcctcccaagtagctgggattacaggcgcctgccaccacgcccagctaattttt

SEQ ID NO: 584821 - DNA, 4001 bp, Homo sapiens
tttcagttacagctacttaagaatgttcctctctcattccatcccctccaccatgaccaaagcacccacagagcagcctccagaacaggtccctcacacaggactttggatactctccctaccagagtcatacagaaaactgcctgcaagatcaggaacagaaccccagctttccaattcctagtctgttgccaacaccatccctatgtgcttggacatctcaaactcattttcaatttaagcccagtaatcgcctccttactaggatctccagccttcacctgcaggtgcatttacacacagtttgtgggtgggaaggtatcaaatgagggtcttcttttctgcttcctttctgcttcttcctgcaccttcagccttgggtgtgggtgcaggcccagcagagataccaggtgcaggccaagcagagacaccacctctctccctccctcatggtcactgttcctaagtcccaaatccttacctcccatctagaacaatgatacccattccttagagtgagaagacactctgcttcttctcatctgatgccctgacctgacaaattggaccagatagagatgtgtgtgttgcaggggtggggggcagtttaagaagggatgggggaacccctgacagtaaattgggagggaaagggaatagaggggtgaaaccagtcttgaatcaaagagttaaacttcactgccaacctgttggctaccttggctgtagcagttcatcccctccttatatctgagcctcctcttccaagtagatcagctatcattcaagatacttcccattgctggcagtgagaaatgtattctgccccaagcctatcaattacacccctctttgtcacaatgttcatttttcacagcattctggaggaaaaccttaaacgcaaacacgctgcccattctttaagcaaaaaggaaataaacacatgagcataagtatgcaatgcacattctgaatctagatagggatttagcttgctaagatttccctccatcctcccagcccactgccccatttttgttgctctgtaatttgctaattcttttgtctctcatcacaaataccagagggtcacacagctgcttgtctgtgatgcaatcagttttctttttacagaaaaaggtctataaggtttgcttttgctgttctcttggggctttacaacaaattctcctatactttggagaatttgccaatatcctaaagccactacgttctgtctcccgacaagcaaaatattccagaagagacctgcaaataaaagtcccggccaggcattatgtacaacccacccagagatggcccacaggcacccaggaactggtggctatggagcgccatcagctataaactagctttgctcctactgctccaaaccttgtgttgaagagatggtactcacatccgaggggctgtcctctctgttctacatcgtgttcagtttctggataactgtggtcaattctttcctggagagatcattagcttcctagggctgtcactcccagcaaatctgcagtgatttacgttacaatgttcgctgccttttcccgttagcctcctctgctgatgctggccaaatcacatctaaaagcttattaagacatccattcagcttgcaatgttttgtggcttgctagtctgctcgtcacagcttctgaaagtcttgtgtctgcagattttcacggactgctccctcctgccagcagaggacctgtaacactgccccgattgaagtcagggaacaattcacagatcggaggaacatttctgaatgacgctcagatgacagagaaacgaagtttgcataatttcagcagtaatgcaagaaaagatgagtgtgcgtgttgtaagggagggagggatgcagaaagggttgaaatctgtaataaactgcctccaagaaaacaggaaaatgcttgctttgtgggagcagcggagcccagacactccaccctcctcggcagagagttccagcacagtgactgcggcagcacaggagacaagggtctggctgagcagctgttcccgacgtttgtctcacaaatactcctctgaacagtctctgccggggagggggaagggagtaaacagggaactgagccccttcagaagctgttctgagtgctgtcgactgccctaaacttgtaagcgtgtgctccagcccacttgttgaagcaacagaaatctaattcccacctggagagatcatagaaaggagagggctttcattttgacttgagccaatatccccacattttcctctctgtctctaaagacagaatttttggtcccagagatggggaaattactctgtcagtacaaaccctcttaccacctgccgtcctaaagcattgccctatttccccaagggtaatggggcaatggaatggactgcaatcctgctttggtcatcatttgccttacaccaagggcaggagaatagctggagactctggtgggtgcattgcaaagaggctgaatcccactggggaaacaaattgccagcagaataacacaagcttaaaaaaaaatatacaaccatcatactagttatccaaaagcaatcactactgggttactgtgatcaccactgggggacaagtaaggctgcaacagagaggaatgtgactcaatccgtactttaaagaaactcatcatctggccactgaaaagccacgatcagggaccaaaagtccagttgccagaagataagtgtaaactgagtgggaaggaagaataaagcaaggagtggttcattttcttacagcttccagaacacttcctccttctgagaagatctactcccacaggtagggcccttaacacagtactacctatgaggacactcagcactgactgctcacggaacctggtgcccaccaggactatttgcgaaagaagggaaatgacagggtggacacgctctgctttagcaagcccatgactcattataaatacaccccactgtcacaaagaaacaagtatgtttatttcttgagccatttaaagcacaaaaactctcttcttctaactctgtcactgaatcttttgaaataaccacctctgcaggaggcatagaggctgttacagtgaaagctgagtgacatctgaatattattcaggaaacctgtgacatacccttccaagaaaagctgcttacagatgtaaaaatcacataggaggaataagcacatatcaccgaataaagatgtgactgacagaaggcttgggaggtagagaccgtccctttttatgtaggacaataacttattgactgaccagcactgctagaccaccagagcctccaagtcagggctgggcactcccatcacttggcaaatgaccatgcgcatactcaaagttcagaccaagtgttatctctgctaagccttctgctgtccctgccttgccctagacaagatgaccattccctcatctgtgcacctaccgtttttcttttttctttttttttggagacaaagtctcgctcttgtccccccaggctacagtgcaatagcgcaatctcggctcactgcaacctcggcctcccaggttcaagtgattctcctgcctcagcttcccgagtagctgggattacagacgactaccatgatgcccggccaatttttgtattttagcagagacggggtttcaccatgttggccaggctggtctcaaactcctgacctgaggtgatccaaacgcctcagcctcccaaagtgctgggattataggcgtgagccaccgtgcccagccagcacctacagttttctataagcttctgctatgaactgaattgcgtcccccaattcatatgttgaagcccacacccccagtgtgactgtatttggaaataggagataattaaggtgaatttggtcataaaggtggagccctgatctgatagaattagcgcactcatgcttgcacacgtactctgagtgtgcacacacagaagaacagccatgtgaggacaaaac

SEQ ID NO: 584822 - DNA, 4001 bp, Homo sapiens
tttgttcctcagttctggaggccgggatgcgtgagttcagggtacccgcgtggtcaggttccagtgggggcccttttcctagcttgctgatgaccaccttctcactgtgtcctcacatagcagggagaaggagagacagcagaccctggtgcctcttcttacatagaaactaatttcatcacaagggctccactctcatgaccccatttaaaaacctaattacttcctaaaggccctatatctctaaataccattagggattagggttgaaaaaaacgaatttgggggagaaacaattcagtgcatagcagtggtggtataaatacgctagaaattattgaattgtacaattaaaataggtgaatttaatgaacgtaaattatatcttaataaagctgtttataaaatagcaaataattaagtctatgtatagaaaaaacttgcagactatgccctaagtgcattaaataagttattgttcttataacaattctgaaaagctgacattactatccctcttttacagataagaaactgaggctcaaagaagttaagcaacttgcacaattagcaaacaaagcagagttaaaatctgtgagcaggtgccctaactacagagtctgcactctctcccatttgtgattgcctgggccctggaaagtgctatgggtagatcacacaagctctgagttaaggcccccttcaccttcagttccaaacaatccaatcaccatctatgggcaaacccctgttcacctccatggggacctacaagtagctcaagacctctctggaggccggcatggaatgtgaaaactgcacataagtaaacatgaaaataggagctgaccgatctgccacaggaggtcagaagttaacaggtgaccttctatgaaaattaaactttgcccctcttcacagctctttctggggaggactggaggttgggcttcggagccagactctgtgggtacaagttgcatttccaccactcagcggctgagggaccctggacaagtttcctcctctccaaaacaggaatgagaagagaatctcttctagaaggctgtaaagtgcttacagcaatactagggctcaataagtgcttgctatcagcattactttgccagtgtatttaaactctccctctagctgcgcggagcctgccttttcttggctttgctacaaaactgcctttggccagtatggtctcttatctttcatagtcttctctgttggcgcagggtaagcaatgccctccaaagcttaccacccatcttcactgacccacatgaaatcaaagcctatagaggttgtagcagtcatctggtccaggccgtcatcatacagacggggacaatgagactctgcacagtggaggggctgtgtacaagctggtccacctccccgggaggcccatctaacgtgattatcgcacactctgtccagtaagcttttgtgtcccaacttctcccaagagatctcctctccatttagctaaagaaataggtgagaaaagccaccgtgattttaaagactgtcaaatgctaattacaagttgctccacttgaaagatggcaacaaaagcattcttaataatcctccttctccccaaacctccatcattggaagaaaagccagttctttgaaagctgtgaaccaaacacagcagtttttcagacaatggttaagaggtaggccagttcccagggaatggctacagcgtatttttctcttgttaccttggtaaccgctaccctggcgcccttgttgatgagctgaaccacattctctgtttggcctttgtacgcagctacgagaaggcgctctgaaagtgcagcgaccgcatcttgctggctcatgaattaggaaagaaaggttttcagggaagcggtagacaagttccttcagctcaacacgaagtcactggcccggcctggcacccagaggtaaagatgttcacaatcatcagaagatgtctttatgaatatgccatcttcgggacctaggggttacaaaacaaaggtgccatcagggccacttgacacacaaggacaggtcacacctcttctctgtgattttaaggcattctgctgcttgcatgttgcaggggagggtagctgtgggaggcaggacacacaggaagcacactccacagcaaagcccctgaacagaacttccaagtggaaggcagcagaatgtgccaacttccctcccttcttcccctatcagggacatcctccggaggagtatggccagaactgcaaggtttgctctgtttttctcccagggagcggaggcctggtataatcccctaagcaccacctggtttacacaccgcctttggcagggaactgtaccgtgtgtgatcatcaaaggccccctggttggattttgtgcgtccaccatggctaacgtgccgcttccccagtgggtcagtggcctgtggaacacaccccacagagaccctgctgagtgggttctctctttggggttttctcctagcatttactgcagttctctcccttcaaccttttttcaccgtaaatagtgtagttcacgagttctggaacagatggagagctgggcacaggcctgggccaattccttgttccaagtggctgaaacaatccaccttggggacaacacagatgctaaacactaacagtggctctgccaatgcagggggctggtcatgttgcttccttgctaacaggaggaaaagaagtggcaccaaaaccacctatggaacactaaagccctgtcgcagagcagtgatctggagggtagtaactagtagcaaactgaattcttcctaccacatagcaaaatgaagagaattttaaagactgggactccccccagtatacctgggctgccattagacccaaccaaagccactggtaattatttcaagggtgaatggtagaagaagaaatacttaaatgtctaatccagtcctgctagaacagcaaggaagtgagggcttctttgcattttaaaagatacttattaaaaatactagtacatacaaatggaaagaaaatgctacaacagagataccatccttcaacccaaaccctaccacacatcctaactctgaaggtctggaagatgcagccatcctttacatttgttcccaggcacacccaaatgtcctttcagtctctaaagattaaggaattggccatgatacggctggaaagccctggaccatatcctgtttgaactcgttcaccgtggcattcaggcaggttgtttggccaaccactctgtgaggctagggttaaatgcccacgtataaaacagacatgagaacatttatctcccaggactgtggtgggtattaaagagggtattttattatgtgaaagtatggcccagatgtgaatactgtaacttcggaaagaattcttaccccccactcttgtgaattatcaaactttctcatcattctccatctgttgctcaaaatgcaggtaaagaatagcagaaaaagagagaggaactctcgcaaacccatcctgctcctgctcactgggtcattagaaacaaaacagatctggtgaagggtctgctgtaaagcagcttggtgagtcacggtctgagatccctgggatatgccagaaatagaacaagccaaaaaaaaaaagaaggaataaagttgagactcaaaacactgaaagtaatggaactggaaatgcctttgaaaattctcatggtcacgctgaacggccacagtctgggctttatctttcccagaccgttacactatttgaagtggtttgtttttaaaaacataggtgcgctgcctcttttcattcaggtaatctgtgctttgttcaaaccaattatactgagcttctgctctgtttgcccaaatattgcaaaatcactccaggcctaaatggcaggaaaatagagtattagccatgacttatgaaatgatctcccttccacagccacaccctcccccccgtcatctacccatttgttaactc

SEQ ID NO: 584823 - DNA, 4001 bp, Homo sapiens
ctggcctgagattctgcattgtaacaagttctcacaacggtactagctcacttaccacactctgagtagcaatatctttgtggctgaaaagtaaggtatagactggctggaagcaaaattggagagctgaggagggagtaaggatgtggcagctgttctcaactgaggggatacatgagaatcagcagtggattttcaaaaatacagatgcctgggcctcagtccaaaaggaatcagaatctttgggtgtgcaggacaaggattgggcatgttttgtgaagtagatgctctgtacatactatgttaggtaaaagagaagatggcacagactgcattttactttcaaaattcattttaatagaaatcccttacactggagtgtttgatcaatgatagaatagtaaacaaaaatgctagagtgtttctaatctgagggtgccactaaaataaaaccattttttaaatcagtatctagaagtttttcgcttgcctttcatagaggcctttaagcaggtgtacatttcaactaaccccatttgtcccacatttgagttcatgccaagattccataactttccatgggtgagttgcaattcaagtggaagcattaggcagcaaaatttatttccagagaaatggaaaagccgattctaaaaaatcatatggaaatgcaagggacccagaagaaaacaatcttgaaagagagcaaagttagaggactcacacttcctgattccaataagtatgccaggaaaattcagtgacaacataatagtcttttcaataaatgatgctgagacaactggatatctacagctaaaagaatgaagttggtcctctccctcacaaagatgtattcctgtgttttcctctaagagttttatagttttaagacttacttttaggtctgtgatccgttttgagttaatttttatacttgacaacaattgccacaaaacaattgaacataaatataagggttttttctagactctcagatctactccgttgctctaaatatctatctttatgctagtactacacagtcctgattactgcaggtttgtagtaagttttgaaatgggaaagtctgagtattccaatgagctatatacccaagagaagaaaaacatatatccatataaacatttgtacatgtatgttcttagaagcattatttataagaggcaaaagtggaaacatcccaaaggttcatcaatagatgaatagatacacaaaatgtggaatatccatataaagcattcttatttggcaataaaaaggaatgaagtactgatacatactttatggatgaaccttgaaacatgctaagtgaaagaagccagttacagaagaccacatattgcatacctccatgtatgtggaatgcccagaataagcaaatctagatagctagaatgtagactataggcagcctagggctgcgatggaggttggggtggggagtgactgctgataagtacaggatttctttttggggtgatgaaatgttcttaaattagattagatgctttcacaactccaaaaggcccaaaaccactgaattctacattttaaatgaatccagttttatggtatgtgaattgtattttaacaaagctgctttacaaaaaactattaattagaagctttctacaaaacaaaaacaaacacaatttgtttgcagaaaatatatacaactcactagcttggcattgactactgaaatttatcaattggttcctttagtaaccaatccttgtgaatttgattaaatgcacttgatttcctatctttctggtagaggcacatctaccataaagataggaaatcaagtgcaaagtagtcaataaatatcagttttaataaatgtgagtgatttttaataactatagtaaataagagagggtaacttaaaaacacttactgtcttgtgtgaaatttgaggagctctgtgctgacaggcagtcctaaccatccggagtgttgtgtccatgccatggaaactgactcctccttctgcatgaaagccagccagtcaacttcagcttccctaggtgtctggtggggtgggattgccagtctgcttcacaccctaactcttcagcagttccagccatcttttttagtccaaatgtgttggcccttaacaggttctttcaaatagtatttaatgcaaaaaataaaagtaaaataaaatttaaaaagctgtgaatgattgtctgcccacataatactgtgacggaggtaggctgcttacagaccacataaccataagagatgtgagacctgtgggggagtggggacagtgtgggctcctcacattcagaagcagctgtcaggtcttgggcaagttccttaactttagagaggcttttttcttttcttttttttttttctcaccaataacatgaaattttaacatcttttttttatagtgctattaaatatgactagctaaaataatttagaaaacacttggcacagggtagatgcttttacaaaaagaagaagaagaaggaggagaaggaggaggaggaggaggagaaggagaaggagaaggagaaggagaaccaaataaaaattcctaggtgctttctttttgcttcctctttttaccccttgctctaagcgaaaatctaccatattgatgatgatgctggtcaaaaagaccttatttcttcttcctctctttctacattttccctgccttttccctctctccttccttttctttttccctttctctgaagggagttcctctctctcactctctctctcttactatctttcccacctccctcattctccatccatttctctccctgcctttcttcccatatgtatttagtgaatgccttatatctgtcaagcaccactgtactgggccctgtgaagatcaagatacccattgttcctgtcgtccttgagcttttggtctagataagaataaacaagaaaacaaataaacgtacacaagtagactcacaacctgtacgagtacaatgaacaaacaacatacaatagcagagaacaccaggaaaggagtatgggcaacttaggggatgacatttgagggtctgaggggagacctggcagagcagaagaaatcaggcatctgaagagctaggaagatgacctaggtagagggaggggaggagcttggcttaggtgaagaatgaagaagaggaggatgcagctggtttatgcagtgtggggcaagtagaagatgagatcattcccggtctactaggacatggtaaggagtttggattgtattccaagtacaacgagtagacattggaagcacttaaacaacgaagaagaatgtgcaacttttattttcttaaaagactactttgactattatgtggaaaatggagcaaaaggagacaagattgaaagcaggaagattgctgaggaggctaccgtggaagtccagacaagaaaggatggtgacttggtgaactgtggccatagagatgaaagaagtgagtgaaattaaaagttttttaggagggaacattgatggaagttgccaatggattagacatgagtactggggggaaagagggcatcaaggatgatcctcaggtttctggcttgacgaacctggtggaaggtgctcacattcgtggtaggaggtgactagggtagggccaggtttgggtaagggaaggacagtataaatgaagcgttctgtttcaatgtgttaagtttgagatacctatgagacacccaaatatcaagtaggaatccagagttctgtgactttgggctaaagatacatattctggagttatcagcacataggtgacatttaaagatgtaagagtatataagataatctaaggatagcaaatgcagagaggagacccaagctctgaggcccttagatctggcagcaaagaataattagcaaaggttattaagaagcaccactgagaggtaggagggaaaccaggagaactgagtcttacagaagccaagaggagaagaat

SEQ ID NO: 584824 - DNA, 4001 bp, Homo sapiens
tgcctaaggagcaccaaataagtctccattctcatttctgtgcctctgatcatggggtacccacctgaaacatgcccatcataactcacctacccaaatcctcacatccttcaaggccagcttaagtctccctccttttggaagccctgacttccactccatccctaaatgatgtctctgttctctgagctgctagcaattacagcgagtaataccatccaccatccatttatttagaaatttattgtcctgcaactgatacttttatttcttcaacaaatcttaagtacctacttatattgctttttaaaatcttcctgtaaagacctgggttggtactcagtgcttaatatctattaataacaatttattagcgccttaggcttatatggtccaagctcactcaaactgaagttacataaagtaatggggaacaaaagctaacgaaggcatttctaaatgaacttccacttcttaaaaacctcaaaagaacaaggaaggaaaaagaaatcaggctatgaaagcgctgctgaactaacacatttaactcacactaacaaagcacccccaatcccccttcgaagccacacaaaactgatgtttttccctcggtccttacagctccagattgaagcgtttaacaacagaccttggaaaagtttacagcatccttcggtttcctaaacaagtctctctgcctttatttctagatgaataagcccctggatgaatcctgcatatgccacttagactaatccaatgaggttcactacaaggaactacaatttgaacttcaagcacaagagaggctcaaagacgaacatcttgaaaatgatacatccagaggcaattttaataaaacaaaagcgaggggccaggcgcggtggctcacgcctgtaatcccagcactttgggaagccgaggcgggcggttcctgaggtcaagagttcgagaccagcctggccaatatggtgaaaccccgtctctactaaaaatacaaaaattagcctggtgtcgtggcgggcgcctgtaatcccagctacttgggaggcagaggcaggagaatcgcttgaacccgggaggcggaggttgcagtgagccgagatcgcgccactgcactccagcctggctgacagaacaagtctccgtctcgagggaaaaaaaaaaataaagcgaggtcctgtgtagcctggtggaaggttccaagttcctcagagaagaaaatcaatagaatttcctccagaggagcctcgagattctacaaggcgtaggagtttctgcaggaggtgagggagatctcatatatatatatataagatatacatatttgctcttaattggcttttgtgagctacgatagctggcaccctgtagcgagcgagagtgaaccctggctgtgccatgcggcggaggctgccacctgggcactcccaccattcttcgcagccgggtcagaacgggagaccaggcgagcccggagcagcgtggactcggacctgcgcgccctccggtaccctggcccgcgggccgcctgcctcgccccgggcacgccacaagcccaccccgcccgagtctcaggacccccgatctctctggggacccaagagacgggtgggggagaaagggtctgcaggcagcggcccggccctggcgcgtacccacctgagcagactggagagggggtggctggaagagccgaggccgccgccgccgccgccgctgccgccgccgccgcccccagagccaccgccgccgccgcccccaaagcctgaggagagccgcttcccggacagcagcttctccaccgccgggaggtgcccggtgcgggccgcctccagcagctcctgctccttccccatccccagggccgccacccgctggaccccctccccgaggctgcagccgagcctgctcgggctcccaaactttccgtctccgggcaacgcaccccccaaaccggctggggacaccaccccctccctgccttttccccacgagcgcgtcacttccgggatccggcgtcacgcgtcaccgcgcccccgcgccccgccccctagctcacctagctgggcggggctccgcggaccagcgcaggtggactttgctgtgccgagacacgcctctcggggcatggggacagcgccttgtgggcccccattatgcaggtggaaagggacaaacaggcccacctgtacgcgcctcccgaagtgcgctccttccccaaaggttttgggagctcctgggacaggaaatacggtaattcgtccaggcagcgtagaaacaaagagataaatgtaacgcgcacctacatttccaagtccattctttcagcacgcataaattaaatatgtaataggtgcggggacctagtcatacccaggtgaataaaacgccctccccctcgtatctcaatgagggaagagaagaaaattttaaaacagaaatatcctcaccacttcatcctcccagtacgtgaactagttcattaaagtgaaacgttcaaaggagacaccttcctctctttaggctttcctcttagttttaatgagattaaccaaactgatagaaaagtgtcagacttgtaaaaacaaacctcaatcttcagtactggcgaactgaaaaaaatcatttaattgggtagaaactatgtgtgttttgttccctggtactagcactgtttctaaatcgaagtaggcagtcaatagttgtggatgaataaatgaattggataaattctgctcgagctatatgactttttgttgttaaggtgcttgcggaatggaggggaaatgctagcaattctatgtacacacaggcccgcggtttcgggccagttgaaatatacaaggttgagtccttgcctgaaagtttaccagtcccggggagcctcattccacgacaccgccatacaacggaactgagttttctcccagtcccccaactttactctgaggggttaacgaagggattaactgacattgcatttttagacaggcgaaaaggaaaaagttatttagtaaacaaaactgcgctccttcacaagtgctggtttcctagcgaggaggatccatagtctgagctctttacgtccaattttcccgcttcccactgtcgccaaaccaaagttaaaatgagtcctctagtcctctacgcgcgcctcaaaatgacccctcaggagagcggtaggggtgatgtcatcgctgcgcgacgacaggaagtaagatcctggcctgtgcagctcgggtttccgagcttctgcctcaggcatctccgcgatctcctctcccctccaatcctatccgtgatggacgatgcccacgagtcgccctccgacaaaggtggagagacaggggagtcggatgagacggccgctgtgcccggggacccgggggctaccgacaccgatggaatcccagaggaaactgacggagacgcagatgtggacttgaaagaagctgcagcggaggaaggcgaggtaggaagagatgtactgatgaggctgaaggaatacccagagattgtgttactggctgctcgccgggcttctggttagtccctaacaagttacgagaactcgaactcaccagaattccctccagatcgttaatcttgagggggaagagaggggacgaccaaacaaaactccagtgctggttcggttccagaggctcaagcactgttaatatttttagtcttgtctttagggattaaagctacttctaagggagttataatagcccgttggctttggtggtgaggaaattgggatccaatgtcacactgagacgtagtgcaagagctaaaacccaggattcgtagcacccctttcaccgcaatatggttcctcttagatgttaagacaacttttgtctttataggaaggagggtcgatcagacctgtcaaagggagatagacttttatatcgaaaagtctatatcgatatagacttttatatcgaacacgatttaacctgagagtcgcccgggctggagaacaatgg

SEQ ID NO: 584825 - DNA, 4001 bp, Homo sapiens
agaaaggatactttgctgggagtaagaagatgtgccacctaccagttctgtggttttggacataccattcaatctctctgagtctcagtttccccctctgtaaagtggcaataatatatctccctctcctacctttgtgctgagtgttgaatggtctcatgttcatgaaactatgttgtgattataaagccctggacaaatgtaagttatatcagtggacttaacccttcaggatccattgctctgggacccccaaagcatgttcagctgaacaaacatagtctaattctgttcttgacctaccctccctctgtgttggaaagccacacaagagtgtagtgtgcacacgcgtgtgtgtatgactaaggatagcgtataccagcatgcttaggtgttagaaaaaggctctccttccataagaaagccactggaattgaggactctcctggccaggctgccttaggctttccctgtgtctatattaatctgtgcccagctgctcccttaatcctaggatgagggtgagattagttgggtgggcatgggcaaatggaaattcaggggctactcttgcctcaggaaataggatgcattttcccttaggttctcttgaaaatcagaaaacatctgagctggaagggaccttactactatagatcttcatgttataagtgctaaaactgtggctgactggaaaatcacttgtcaagcttgaaatatcaagtccaaattgccactcagggcttcctttcccccttgaaagcatcatgcctcctttcttcctgaaacttctcttagtctcgcacccactctgcctgtggtcattcctggagaccccatgaagggaacgtttggttcaaggaggaaatatggcctcatagattctctttttattctttgctcaggatttagaagggtcttccactacaggaatagaaagggaagaggaagaagactacttagttttattcctggagatggcataatctggataagacagaggtaccctgcacacagccccctccttgcagtctgtagacccttttctttgggtcccagttcctccaggcaatgcctgagcatgttggaacagctcctgtgtccataagctcctgggctgcgttatctgcatgtaatttctctgtttctctgtgggacagcccctgaggagactcaaaagatttaataagaaaaaagctgcttctgagtcttgggaaaggatggatctatctttcctgtcttgggagcatctactccaggaagaagctctaaagaaagggctagaggcctatggctagcggagagacccactcaggaacagagaagttgaggggaagggttgctttgaacggagccacatatagatgtgccagtctcatcctctgtcctcgccaaactccctgggactaagcttctacccagagaggcaggtggccatcccaataccaggaggcctgaagggtggttttattctctgggcttttgcctccaaggagctcctcctacctctccctgattagagagcccaaggtgtcaccctgagaagccaagagaatttgctgctgggtcccctaccacccctgccgggcccactggtgcactctcactgctgcagggttgtagctgtccctgacgcctaatataaccatcctgaatttccacagcctaacccaaggctgcactcttctagggagcagaaccctgacccacatctgaggcttaccctgtgacaatctcaaagggcggcagctcaatcagctctttcagcttctcagggtcgtccaggttctccagatcctccccattctgggaggcagcctcagtggccacagcagcctcttccttctgggccatggaggggctgtggctcaggagtcactgagggagaggagagaggcaggcaggtctgggccaggccctggcggcagagtcccaagcagctgtcagcagctaaatctggctggggatgacgggaaaaggacccagcaggccaggcttcgtgctttccccacttagccacaggctttatagccaaggcctcctgcccctcccccaggctctctccctctatctttttttaattgagtgacagcgggtgctggggtgggggaatggaaaatctggccattagtatcccctatttatcagtaggcaaagacaggaacctggcaggtgggtatggcttggcctgctctcttctccctctccctctcagctcaccttatgttctcccctttgtttcccacccaaattccctagctccactgggggagagtgtggaaggggccccagggcaggcatcctgagatttaggagggtggccttctgagatttaaacaggaggagatgtgtgttgaaaggggctgactgcaaaaagacccaggccatttgctttgggggaacgtgggttcaggaaaggaggggtcctggcagaggtgggatcaaaactgacaatttggggagtaagtgtgtgagttatgactcaaaagcggtgggtgctgatttgcctgttacaaagccataatgtaatgtcaaatcgatcaggagcctccctgagtaacaatagctgccatttacttagctcagagattttgaaacaggccaggcagtgggtttaggggtttaaatgaaatcagatgcatgcttgccacagccatgggaggcgatgtgtattatcccaagttacaggtaaactgagtcacagaagtgtgcagagccgggattaaaatgcaggcttttgtacttcaggccaaatattcaacctccatgctatgtgccctcacagtcagtcttttattcttcttaacaaatatttattgagtatctactctatgccaggtgctgtttcaggtactgggaatatggcaaaagaacaaagcaaatgaaaatccctgctgtgatgatttgtggagcttgaggaactgaacaacaaataaggtaagtaaaatacatggtctattttgtgatgacaagtgccaaggagaaaagacaggaaatggaaacaggaagtgctaagaggtggggttacgtacttataggatggccagggtgaaggactttgaaaaggagacaattgaagaagacgtgaagaaggcaagggaactaatcatttggttgtctaagaggaaagcgttccaaggaagggaacaacgtgagcaaaggctctgagaagggagcattcctggggtgtttgaggaactagcgaggacatacatctgggtgactgaagagttctaagagattaagccagagagataacaagggtaaaagggactggggccttatgggctgtcataagtaccttgctttttctcagactgaggtgggaagccattgtctctgaacaggtgagacaggtggtctgagcacttgggaagagcagaggcaggggaccagtgagaagcctactgaggccagagagagatgatgggggcccatagaaaagaccctgagccggaacagcagcagaggatggctagatgatttttgcagctctcatgatgggtacttagcagaggcaaaagtcttcgtgtttggagcagtgcaaacactctaggccattctcagggaagcagaaggaaggggtcagggtcacttgtaggttgaaaatgaggaacctaagaacactggggaacggatctgaaaacagctccaaatgggtttggctggtggggatgagagggtagggcaccctttggagggtctgactaaagaagaggagtcaagatggtttggaagatttagggctcactcctccagagagtctgagcagcagagtgctctgttagtgtgatgcccagcattttggtttgccagtcatggtttcttcctgttgtccagacataattactaatagcacccctttactcccaaaggtgtcccgctgtggacaataaattatatggtcccctaccttttggatttactactaaaaggattattattatttattttttgagatggagtctcactctgtcaccagactggagtgcagtggcacg

SEQ ID NO: 584826 - DNA, 4001 bp, Homo sapiens
tagcttgataaatttatatcccatggactgccacaaaaaatttgccgagggctgaggcttgcgatttagttaaaaaacaaacaaaatttgggtgaccagtatattagagtttattaatactgttctattttggtgtaatgtttgaatttttttttttttttttttgagatgggagtctcgttctgttgcccaagctggagtgcagtggcgcgatcttggctcactgcaatctccacctcccgggttcaaagcaattctctgcctcagcctcccaagtagctgggattacaggcgcccgccaccacgccaggctaatttttgtatttttagtagagatggggtttcaccattttggccaggctggtcttgaactcctgacctcgtgatccacccgcctcatcctcccaagtgtgagtcactgcgcccggccgaaaatttttgtaataaaaagctaaaatgtggttaggcacagtagctcacacctataatcccagcactttgggaggccaagtctgcaagaccaggctgggcaacatagcaagaccccatctctataaaaataaaattagccaggtgtggtggtgtgcatctgtggtccctactagggaggctgaggtgggaagatcggttgggctcgggaggcagaggctacagtgagttgtgattgcgccactgcactccagcctgggcgacaaagcgagaccctctctcaaaaaaataagctaaaatgttaacagctttttattggggcagtaaagtacaagtgctcgatctggagtcctgtaggcctggatttgtcaattctgacacttatgttcgtctaagtgtactcacttaaaaaatgttaaaagctcgttaaaaggctttttaaaataatacacaaaacccgtagtatatgggctggcacaagtgctcattaaacagctgcttattagaactcttaactaaaatataaccaggacctgggtataaactacgaatcccagaaaggttggacaccccaacagcgatgtgtctttctggaggactcgcagtttcgcggggccgaggcccttggcccagggcaggttaagagaagagggcacggagaggcggtaatgcctccacccccggccttcggaagcacgctggccggcctttaaattccccacggtcagggtcttgtctttctgtccactcggactccatttgctcccaattctcaaactcggaagcgcctcttttcttgacaagtcgtgcaacttagtagcacgtttacttttcctaaaacgtgtcatgtccccttggccacacaccgacgaatgtgacgcccacagcccttaaaacgcccacccggcagaaccgaaatctagcccaaccaagcaaccgagaacaaaattgaccagtgccgcccccaaacgcctactgaaagagtaacttccggaggcacagaagaaagggcgcagcgagggcaatagggtggagaagagttttagctggctaggacagtgccgcctgaaattatcagcctgccaagatttaaacatagatgaatgtggcataatcccccatctccaaagtccaaggtccatacgaccgtccatagcccctctcgaggcagtggtagagtcccagctggtgactgtttttcaggcatttacggtagccacctcaatcttctagcgctcaagcgcgcgcacagacgtgaacgccgccagaggggggagggggtggggcgatgcttaagtgtccacgcatccgtagtgcgacgcacgcaggcgtagtacggtcccccgggcgacagcggtggcggctcctcggggtgctcggctccctcccacctaggccggccccggcccgactcgccctcagaaactcactgtttggggctgcggactttctcgtcgtgccccacaaaagtaaagcttggggacctggggggagccggaagtatcgcttcgagatccccaaatactatcggggaaacggaagtggccgtcggtggcaggtttgggggagaccggaagtgacggtccgtggggaagtcgggggcggagccgcggggtggtgggtgtgtgtgtgtgtgtgtgtgtgtgtgtgtgtgtgtgtgtttggctgtgggttagttgtgccgttctgctggaacaccgtgggaaggcagtagacgcgggcagtcagctagcaggtctgtcgccccgtgagtgccgtttcgggtctatagtgagttaggagggttcgatgggcgtggcgcgcgtgcgcgaaaccactttctccgcagagtgtggggcgaccaccgctttcgcgttgtcccaggattttccgacctctggggcgcttgtcctgccgtgaccggtgatgacactagtctctggtctcgtgcttccttcctaatctgactggctccctgcttattgtgattggcgtcgtggagcccctcccacctctcgtcctccagctccctaagccgtcgatctcctgccctttgtgtttctctccctgtgccccggaatcagaagggggatggggacaggtgtgaatgtgtgtgtgtgcaggagaaactttttaggtattggggcagggattaatgctagggagtctttcgggtacactctggtctgggcaacagcgggccttccttccttcgttcttctttagagacctgtcggccatggagcctaatgatagtaccagtaccgctgtggaggagcctgacagcttggaggtgttggtgaagaccttggactctcaaactcgtacctttattgtgggggcccaggtgagacacctcactagttctggaagacacctttagcttttcctcgtttaggccccttagcctgagagatgagcttgattttctggtcaccagattttctttttttttcttttttttgagatggagtcacgccctgtcttccaggctggagtgcagtggcgcgatctcgactcactgaaacttccacctcttgggttcaagcgattttcctatctcagcctcctgagtagctgggattataggcgtgtgccactatacccagctgatttttgtatttttagtagagacggggtttcaccatgttggtcaggctggtctcgaactccttacctcaggtgatgtgccctcctcggcctcccaaagtgctggtattacaggcatgagccaccgcacctggcctcagattttatttttattgatccctttgttcgtattccagtagaacgttttctgatgttttgtgagtgaggctgattttgttctgtcctccacatggatagaacttaatgcagagggaaatacagaggaaggaagaatctgtgtgtcatcatcatgggtggaccccaacccaaagggacaggcatggctctggcctttgggaagggaaacagcacaggaaccctaagcaagtgtgtcttactgatagacattggtcaggtctatgctgtgttcttaaagggtagaaatcagaacccataatggagataggtccttgatagactgttgagtgaaattactaatttttatggcatagcttgagtctcttgagcttaaagccttggacatagctatctgtgtctttactcctgtaatacttggagacaaattgcatgtggggtggtccatggttttctaaaatgtgatattacctggatataagaaagccatatatagacttgtgattagatgtatataaatactctggtacttcccaagagtcagtttgtagttaggaaaaatatttctctttttgcttttttttttttttttgagatggagttttgctcttgttgcccaggatggagggctggggcgcaatctcagctcactgcaacctctgcctcctgggttcaagcaattttcctgcctcagcctcctgagtatctgggattacagacgacgcctactaccacgcccggctaatttttgtatttttagtagagacagggttttaccgtgttggccaggctggtcttgaactcctgacctcaggtgatccacctgcctcggcctcccaaagtgctgg

SEQ ID NO: 584827 - DNA, 4001 bp, Homo sapiens
aaactcagaaacctctcttttgagtagcccagaacccatcctgcctccctcaggtgacatcacagctcttagccacatccctctggtgacatcacacgagcctctttcaccctgtaacaccagaagacttggtgagtcctaatcctgttttatgagattttaaccccttaccttgattcctaggagtcaataagaaggctttggagtccaggcaggaagtcagggacttgaattcctccacacacttttcgggaggatgtggtgagcgatctggaagggcaaggtggggtcaggccagtcaaaacccctggaagcacctagctcttcctgggagggtgtcataggacccagagtgaggagttctcctgccctcccttgtttccctccaacccttcctgccttgtatccctactcactgtagaggagaaagcgctggtaaccctggcctgtctcattcagcatgattccacctgggcatgagctggaaaagagctcagtcttcatgtcagggcggcctgtcaaggcaggtgggagaagtatgagaacagagatgcagaaccaaactcaagggagggtgagggctgggaagaaccaaccttcagttctgagatctgtgctcccttcagtcaggtggtagatccatttccggggcacacagagcccatctttcctgcagaggtggtggtggcaaggaggaaagaatgagcatcaccccaaccatagtgtcccagcttcttttttttttttttgagacagagtctcactctgttgcccaggctggagtgcagtggcgccatctcggctcactgcaagctctgcctcccgggttcacgccattctcctgcctcaacctcgtgagtagctgggactacaggtgcccaccaccatgcccagctagttttttatatttttagtagagacggggtttcactgtgttagccaggatggtctcgatctcctgacctcgtgatctgtccgcctcagcctcccaaagtgctgggattacaggcgtgagccaccacgtctggcctgtcccggcttctatttactccattgtatttgttattgaagcccagctctccttgggtttcaagctaccaagcattggttaggcacatctttctccagagggcaattaatacagccactgaattccgtgggccaagcatagtagatataccagctaagaggccagctcttggtgggtggattctcacactttgggcagagactgaacccagtgatgcttctgcctccttaccactcacatgcggatggtagcacgaaggtggagctgcatcggggcagagccagcagccatattgaagacaatgttgtccacagggtcaaaagttgccaactcctccttggtgggagctgcccctgcgataaagtaccactggcccaagtggacctctgggaactggagagacaatgaagggagcaaaagagggtgggttccagcacaggatgggttcaacctcttcatcagtcaaaacagcaagatttaggggtagaggtgttggctgccttcctctttccaactggggattggatccatgacaaagagtcattaaatgacttttcctctttgcccctccccagtcaacctgggtaaccaccccaccccccaattctgccatgcctctgcattgatggccacagtactgatatttttcttcttgctttcattatcacaacactcacacccccttcctctcttcctttcccaagatggtctccagtcatcctaggccatccacccaagtccctcagagcctccaccataggcttcccccaatctcagtccatacctccttcccatccacgcccagagttgtcagttgactgtgctcagggcactggtagatggagttaaggataataccatagaagtagagcagagctgcccaaatttggtggaacatcttcaggcaggagggagctggtgctctgtgtgccttaactgctctctcccctactggctgctcagtccactctgctttcagctcccttgcgttcgacccttgaccctttcacctgctaatgagtaacttcaaccttgttttccaacccaaacctggattacttagtgtttgggacttcctccccctcttccggatgcaaccactccatagtacaccctggcatgtccagggtttctcaggagttatgaggagagctgagctgtccagggagaagcctgtggtctttgaacctgtatctgagctggttatttgttgcactgtgcagcactgaagggaagtagcttgactgggcctctcattcattcacttagcaaactgttttgaatcccaagtcccagttgtttcccaagaactagctaatccccggggacataaaaaaacgaataagacatagcccctgatcttgaagaagtcgttagagggaaaactagctgtgtagacaaaccattgcaatacaacttggtaaatgctttagaacaggtatgatgcaggtgctggggcacggtggattgctctctttagtttacaattagaaaaatatgtataccctggcagtgttcactgacacattcactcaacatttattactacaaagaggctatgtaatctggctgttagagaggatagatgttggtgtcaggcagaatgtgtccaaaccctaactacaggcagggcaggtagctcatgcctgtaatctcagcactttgagaggccaaggtgggcggatggcttgagcccaggagttcaaaaccagcctgggctacatggcaaaactctgtctctacaaaaaatacaaaaattagccgatgtggtggcacacgcctgtagtcccagctactagggaggctgaggagggaggattgcttgagcctgggatgtcgaggctgcaatgagccctgattgtgccactgcactccagcttgggcgacagagactctgtctccaaacaaacaaaacaccaccaacccctaactgctatgtctgttttttcatctgtaaaattggcaaatcatcaatcttataggattaaatgaaataatgcacataaagcccttagcaaagacttgcacatggtaagtccaaagtatatatttgctataattaatagtaatgtttgcaaagcacttagtttctggtgggtaataagttctcaaataataggcagtaagaattgccaaataggttgtccttggatagcaccaagtgactggagcagttaatgctgtgagagatggatcttcctcgatagattatttatttacttatttatttttaagacagggtctcactctgtcgcccaggcatgactttgacttccccggctcagatgattcccgagtaggaggtataggtgcacgccatcacgcctagctaattttttgtagacacggagtttcaccatgttgccccaggctggtattaaactcctgagctcaagcagtcggcccaccttagcctcctaaagtgttgggattacaggcatgagccaccacacctagcttgataaatttatatcccatggactgccacaaaaaatttgccgagggctgaggcttgcgatttagttaaaaaacaaacaaaatttgggtgaccagtatattagagtttattaatactgttctattttggtgtaatgtttgaatttttttttttttttttttgagatgggagtctcgttctgttgcccaagctggagtgcagtggcgcgatcttggctcactgcaatctccacctcccgggttcaaagcaattctctgcctcagcctcccaagtagctgggattacaggcgcccgccaccacgccaggctaatttttgtatttttagtagagatggggtttcaccattttggccaggctggtcttgaactcctgacctcgtgatccacccgcctcatcctcccaagtgtgagtcactgcgcccggccgaaaatttttgtaataaaaagctaaaatgtggttaggcacagtagctcacacctataatcccagcactttgggaggccaagtctgca

SEQ ID NO: 584828 - DNA, 4001 bp, Homo sapiens
tttagaacaaagctcatagaccccttagttgacactatatttgctataacacagccattaaattttctagaattcttttttatttgttttattcaaatggcttctcatgattgggctttcctcttgcttgctctatctgcccactttggaaattgctttgtcagctccaccgactttctaagctgggcccaatccctaaatggccacaagtataaggtcgcctttggagttgaatagtctgaagagacatcagtgcaaatcaagggcataggcattggaatcagattatcttgtctggaattatgcagtcaaggctgtgtgacgttgagcacattaccaaacctctctgggcttttttttaacccaactgtaaggtaaaaataatacctaccttattgtttgttcgctgccttgcaagcctttcaaggaggtgagacagggatgaagccctttctcagactcaacattttagtcatctgccctctaatcctttccttttgcttatttgtcaaacttgtacctcctttaggtgaggacaaatacttatatgttggccattttatcctctctactctatgacttagtgtaaaaaatctctctctcttagtccttacaatcatgagacaatgaactccattctcatgaccatgttttaatgggaggagggtggtagaaggaggacacttgcttcccttttgtgaggtttttaaattatatatttattataacctgttcaagagtgggtgagaacagtgtggattttaaaaggaacatttctgtgtcagcaaaatgtccctgtgtttgggagagacttttggaggatttccaggggaagcaaagtagtatttactgacagtccaaatgcagtttgggcctctaacctctggcctctctcaatttgttttgcagtaaaaagtcagagtacacagcaagggttccaaattaagaggaagcaaaacgctgcccagatcctgagaaacctggagaaaatcaaccttagtagtttcaactcatacattgtcttgtttgattttgttctttgttttttatcctctttaagcacagatgcgtgttgaagtctaaggtgttctgtcatcacactctctttactagaataagtgtgcccaggcagaaaaaaaagtgtattcaatgttgctggcatgtgtggattcacagctcgtggctgtaaggaaatctgggggtttcataaatccattaaaatccttttagagttgccaacccgcagtaggattttctttctttttttgttctttttttccccttccaagtgaggcacataaaggattctacctagtccatgaatgaacagtttcatagaaacattaaaaccctaacataacatgaattattcacaaagttgcatgaaacaataatatttaggttatccaaattataagaagcctgaaggttaccaccaaactattaaatttttctaggcattaattacataactaaacaaatgtatttcttaaaattctctcttcctctacatacacacagtaacatcaaaaacaacaagagcaactaaacctcaatgagtagctacaatgcagaaagagtccatttcaattcaaagaaaaatattttctcctaaaaaatatgagaaaacattctgtaggttcaaatgaatttagccttggctgagatcacgagccacaaaagtaagtggatatgtgactataattatacaatgttggaaaatggtgagaggactttaaaatatgcatttcctggccagattgtatcagaaaactgaactaactagacaataacaccttacaaattttgaagtccaaaattttcaactaaattccaggaattcaaagaaagacttttttccttacctgtccctttgagaaaggagctccaataatccctatggttctggacttggcgctcatgctctgacacttctctttgctgcacttgagctctccagtcagtcaaccctcagtgacagagggcgcatcttttttttccatttatacttgggttgaataaacaacctttatctaatgaggacagctggctccacccactaaaccaaagaatgacagtcaacagtcttgcaatttttcatacatggagtaactatatggttactccatgtatgaagtaactatatggggttacttcatacatggagtaacctaactctgagtctaggtctctaatcaagtgacaattattcatgttctcacttcacacccttttaaaaagccagccagatgacattaacctgacttcaacaactgacaagtttcacaactacagaagaagtcctattgttctggctcagcgaactcagggcaaggccctttcctcctccagatctctgaagacgtccttgtagaagaagggccgggcttggcaagatcgtctgtcacatcccttccagccctaaaatcctgagttgagatttcacacatgagggtaaatggttaatccatgagacacatttcataaacttttagggtataatataataaagagtatataacttccttttttgatgattactttaaaaaattagttacttgattggtaacccagagaggttaccatttttgaagtatggtgtacaggaaaataattgtagaatcatatcataatcaaagtatagaaataaaaatagctaacattgagtttttaccatgtgtccgatgcagttctgtttcaaaataccatatttatatttataccaattttatgtgaagtctcatcattggtgccattatactgatgaataaactgaagctcagacccgttgccaacataggctgtagaagaaaagtcgggatttagtctctgccattctgaatccacttaaccgtcgagcttatagtctaaatgctgggaaggtgtcaacctctatgcccctgagctaccatttgtcaccatacaaaagtatgaatttaaaataaaggcaccttaaagatccttccgactttaaaattatgtaattgtaatttaaagggaaaattcacttagtagaaactaatttctttttcctattggtgggaaagaacattttggaatttaaattccatgaggtcagagaattttgtctgctgtatccccagggcctagaagagtgttggtgtataataggcactcaataaatatttattgaatggataaatgaggaaaccaaagtctcatgggtccattttgataggactgttttccaaataggtttcctacctttttcttgtgggtttgcttgtatatcctaaatatttacttgtggtattcctcatattgcctagatattaaccttatagcattgacattgcaaataacttttcccaacctgtcagaaatctgataactttttatatgttatcactcaaaatcctcaattttaaaatagacacttgtataatttcccccgaatgctttgtgctttggaagtcttattaaattcctgccaccccatcaaattgtaggtatgtagttttacattttcttccatttgccttagagcttatctttctcacttagttcctgaatccatctttgtatgttatgtaaattttccaactcgtttttcctctatcattcatgcatcagtttcctcaacaacacccattgaatagtcattcattttgcaattgattggagtgctgtctgtcactaaactctttcttctgttccattgacttatttacctatggctgcaccagatccatcaggttttatcaatacagttttgcggtacatcttatcattgtttaggcaagagtaactgttttgctcttctttttcaaaattgatttaccttttatgggtctctattctcctatagttggaataacctaattccttaaaagtatttgctagaatttttactagatttataaatcaatccatggagatttgctaactttcaaatttgattgctagaattttttctttgaaaaattcacatcctgaaagttctttgtatgccaagctgagattgccttcctgtcatatga

SEQ ID NO: 584829 - DNA, 4001 bp, Homo sapiens
cgatccctagaactaattcagtggtgggaagttgggtctggtatgggcaggctacgtgacagccagcaaaggagctcacctggagctgtggccccacacagggcacttgccgtgtgggcagctgcccaccctgccaccttagtgcctcttggttctgcttcagcctaggcagagaatgatctgatcctctcttattctctcaacccactcaagtatgggccacccacactgcaaacacagaataatgagtctccagaactggagatgcagccccagacaaaggcctagaactccagaccttccaaaaacttaactaatccctggggtttgagtcctacgtgaaaatgagaggttaggactcagtccttaaggtcctttccattctcacaatcaagatccaagattcagctcaggtcctcaggccattcagcctaaagtcggagaatgtcctgagcttgtataattttggcaattttgactgacatgtggaatccaagttatggctgggtatggggttggtgttgcaggctgctttactgcttaatgattactaatacattacagaaaaatggatgaaaacacttcaagatctcttgatttaatgatttaacattaagtcatttaaaatgatggaaaatgaaatggtaacacagctaaggcacaagcaccaaatcttttttatctttggaaatgaattcattcaatgaaatacatactgtggatgctatgtgagaaacagttcccgtcagctgggagtctaacactgagtattacagccattcctttgatttttctccctccctcatatttggagattttaaaacaaatgaaaggcagcattatttcagcttaaggcacaggcataagtcacataagaacaaagaaggttttattatcacattaagcattgaggaggaaatgtgcttaccgataactaatttagtgttctaggctattaggttagtatttgcttcttgcaatcttctaggccaatatttactatttatatcttgatggaggtaaaaatgttcagctagtgagaaggtcattaaggagagaaagaaaaaaaaaagcccttggaaaatggaacaaagtacacagatagggagaaaggtaccctttgcgcctcagtggtctatagaacatttgccctctctgcctataaagtgatttaacattaaccacatttcactccagcagcagagtgctatctcctgacaaaaactcctttttgaaagcctgggggaaaaaaaatccacatacacaaaagaatgtgaaacatattgccacaggccagtgtcttgggctttttgcctaagaggtttgctttcagcaaagagaggggggaaaaaaaacactctaacaacaacagcttgtacagtacagtgaacagcctccctgctttttggcagactttcccagcgaacagttccagtggcagtgccttgagcccattcaagaattccatttcataggaaaggaagtgtttcagatagacctatttgatctttcagcatgtgcaaatgcacctgctaaatagctagtctgacagcccatatagccctctccccagttccttcttctctgtcttcaccagtaatcatatgggttatttcagacttggactaggtgagatgaaaagtacataaaaatcacgccaaacgttgctactgctgctgcacgagctcaggctcgacgtgcagatggaattcccttctccccacgccaacttccctgtcactttcttcctggagcaggtaagagggttttgttttgttttcagcttccgaaggcttacctcgaggtggcttcctcccctgcctttgcatggctgttcccgacggtctggtccttgccgctggggtggtaggctgttagtaccactccctgggaactggagagccagctcatggtgagagaagggacatactttctgcgatcctgacacagagaaggggaaagaagttcctgtctcgcctggcaactcgctcattagcattggccagctcctccccgcaggctggcgattcacacggggaggggcggggtctgtccagggaagggcttcctgcctctccaattagaagctgcaactcacagcatggtttcaactctggacaattgcactctgggcggctttggttaaaggaggcgaagggtggaagcgacgggttgcacccacccccaagttagtctgatcagattaaactgccagaacgtatattcaactcatcactgtaactacaagccgtcttacttaggaaaccatgagttgctgccaaggcttttttttttccctccccaattcctctatcttataatttctgctacttaatgtaacatgagtaaaggcatttcttaaccccttcatgttcagcgttaaaattagccatagtaaaaaacaacgaacccgcggcaaaactctgcaatccagacgacgagaaaggcttgatccttgtgtccggttaaaaatgccctcataaaaattgtgtgtcctggaatgtcgtcgtctttcacataaagccaatctcaaatatacgtcttgttttagcaaaatatttttcagcaccaaaaagggatagacctaccaatgctctgttaagtgttattgctgagaacaagagaagtccctgccatttgttgagcacctactatatgccaagctctcatggacgggggtttcacatgtattatctcattccattcaattctctctctctcacacacacacacacaccgtacaagataggtatcactatcatctgtgttatacataacacaaggaaagtaaggctgagggacgagttaagtaacttcactaagataacacagttgctagtgccagaagctggatttgaacagaattctaggctacattccttttatttttcaccagtatgctcttctttgttttgcagattaagaaacaagatcaaaattatcataaacacaaaagacagctctgttctttctccccatctcccctccaaaaaaaaaaatcacttttttggtttgtttttgaatcagggtctcactctgtcacccaggctggagtacagtggtgattgtaactcactgcagcctcaacctcccaggctcaagaaatcctccagcctcagcctccccaatagctaagaccacaggcatgcactaccacgcccagctaatttttttatgctttgtggagagggagggtctcactgtgttgcccaggctggtcttgaactcctgggctcaagcaatcctcttggctcaagctcccaaagtattgagattacaggcatgagccaccacgcctggcttctactctgacatacccagtagtctgaaggtttttttagatttttatgattcattcaactctctagaattcctcttgaacaagtttccaattccatcattacataaacttattgcttataccttatcattatttaaaacagtcatgaaaaataatttcttcctccttacatactctagaagtatctgaaatttatttttgaaccctctttcttataatttacaaaagtcttccttaaaaggaatttatatcttcctccctcccccctgcacaactgctcaaccttcccatttccacttccataggactttacttgctgtctcctttttatccccatgacctcaaccacctctggatcctataatgcagtcttagctccaatattacaacagcccttttagctcatctccctgtcacctcctttaaattgctttgacattatgatcacaccctggcactcatgatccctctcctcgcttaaaaaccttcattggctctctattgctaacagagccagttccaggcttttgagcagatcactgggcattcctgctaccttatacatacaagtctttccatctgctagacacaatcttttcaggtcctactatgattcttttctcttcatctgacagctaacttaaattttgtacctactgagccttcagtaaacactgaatggaggaaaacctgaatgaat

SEQ ID NO: 584830 - DNA, 4001 bp, Homo sapiens
ttcctcattctttcccccgttaaagcacattgtgggcgctcccagaaccgatcgggtggctcttcgccccagccgtcctggccgggagagcctatttgttacaaaagcacccgaacggtccccgccgccccaaacggcgaccgcgcgggtggcgcctcgggatctcgcttcgcgttcccgggcctgggggaggggggggacgcgggtgcgggccggcggggtagaagccacccggcccggcccggcccggcgaagccctcccaggcctggacagcgcgccggcccccggggcgccccgaccgcggcgggaggcggccgcccgtcaagatggctttgggcgccgcgcccccgccgcccccgcgggaagacggggaaaagtacgcggcaaagaaagaaactcaggctcgcggcgcggcgaggccgccgggcggaagcaggcccggctggcgcgagggttacctgggatctgcccatggtcggtccgggggtgccggggctcatcgccgggtgactcctttgttgcgcggccgcccaggccgggctggcagcggcgtactgggcgcccatgtccttgcccaagcccatgcccgcggccgcctgctggccgcccgccgccgcccccgccgccgccgcctgggactggggctgcgacggcggcggcggcggcgcgctggggctgctgtactcggggtagctgccgccgtagctccgcatcatggggctgggcgaggtgagcagctgattgagggtcggggtggcccccgacgggtgctggttctggccggcgaagcgctggaagccccccgccgccgagccggcggccgccttgctgaggctcgcggccccgccgcccccggggcccatcatcatgccgccgccctgctgccggggggagctcagcaccccgtaccccgcggacgagcccccatagccgccgccgccgccgcctcctgctgctgccgccgccgccgcggccgccgccgccacagctcccgctcctgctcctcctgctcctgctcctcctcctcctcctcctcctccgctgcctcctcctcctccgccgccgccgccgccgccgccgcccgcgccgggccggctgtagcccggataatggttgcactggctgttggggtacccttcgtgggagttctgcagggggtccatgctgccgggggccccggcggcggcggcggaggcggagtgcatcatccccatcccggggctttgttgtccgccatgttgatcaaagcaaggcccagcgcggccgccggggccgccgctcgcaggggcagcgctgccatagtaattattaaactccgggacggccgccgggccgccgccgcccccgggcacggcgaccggcggctgctgcgtgcccagggcgcccaagcccgggtgctcgtagcggccgcccgccggctcccccatcttgggcggcgcgtcgtcctcgtcgcccggcttgctcagcagcggcgggcccggggggtcggcctggccgcccgcagcactgtccttggcgcctccatgttgcggctgctccatgtcggggccgggctgaggcgcgccgccgcccgcgccgcccaagctgttgttgttggaaatgggatgttgctgttgctgctgctgctgctgctgctgttgctgctgctgctgctgctgctggaactggtttagctgctgctgtagtgcgtggtggtggtggaggtggtgggcatggtggtggtggtggtgggcatggtggtggtggtggtgctgctggtggggcggcgcggcgggggcttcgccaacggttttcagtttgtggttggggagcagccccgtctccatggccgagcccgggcccgacgaggaggaagaggatgccgccgctgccgccgcggaggaggaggaggaggaggacagcgcggcggcgcttccaccctccttgagagccgcctcggagccgccgctcttggcgctgtgggtgccggcggcggccgcggcgcccgcgttatgggccatgttgagttcgtgacgggggagcagggggtggtggtgcacactgttcaggccgccgccgccgtcgccgccgccccccagcatgggtcccggtgccgccgccgccgccgccgcgccgcgcgcccccgcctccaggtcccgggctccgggcgccggccgcggcccggggggcgcccgccgttcgccgctgcctgcccgcgcccgcgcccgcgccgccgccgccgccgccgccgctgctgcccgcgcggccatgatcgccgcggcgtggcgaggccgggcggggggcggggggagacaataacccccacttttcaggccgcggcccctcctgtgcgcatccacgcggcccgccgggaagccgcgaccccctccccctccgcaggccccgccggagcgccgggccgggcacgccttacgctctgggcctgctcctgctgtgtgctttcatggtgaaagtttttagttcaggtttaaatgaaacttttctcttttcctctctagcccggatatgggtaaatacacgactagctgagcctatcgggcccagcatggcttgagaggcagcgggcgagctcgagcaactattatccacttcgctcgcattactcccgcgcactcgcaaaacgcggactggactcgtccccgggccgccgccgcccgccccggcgcagcctcgcgggacccagccgggcttgggctaaggctggggccggggccggggccggggcggctcggcggccgctcggagcgcggcggcgtggggcggccggaacctgcactttccccccgggccgctgtctccttgccaaccgggcgttcgcatgtttgttttcacgtctaaaaggaacgatacaaaggtggaaaacgagtctgacgagcagacaaaagagggagaagggctgggaaacaaagttgtctattggcctcagaggttacaaggagccgacggagaaagaaaatatttaggcaatctgcaaaagcacggtctctcccaggagttatgtaattttcagaacgttcgcctctgccttgatttcgggccatcggcgtaattcccacaacttcttccaactgcaaaattaggaaagatttgaaatgaaggttagccccggtcagagagccctatggcctgtacccagtaggtactcaataaatgcttatgactgactgcacccgccccaaagagaatgtttacataactctttttgaaggcaccttaaacacgtatgtaggtttgtcagtgtatttccaaaggaatatgtccacgtattcccaaaggagcatttttcttacatgcacttggatgtcctctgtggagtatgtacagtggtgttttctgcgccaactttcacatgaacatttaactcttggtgccagaacagcgacagctatgggttagctcgtatcttcataaatctatatgacacctttcatcatgtttcagagcttcgtgtgcacagttaaccctctcgatatacattcatttcaaagagatgtggaacgaaactaaaatattatagacattatatttaataaatataacttcaataataatataaaacagtcaactctagtcctaatgtagaaatgttccatactttgttctcttaaaaattggtgtctattaacattttataatgtttttaatatttgcattgttattaatgttttcaatatgtgcattgtcccctagtaacattttaaaaagcaagacttcttaaccttaggcaatgacccacttgtactagtgtggactcagttttcattgagagaaagcatttaaaacctggcagaaacaatacttacggttttggtagagtatagttttccaaaattatttcattcttcagctttccataaaaactattttagttcatttccactgcagcagtggttatttgtttgaccaagtgtaaatatgttacatgactaaatagaaaaggattgatgggaaaactggtgactaattggggtcggggggagggaatcaggtgcacacccaa

SEQ ID NO: 584831 - DNA, 4001 bp, Homo sapiens
aagtcctttcctgagttctgggagccattctagcaaattagtagatctaaaaagggagttgtgggaacccccgaattcatagcgggccagtcagaagtcagacctatgattggtacctgaagtcggggggaagtcttgggggactcagcccttaacctgtgaagtctgccctaactatggatagtgtctgaactgaattgaattgttgaacacccagccagtgttgggaattggtgtcagaaaaaacgtggcagtggtagggagcttgtggggtagtgggggtccttctctttggggttgagagataccactagtgcctcaattcagtttcatcctgaaattcaaaggccttcatgaccctgctgggaatctgaccaccgttttcccacttatttctgggttacaaattcacacccaaacaaacttctggaacatgaccatttatcctatggcaattaaaggacttaaggactatagacatcctgcatgccccaccacgcatccctgggctcacctggattttgagcctgaattttctgatgccagagaaagctttaagtgtattcagagcttgggttttgacactgttgtccttgtcatccagcatgtagcccagcaacacgatgtcatccgtagtacaagcagaggcctggagtattggggagagatggaagaggcaggagaagcgggtgttctgggcccactgccccccatgtcaccaagatccctccgcacaccccccccccaccgctatcagccagagagaggtcccaggatatagtctggccattccaggggcagggatcggccgtaacccccaggggccaggccggctaggggggacctcctgcttcccttacctcagcctccagcaagtacacacagcgagtgatactgtgcaggatcatgctcttggcatactcatcctgtttgcactccaaagagttgaggagcctccggagctcacctgagtcccgcccgtgccgctctcgctcgactgccaggcctagacagccaccccagcccagttcaggctgtggactcagaagtgatgaaagaatggggttgggaagtaggggacagggacttggggacaaggctgccttgccttttcggagaagccttctcgccatatgcaggaccaccatgtacagttgaacgaatgtttactgcacaagggcaccctatctaatgttgtattgtccataacgtaccatcatagatttgtccatttactctaacaactgtctggcatatggcggtaacaagtagtatttcatcataaccagtatgtggcaatgatattccagcagatggcaataaagagtcttgcagaaggggctcattttcctactctgcacaaaagaacatgtggactagtggaagctctgggcatatagtaagtcctccaatcttccctttccttaaagcctcacgttcctagggcagaaaagggatggggggagctgccgacaccaagtttccaagaagtggaatcctgggagccagaggaaatgtagtatttggagacctgccagatgagtctgaggatccacttgagtgagatccagggaccctgagctagcatctctggcagggccttgcctaggacgctgcagggtgggcttgaggaagatggacaagagaaagacaaaggaaagaggaacttggaggcatcacctttgggccctcccacagcagaggcctcgggagcaggtgcctcctggggcagagccctctccccagggcccggacactcacgggcgatgcagatgggtgagttgctacagaggggtggtttgcattttatgccagccttgatggccttgtagagcaggtagatcgccccggcgcctgtggccaggctgactacgcttttgcggatgtccagttgccccaggtattgggggatgctcttgcccatgtcttcagtgttgccctgggcccaggtgagagctaggcccaaggcacctgtggggggccttccggaaccagaactctggcagggtcaggaaccagggtaccagaattggaacctaggcaacaaaggaaactggggagataatgggatggagggcagtggtcaggaaatggggcagccaggagtgctcgagaacagatggggccaggcaccatggcccacacttgtaatcccagcactttgggaggccaaggcaggcagatcacttgaggtcagcagttcgagaccagcctggccaatatggtgaaaccttgtctctattaaaaatacaaaaaaattagccaggcattgtggcgcacacatgtaatcccagctactcaggggactgaggcaggagaatcgcttaagcctgggaggttgaggttgcagtgagctgacacgccactgtactccaacctaagcgacagagcaagactccatttcaaaaaaaaaaagagaaggttctgctttagagaccacaggagatgaagcataagacagaaggggaataaaaggggagagggcagaagtgtccttcacatctcctcttctttaaggggggaccccagcaggtagctccagaggctgcctttccaccattagagggcagcagaggtccatttccgggctggggccttagggcatttctgggtgaggtgtttggggtatgcccattgacaaccctgttccttttctttccgggccctcccatatgtgatctctccaccctagatctacccctgggccttggggtgtttcttcaggtagggttccctccccgcatcagaggatgaaaaggaggggagtatcttagaaagcatgcacagactcttgaggcaaatccacccttttccagcatctgcatgttgccctgaagtttacctgtttgacaaagtgctcttgaggacagctacctttgcatctccagcatagaatcttgtacttagcaggtggtttaagtcatgttctgccattctttaaggacttggcggcagaacaatgacagcatctagtaactggggctccagacccttctaaccagagtgaccttggaggagaaagggatcgcctttgccttagtctgtttctgcatttgtaacctaaagggattcggatttaccattctaaaactccaggattaaaatgtgggtaagtctgtgcctttcagctaaatttggaagtatcacctctcagcctccccagggatatgaggcggcttgtgaggtcctctggagtcagaagatgccaccaccccagaggatgtgagcccacctgtggaggtcttgatccccaccactaggatggggcaggtgagaccagacccttccctcttccccaccagggtctccccgcaacttctgtccccactctctgttgcagaacaggcaagtggccagctccaaactagggccacgcccacagccagtgctgagcatgctgcaccagaacaggtgttcacctacctggccctgatccctttttgggagaactgggacagaaggctctgggtcctgggctgcacccaggatggaaggaggtagggaaacagcatctccaatgatgctgcggccagccaggcctgcccactcagagccttggcccagtacaccctaggcagcaggcagggaacaagcaacactcctgggtggccattctattcctgtcctcagccctcctcaagggtcatcattcctggcactctatttagccccaaggtgggtgactacatgaactccctgtggtgaggggtgagtagaagcccatggaagcctccccactgccatgcaaccccatcgcatctccactgaactccgagcagaaaacggctgcctgatgggaactgtcatttaggttcccaggctactttggtggatctgagaataaatccctcaagacaaggtccttgctctgcccttctccagggtgggacccagagttactggcccctccatcccatggagccgattctgcaaccctcacttcctaagcacaggtaaggctcacctgttctttaaagacctccaaaaagtgttctttcttg

SEQ ID NO: 584832 - DNA, 4001 bp, Homo sapiens
atttggcatccatgattccaggaagaggccagaaacaacactaggtatgcaaacctaggggagccagagggcaagggaccttttaaaagaaacaggaggagaagctgatttcaagaggaaagaagaaagaggctgagttctgtcttgcatcacactatcctgagtccatggtatccacaggacctctagagggtgaacaccaccagcagtaggaaatttgaaagtgaagaacttttttttcaacaagatatttcctactggtctgggtgaaagctcagagtcataatttatagaagtttataactaattataaagacctgtctttatcgttgctgctaatagccactggaaccagagccttcttgctaaatgcaacactgcactaccaggatgtctgcaacaggggaaaagcaggccagcttcacagtcttccctgcaaatcaaatactcaggacccttccataactctgaatcatttttgtattaatatgagcatccaaagaggcagtggttaagtgcttagatgctggactaagggtttaaatgctgacaattcacagccatgtgaccttaggcaatgcctctaatatctctaagcatcagtttcctcatctataaaaggtggatagtaataataattgccccataggattgtttgaagaattaaatgatataatacatgtaaagtgcgttagcacagtgctttaaaaatgttaacattttaaaatatggcccttaaagatgttaacaattattgcccaagtgctacatgataaaaggatacagcaaaatcatttccacgaatgaaaaactacatttaaaaaaagaaattgcaaaagagagaatgacgtttgttcagtgtttctatacataagtttttttttattattatactttaagttctagggtacatgtgcacaatgtacaggtttgatacataggtatacatgtgccatgttggtttgctgcacccatcaactcgtcatttacattacgtacttctccttttaaaaggtgggtggtggtacttgcctttatgaaaacagataatttttattaagcattttattgaatatcagctatgccaaatcaacatcaacaaccagaatcccatagattaagaaaccaggataaatataataaatggtgcttgcttttcaaccaaattaaagtataattattataaatcagggtgggacgtaagatctgttgtgttacttgtgggaatggatcacaaaaggcattatgtatacactccatgattttaaagtatgttaaatattgttacacatacgtttttatttattgaggccctgttgcctggaagtgcccagatataaactgtatgactctggcccggtcaccgcctgcctagacaaagccccttagtctaccactctcattcaacaaatattactgggcttcttattaagcaccacgcacttggctaagtgcgacagtacataaataaaagacaaccgctccggacccctgacagcatgcacagggcactcatcgtctctctaccccatccgaggacacacaggcggacgacggcaggaagggtccctggggagccgctggggacacctcacctcccgctcggacagcggctcccccacccacggcagtgcccgctcctccacggtcccggccagggcagggcgcagcagcatcctcaccccgcccggccaccctcccacttcgccccgcagccagcgtctccatggtaaccgtacacaaactacctcccgccgccgccccggcagccagaccgcagggccaggccgctgcagggcgggagaggcgggccggggaatgagcttggcgagggctcagggaaggaggcttccgacctgacccaaagcacctgtgatgagcactggagatagcagcggctgcgaggttcaattcatcctccggctctccccgggtagcggccagggatgcagcgctggcgcgggcggggtaaccccacgacgccgctcggccactgggcctgcgcgggtcccgccaacgcatgcgtagaagctccgaggcgtggcgacggccggagcgggtgggaggagcctggagagggctgtaggccgggaggtcagatcagagcaggcgtcgtgggcgggtgtccgcttttcgtttagcaatttgccgaaccacatttgttgctcccctgccggatcccagcacctctgttaaataacagcaggcaggacggaagcttaatgcttgtgggtaagaaggatttactggctcaggttagggctctgtataacctggagccacttgctgagcttctgtttcctccgatgtcaagtggcaggaaatattaataatagtacctaggtaggtcttgggctgttatgaagactgcatgagaaaatagatgtaaagcgctatgcacgtggcaatcaacgaatattaaactgttggctgttattaagcccttgcatttgtacagcccttcagttcgcagagtgtatgcacgtaatcgtaccttctgagtctgaggtaggcagcctggcgtccccatccacaggagaggaactgggggcctgaggtgtagtgagcaggagaaggagattccagtctaggtctcccgtggccaatcgttttttgttcgtgcatcatcacagttgaacggcaaaaagcactccatttatgtgtttctagtttaaattcccttttctcctgttagaccatttagcaacactgtacagtgttaaataaaagtgagatcataagcactctccattcaggtttgcaccacgttttataaatatggagattttccagctgaagtgctatttgtcatcaacactgggaaaatgccacttcccttggtgctaagcatcttgtaaagaataattaaattgaaaatatttttgagcacatactatgtgtaaggcatcgtgccaggtgggaaattatactaacctgaactaaaggaatgtaaatattcttcaaaatactcaagaggatttcaaacataacagaaaataaatacctattcgttgattggataattttaggacccgaaacagccctggatttttctgctcattcttagataactgacagtcttgttgtaactaaatctcaaccacagcttcatttcaaaactataatgttgggtgcaagatataaacaaatgcatcaaacttcaaaaagtcttcctcccccattccagccccaggcttaaggtctctagctggccttccctgaaggggtgcactaggcttaggcttgtccccgacccccacccgcccctctattcactagaggttgtttaaggcccagcttggatcaaactggcagtgaggaggaggaggagaaggaaggagatggagcatttcttcctggagttgagcagcttcaagcttgctgtgctggcttatggttaaagcagctcatgtaggtctttcctggtcctttgtagtctcccactgatggggacctccctcctgggggcttctggaaatcctaaaaacccagggtttattccacctttcagtgcccctttagataggtcccaagggaaaccctacacatctgttaccctagtgattctgagagctcaggcttgtctgggtgcagccccttctaggctgccataggagggagctttagcttacccaggagtgagtcaggctccagttctccaggccacctaactacagtctctggcagtcccaggcccctggggaagcccctctcgctggcttgagatgaagggcatagcaccccacactcctttctccaaagaagtttccccacacatcttccctttccactctctgaccccttatttttagcctcagcctgggtgagaggctgagggggttttaggtttctttgtaacctgccctatggagactctgcctcacctcacttggaactgatgattacataattaccatctcagtggaaacatcaacctaaaaacctctggtacagccaattactagctgtggtcttgcaccctaggatcttggtctaaaata

SEQ ID NO: 584833 - DNA, 4001 bp, Homo sapiens
agcagttagggggtggggatgaaagtcccaaccttctaataattccttgacctttctggtaaccagcccccatcctgaagctactaggagcagccagctagctaagacaaaattcttagtcaattcattagcatacaaaaaggcaaaatggggcccgtaatcccagcactttgggaggccgatgcaggaggactgcttgagcctaggggttccagagatacacaggagatcaatcagaccaaagtgaagactggaaagaaactgatttctacctcaaaagaaaaagctttttatttatttattttttttgaggtagaaactgaggtagaactgtgaactttatatttaaacaagctttgaaaaagaaaaacttactcttctgaaatggcaaaccactggtacatatactactttttgatcaaaggcaatatcaaatcatgctgttaaagcaagatcatctgttcccctttcaatgccaattacatatatacattgacaataactttttcttttaaaagctttgttttggttaactacagatccatggcatgagaaagaaccctagtcaagattctgtcttaaaaggaggctgctggattatagaaagttcatgagcacagagactgtctctctcttgctctcctaggcctagcccagcgtttgacacataggaagacttgaatgaatgaatgacaaaaaactgttaagcagggatcaagaaagctgaaccatgaaaaattaatttctcatataaataggattatttagcctaagcttaagagcatctttaaggatcatttttctcatgcaagactattataaccatcattaaaaaaaagagacaacataaactggagcacaatccatagtaaaaccaaaagcttaattctcaacatttgagaactttgagaatcagaaaaaggatttcaatctatgaaacataaaatctggtgatggagaaaatggctgtcaatctcacctaacctagggaaagaaagaaaatgtaaccatgagtttgaatgcacaagtgacaacacatcaaacttttaccagcccctagaattatgcttcttttaaaccaaagaatagcaaataccattagcacactgcattccatgagtaagttaatttataagaaacctatttgaaatgactgcccagtactcacaaaacctccctagcacccacatacacatttatttatttcaaaatgacattataggctccttgattgcgaaattcacccacaatccatcacggtcagctacctatttactttccagtgtgttgggggaaaaatatgaggaagatttctttccccaaatctacgtgaagaaaacgaagttatcaaggctttgtaacagaaaaaaagaaaacaaattacccatgcatgggacagaaaaacctcatctggtcacgttgtggcttaacacttggacaatatgtagcttaggttaagttttctatccccaaccccacctacaaactctaggaatgggcggtattgttgcgagaccccggactcgacctcatgccactgaaaaggatgacaggtcgggacttgccccggaggcaggaagagaatctctggcgggtcgcgtagcccgcctcgccgtccccgcctccagccagctcccctggccgcggcgacccttctcgtcctcccacctccacctccacctcctcacctctcggcctggctcacgcgtttcccatcactctgtcagctcctgccaccgcgccttcttccctttcggttttactttaacttcccacgccgggtgaggagctgagcgcagggccaaagatgcgagcgggcagctgtatcgccgcgccccgtccgccctccaagccgcgcttgccggggtcgcgcccagtcacagggaaccgcgtgtgaggaccatcagtcagacagacagacgcaaagacgcacagacccggcgaggagggacagagtggagctggcgccggcctacacgtcaccgccccgctgcagcgccaacgtcggcacgtcgactcgtcgactccgggccctctgccccgcccgcgtgcgcgcgccgctccgcctcccgcctccagcctctagtccgctgggttcggaggagcagaggcggaaggtcccggcggcggcgaggatgcgccccagggcgggagcgggacgctccactttaccctggctgcccgcaacgggccaggcctgccgtctctacctctctacctgtgagttttttccctgcatttacttcagtctgccgcgtcttctccccgcccttctctgtaaggtaaatatgtggaggaaataattcctattaaaggtaaaggaaaggagagcaatttgaatgaagaaacaggtagttgctatcgtcgttttcagccaaagccctctggctgctagagagtatacatggttctctggtgtcaaggcctgttttccataagctttctggattctcagcttagttccctcaaagtgatctctgcaagtcggctcttcggtcagaagacctcctccaaaaacagaaagcccaaagattccctaactcgattgaaaagataggaagatacgaagaaaaactaacctaaagaattgtgtggtttatctgcaaagagttctagactaaaagccaacaatgcaaagatagtatgagttaatatgtttgttgtggctctcttctgccattcccgcttcctcaaggtaatgtgccccgatgcctggtagaactgttttgtagaggcagccaatagtgatccagttattgtctttactggtcagaccacctctgaagtgctgtgttcagcatttgaagactttaatcaagctggcattatatcagggaagagcaaaatgatgacgagaactcaaaaacagggcaagtgaagaaggattgattaaaccttccaggactcacctagaagagagaaaactactggactctctccaaatatgaaatgacctatcatgtgaagttgatttgtttcatgtgatgcaaacttcagggaacagatttaagatcctgaaaagaagatgcccttgtagcacgacccaaagaattgcctaccttagcatgtgtgaatacctcaaccacagaattttgcttcaaggagattctgaagctcacttaatagggacttggtacaggggagccacacatcaacagaataattagttgatggttttgttaaagatatttccagtcttgagattacatgtgtctttggtcctggacttcatagagtttacaagttagttcatgagacaagacaaatgcatcacaaaaataaataatgcaaggaggccaagtgataatgagaggtgctgataagtgctaggaattcacatgacagattattcccatcacagttccagaggcttaagggagaagagaggaactgaaaatagactacctagaactgccctatccattggggtagccaccagttaaatacgtctcttgacatttgaaatgtggcttgtccaaactgagacatgcaatgagtccaaaatgtacaccagatttcaaagacttagaaaacaaatgtaaaatattgtaattcttatgtcgattacatgttgaaataatatataatggatcaaataaaatatgttaaaattaatttcaactttatttttactttttatgtgacttctagaaaatttttaattacataggtggcttgcatcatatttgtattacatagtcctggcctggaaggaaattcagttagccctctgtatccatggcttctgtatatgtgtcaaccaactttggaacaaaaacaattgaaaaaaaaaaaaaaaaagaatggtaatgtctgcattgaacacgcacagactctttttttcttgtcattatttccttaacaatatggatgtaacaactgtttacatagcatttcccattgtattaggtattataagtaacctagagatggtttaaggtatatgggacaatgtgcatagtttgtatgcaaatactataccattgtgtgtaaggacttga

SEQ ID NO: 584834 - DNA, 4001 bp, Homo sapiens
tttatgctctatataggtttaaaaaaaaaaaaaaaacgggggcacatgttaaagtaataattgtgattaccgaaaggagatagggcaaggcactgagtacagagaactgttaactttatatatgcctgtacaactttctaaaagtttattacaatgaatatatattgttttataattaaaattaaccttacatatgatatatacattttagagattaaaaactagtttttaaaatgaaaagttttacatgccacgattacctaaatcatcttcaatgcattttttacatatacttctagttcaaagtatgtccctcatcgatgaagttaaactatttccccttcaaaactggcaaatgaagcactgaattactttagtaaaagataattaaagcaaagataattgtcgttttagctttctaaatatttattactaaagatattaaaaatacgtatttttaagaccttaaaatatatgtagaaaaaataccaagaattcttggactgacatgaggagttgaccttaatttcctagcctacgtttgtgttttatgtttagggtgtgttctgtatttggatgtggagttattttagatttcaacacggtcttgaagaaagtcttccttcagactatttataaggcagagattaagtcctggaaattatttaagtatcttatttctgcttttaggttaaatgtaacttcctacctcagctctatttctcttcctgaaattagcttttcgtcattaggggaaaggagtccacgttggttggggagcctgcgcgccagcatcccggcgcatcccgggcgccggccgaggaggaccggccgaacaggacccacggcccccggggagcgccggcgcccagcccgcggcgcggaggggccgagcctgcgcccgcctcccccgctggttggtcgaggaagccagaaatcagcgcgaggacagcctcgctctcctccccgaagcggccaggcatggccagcccggagagtgcggcgactccaccgtgagctctcgagagtgcctgcctgcctttcgccgggggcaggcgggcggcggggcaagaggaggcgccgtgcgccggggtcgctggcccaattctcgactcggggtaagatggctccgctccgaactcgccggcgcgaccacacgcacagcctctcccttcccagcctccgtgctcgggcccggagggtcgcggaggctgttggcggcgcggagccagcccggcgcgacctcaggcggcgcagcgggagcgagtgcgggtctccgagctgcccgcccgcagacaaagctgacaacatggctacctccgctcctccgctcaaacaagttcctcgcaagttgagcccggcaggcgcctgggctgcggcggaaagccgcgcgcgcctcggcggccgtcgtccatcaacttcaagtttccctccgcagagcagcccgcggccgccaggcgccgaacacagccgcccagcgcgaggcccggcccgggaaactttcaacgtctgcagcccgcaactgacagcccgggcgcacgggcgccgcactcaccttcagacaggtcctcgatgcactcgaaggtgatctcgaactggaacgggttgtagaaaggagaagggttatccagcaccactacattgttcacctgaacctttgccatattttgaaaaaaacacaaacaatgggaactggggctggttgcggcacaataaagtccagcgcgcggccgctcgggagagcgcagacccccgctccagcgccggccagacgtcgtgcagcggcgacttgagaaacttttttcctctttttatttacacgggagcactccacagtgttttgcagctttcctatttcactaaactacagcccattctgctctgataagtagcagcgttgccctcgattggctgcacccgagttctgaccctcctcctccagcgagggcctcggcagccagcaagatgggctcccgctcccggaatggactcggaaactttaactgcggctccacctgctggtgtggattaggacaaaggcggagaacaaagtgagtggaataagggctgggaggcccgcgcggaggccgccggcggcggcgcggagaggggcggagggggcgtggccgcggcggggaggcgtggctgcggcgggagggcgcgatccggccgacgcccgcccctccagttggcttcgtgtgggtgttttggcgtttttttgtttttttttttgtttttttggttttttgatttaacgctctttttacatcagtgcaacagctttgccggccttgctgaatttagcagatgagagtcggtgtttacactgggttaggttcagctttctgcgtatcgggtagtatttggagtagagagaaagattggctgcaggggaaataaattgcatgttatagaccgatgtcagctcgaaaggagcaaagccattttggaaatctagctcttggccagtatctacgtttaggcacgacagcgccgttaagcaacacaaaatgaagggcgaggaatgattttctacacactgtgcttggaaaatttaaataggtaacctttgggcttgcacctgggcgtcttcttcggagtccagatctgggaagtcctagaataaaaaaaaatcacaagaggtgtgatcagttatacttcaggttactgccatttggagagcatagcaggaacataaaaggagaaaatggaagtgttaggagaccaacagggcaacaaacgtaatagagatgggaaaaagaacacaaagacatagcaagacatttgatcttcaaaaaaatttctgacctaaaccgttagtaaagcaaattctgaggagcccttgcttgcctgtaaccagttgaggtctgaactgaggaaatgttgattcgtttatgctgcttggctaccattgcggggaaagagaaagctttaacatatttgtgagcctaaaccgtttctatttagtaagtggtataaaggtttgttttattatctgctagccataaaccatcatttttttccttaaatgttgtgaatgaaaccaccaaacttggccaaattcagagagaaaattaattcttaagtatgtgttctggaagagttttctcttagtatagtgcccagaattttgatttgtcattctttggtcattgttcatacttaagtaggtggcttttgatgaaacgttttcatctgatggtcttttgaaagttaatgtgagacagctaatgtcaacccctcgtacatttaggaaaaccggttagagtggggaagagttccctttttttgtcagtggattgaacagttagatataggacctaccaaaaaacacttcttcaagccagttgtttgtgacattagagtattaagagtcaaaccatggtgatagacacagatttttgtggctgataaacaacatactcttcattcttattagtgctggtcctaacactagcagataaagtggaaattgctgtatgctgtaagacactctgtatatgtaagataaaatgaccatttgaagattaaaactcctgtgagactggtgtatgcagttgtctgattattacaggtactcttaagaggagagtctagtcagtctcatgaaaacgacattttatgcttgttaaaatcacgtgcattttgcagtctgaccgtaagtgttacaatgagactagttgtaaaactcacttttggtggatgtgcagcatgaaggactgagaagatctacctgaatgccactaatttggcttattttctttaaaattttttgtttaacacatcatatgcaacagtatttaagaagaaaaaactccccaacatttcactggaagctgcaagaattagctccaggcttctcctgtcttaactcttgtattattgcttgtcagaaatactaaagggtcgttgagcactttgttcaatagtttcctcaccattgatactaccttactccaggagagaccgaaaggattcctcagatatgtcctggcatattt

SEQ ID NO: 584835 - DNA, 4001 bp, Homo sapiens
tcacacctgtaatcccagcattttgggaggccaaggcgggcagatcacaaggtcaggagtttgagaccagcctggccagtatggtgtaactccgtctccactaaagatataaaaattagctgggtgtggtggtgggtgcctgtagtcccagctactcaggaggctgaagcaggagaatcgcttgaaaccaggaagtggaggttgcagtgagctgagattgcgccactgtactccagcctgggcagcatggcgagactccatctcaaaaaaaaaaatcaaaatagatgagaaagaagtcactacaggatgagagatggtaccacaagagaaagaaagagcctggttgtagaaaatgaaacctatgtgataggaaataagtcactacttctttgccataaataacaaataaattcaatgggaatgctcagtggggatctattctctgaaacctctaacctgtgggactgtggtctccagattgtagtgcttattcaggaatttcagcagcttctgtgagggtcggtcaattgccagttggtgcggttccactcgctccttctgcagggaaaaggagactcagggtaggaggaagtatggggaaagcatgccaacaggaagccagaagcctgggaagggaatagaatgacatgggaacatggggggtgggaggcagggcttctggaagggctcagggcaaaggagcccctagtttggatgaaccagtgaagaggtcagtgatacctgcaacatatactggaagagttctcgcccatggccatggcgttgcacagactcatggatgtaaaagtccaggatgcaaagtggttctacctcattatgagcctcacgatcatcctaagagagaaacaataaaaatgttttaggaaccccggcatctctgctgccccctaacctccagcacttttgttctcagaaaccaaggtatacgaactcctagcatccaataacactcaccagtacaaagagcttcttgtatccaactttgatgaaaccaataatggctccttttccagccctgtaggacggggaaaataatgaacaggctagtggtatctatctgcaagagatagtcaaagatgggggaagggctgaggaaggaaggaattaagtatgggatggaagagcatgtggcactcacggtcgggctgaactgtctttgagaatataaacaacatggcggttactctgcatccttgatgcactagtgataggagcggaaagattctgggcctgcagggaagattaagtcagactttctgcaagtctctccgaaggacccaggcctcccttatataccatccccacagaggtcctccctttactccatctaaaaactctccagtaccttggcagaagccttgcccagttcatctataatggtcataatttgctgctgtagatcaacactagagaaagagaagaaataaagagtcagatactcactaaattagcgggtcctaggcagtcagtcctgggaacctgggccacaactccaacccaggtttaacactgaaggctccctgcctttgcctgggagtcttccaatctgatttcccaccccacccttctgaaacccaaacttctgtcacacctttcaaggtggcacactccctcctcccttaaggttattgtgaggaagcagaaaggccaggtcaaccacatcctttgattgggacattttgggcccggggtgaaaggtcacagatccaagcgctgatcaatcccactaggcccagggtcagaggtcaccaaaaaggcaggcctggacatcaaaaggggcgatcactagtcagtgagaagggggcgtggtgcctggaccaggtttggagaggaaccgggagaaaagggccagagggtgggtttgagctgtcaccgggccggcgttgtggttccgggtcggcgggctgggggcctcaggtgctggtccagcaccgtgatccgctccgggaacagcgcgtccacatcgaacgggaactccatggcccattgtgcgcggtcggacccgccccacacgacgtcacttccgcccctcctctcgccgcaccgcctctcggagtctttatttccaggagccccgcctgtagaccttgccccctagcgtcctggcaactgacagggcccccgtttttcttgccaaaccagctgtgcccctagcagtgccactcctttccatccctgcatcccacggcagtgagtgccatggcaacgtagtcttccttggcccagtgtctcactgtccaaccttttatcccctcagtgaacagtgggccatgctgtggagtgggggcccacaaggcatcttgacagagtggcacagctgcccatccccggcttctagtcccaggcgtcacaggcaaggctggcttaagcctgaccacttatctccccacagcatcacccaattgcttatatgaaaagaccatcactcagcccaccccccgctaatggcattcatcggaaacagcccaaagcaaaccagagacagtagagctttattgtgtaaaagctgagttggtagaagtatgaaacggcaacaatgtttagcccagcccatctatttacaatatataggggttggggtttcccatacacatctgtaccacccgccctcagcctcaagatttatccctatcagcaacattcatttcctggatttgtcactggccacaaaagacacaactcttcagggtgatatcccatcacataaacctacatacacattatctcctagtccctctagctctcttcccagtctttttttttttttttgagacagggtctagctgtcacccaggctggagtgcaggggtgtgactgcaactcactgcaacctccgcctcctgggatcaagtgatcctaccttagcctccccaatagttgagactacaggtgtgcaccaccacacccagctaatttttgtattttttggtaaagacgaggtttcaccatggtgcccaggctggtctcaaactcctgggatcaagtgatcagcccaccttggcttcccaaagtgctgggattacaggagtgagccaccacgcctggcctctcttcccagtctacagctcctacagagcactctgagggcctgtctgcccagtggaggaggcttccgctggtgttctagggggcatcttgggcattgactcaggtggggggccactctcttcttggagatgaccctggtaaagccggcgaaggcgagacagttctctctccggtggctgtttccagttgtaccatgggtaccaggggtcacctgagaccagggtgggggctggcggagtagcactcacagccccatgagaggtactgaagtcaaggtcccgtggttcaacctgggggatgtggtaaatgaggagacctaagggattaaaaaagaaaagaaatttaagaggcaatgaggagggtggtttagatgaagtaagaaaaaggattataaagggaaggaccagtcagagccaccaggtacatttatgcatgttgtatactgcaaacaggtgaccggcccagagggcaagtgtgggctgacatactgctggggctcttgcttacaaagctgtgcagtgctgaacaaggactatgaagctgcatctgccctagcagaggggtatactttttactaacttatgcagcagtgccatgtagtccagggccagacatttatataaagaacttcctaaggcattgagaccagcagttgtaaaataggagggaaaaggatggaaagacaaagaacaaggagacaggacaatgataaagtaagacactcaggagaaaggacaggggacaatgtaacgtcaggaagaacatgctgggtgctaccatcttgaacaggtgtgagcatttatatccattttctagccctaagtcatcttccttatacctaaacaaaactgctgtgtgccccgtctcatgctcaccatgatccctggctttctggatggcctgggtcaaccgcttgtgctgcttcacacaga

SEQ ID NO: 584836 - DNA, 4001 bp, Homo sapiens
aaggtcaggagtttgagaccagcctggccagtatggtgtaactccgtctccactaaagatataaaaattagctgggtgtggtggtgggtgcctgtagtcccagctactcaggaggctgaagcaggagaatcgcttgaaaccaggaagtggaggttgcagtgagctgagattgcgccactgtactccagcctgggcagcatggcgagactccatctcaaaaaaaaaaatcaaaatagatgagaaagaagtcactacaggatgagagatggtaccacaagagaaagaaagagcctggttgtagaaaatgaaacctatgtgataggaaataagtcactacttctttgccataaataacaaataaattcaatgggaatgctcagtggggatctattctctgaaacctctaacctgtgggactgtggtctccagattgtagtgcttattcaggaatttcagcagcttctgtgagggtcggtcaattgccagttggtgcggttccactcgctccttctgcagggaaaaggagactcagggtaggaggaagtatggggaaagcatgccaacaggaagccagaagcctgggaagggaatagaatgacatgggaacatggggggtgggaggcagggcttctggaagggctcagggcaaaggagcccctagtttggatgaaccagtgaagaggtcagtgatacctgcaacatatactggaagagttctcgcccatggccatggcgttgcacagactcatggatgtaaaagtccaggatgcaaagtggttctacctcattatgagcctcacgatcatcctaagagagaaacaataaaaatgttttaggaaccccggcatctctgctgccccctaacctccagcacttttgttctcagaaaccaaggtatacgaactcctagcatccaataacactcaccagtacaaagagcttcttgtatccaactttgatgaaaccaataatggctccttttccagccctgtaggacggggaaaataatgaacaggctagtggtatctatctgcaagagatagtcaaagatgggggaagggctgaggaaggaaggaattaagtatgggatggaagagcatgtggcactcacggtcgggctgaactgtctttgagaatataaacaacatggcggttactctgcatccttgatgcactagtgataggagcggaaagattctgggcctgcagggaagattaagtcagactttctgcaagtctctccgaaggacccaggcctcccttatataccatccccacagaggtcctccctttactccatctaaaaactctccagtaccttggcagaagccttgcccagttcatctataatggtcataatttgctgctgtagatcaacactagagaaagagaagaaataaagagtcagatactcactaaattagcgggtcctaggcagtcagtcctgggaacctgggccacaactccaacccaggtttaacactgaaggctccctgcctttgcctgggagtcttccaatctgatttcccaccccacccttctgaaacccaaacttctgtcacacctttcaaggtggcacactccctcctcccttaaggttattgtgaggaagcagaaaggccaggtcaaccacatcctttgattgggacattttgggcccggggtgaaaggtcacagatccaagcgctgatcaatcccactaggcccagggtcagaggtcaccaaaaaggcaggcctggacatcaaaaggggcgatcactagtcagtgagaagggggcgtggtgcctggaccaggtttggagaggaaccgggagaaaagggccagagggtgggtttgagctgtcaccgggccggcgttgtggttccgggtcggcgggctgggggcctcaggtgctggtccagcaccgtgatccgctccgggaacagcgcgtccacatcgaacgggaactccatggcccattgtgcgcggtcggacccgccccacacgacgtcacttccgcccctcctctcgccgcaccgcctctcggagtctttatttccaggagccccgcctgtagaccttgccccctagcgtcctggcaactgacagggcccccgtttttcttgccaaaccagctgtgcccctagcagtgccactcctttccatccctgcatcccacggcagtgagtgccatggcaacgtagtcttccttggcccagtgtctcactgtccaaccttttatcccctcagtgaacagtgggccatgctgtggagtgggggcccacaaggcatcttgacagagtggcacagctgcccatccccggcttctagtcccaggcgtcacaggcaaggctggcttaagcctgaccacttatctccccacagcatcacccaattgcttatatgaaaagaccatcactcagcccaccccccgctaatggcattcatcggaaacagcccaaagcaaaccagagacagtagagctttattgtgtaaaagctgagttggtagaagtatgaaacggcaacaatgtttagcccagcccatctatttacaatatataggggttggggtttcccatacacatctgtaccacccgccctcagcctcaagatttatccctatcagcaacattcatttcctggatttgtcactggccacaaaagacacaactcttcagggtgatatcccatcacataaacctacatacacattatctcctagtccctctagctctcttcccagtctttttttttttttttgagacagggtctagctgtcacccaggctggagtgcaggggtgtgactgcaactcactgcaacctccgcctcctgggatcaagtgatcctaccttagcctccccaatagttgagactacaggtgtgcaccaccacacccagctaatttttgtattttttggtaaagacgaggtttcaccatggtgcccaggctggtctcaaactcctgggatcaagtgatcagcccaccttggcttcccaaagtgctgggattacaggagtgagccaccacgcctggcctctcttcccagtctacagctcctacagagcactctgagggcctgtctgcccagtggaggaggcttccgctggtgttctagggggcatcttgggcattgactcaggtggggggccactctcttcttggagatgaccctggtaaagccggcgaaggcgagacagttctctctccggtggctgtttccagttgtaccatgggtaccaggggtcacctgagaccagggtgggggctggcggagtagcactcacagccccatgagaggtactgaagtcaaggtcccgtggttcaacctgggggatgtggtaaatgaggagacctaagggattaaaaaagaaaagaaatttaagaggcaatgaggagggtggtttagatgaagtaagaaaaaggattataaagggaaggaccagtcagagccaccaggtacatttatgcatgttgtatactgcaaacaggtgaccggcccagagggcaagtgtgggctgacatactgctggggctcttgcttacaaagctgtgcagtgctgaacaaggactatgaagctgcatctgccctagcagaggggtatactttttactaacttatgcagcagtgccatgtagtccagggccagacatttatataaagaacttcctaaggcattgagaccagcagttgtaaaataggagggaaaaggatggaaagacaaagaacaaggagacaggacaatgataaagtaagacactcaggagaaaggacaggggacaatgtaacgtcaggaagaacatgctgggtgctaccatcttgaacaggtgtgagcatttatatccattttctagccctaagtcatcttccttatacctaaacaaaactgctgtgtgccccgtctcatgctcaccatgatccctggctttctggatggcctgggtcaaccgcttgtgctgcttcacacagactcctgtggggagaaaaatatcttgttctttaaggcacagtaaataat

SEQ ID NO: 584837 - DNA, 4001 bp, Homo sapiens
ggtcaggagtttgagaccagcctggccagtatggtgtaactccgtctccactaaagatataaaaattagctgggtgtggtggtgggtgcctgtagtcccagctactcaggaggctgaagcaggagaatcgcttgaaaccaggaagtggaggttgcagtgagctgagattgcgccactgtactccagcctgggcagcatggcgagactccatctcaaaaaaaaaaatcaaaatagatgagaaagaagtcactacaggatgagagatggtaccacaagagaaagaaagagcctggttgtagaaaatgaaacctatgtgataggaaataagtcactacttctttgccataaataacaaataaattcaatgggaatgctcagtggggatctattctctgaaacctctaacctgtgggactgtggtctccagattgtagtgcttattcaggaatttcagcagcttctgtgagggtcggtcaattgccagttggtgcggttccactcgctccttctgcagggaaaaggagactcagggtaggaggaagtatggggaaagcatgccaacaggaagccagaagcctgggaagggaatagaatgacatgggaacatggggggtgggaggcagggcttctggaagggctcagggcaaaggagcccctagtttggatgaaccagtgaagaggtcagtgatacctgcaacatatactggaagagttctcgcccatggccatggcgttgcacagactcatggatgtaaaagtccaggatgcaaagtggttctacctcattatgagcctcacgatcatcctaagagagaaacaataaaaatgttttaggaaccccggcatctctgctgccccctaacctccagcacttttgttctcagaaaccaaggtatacgaactcctagcatccaataacactcaccagtacaaagagcttcttgtatccaactttgatgaaaccaataatggctccttttccagccctgtaggacggggaaaataatgaacaggctagtggtatctatctgcaagagatagtcaaagatgggggaagggctgaggaaggaaggaattaagtatgggatggaagagcatgtggcactcacggtcgggctgaactgtctttgagaatataaacaacatggcggttactctgcatccttgatgcactagtgataggagcggaaagattctgggcctgcagggaagattaagtcagactttctgcaagtctctccgaaggacccaggcctcccttatataccatccccacagaggtcctccctttactccatctaaaaactctccagtaccttggcagaagccttgcccagttcatctataatggtcataatttgctgctgtagatcaacactagagaaagagaagaaataaagagtcagatactcactaaattagcgggtcctaggcagtcagtcctgggaacctgggccacaactccaacccaggtttaacactgaaggctccctgcctttgcctgggagtcttccaatctgatttcccaccccacccttctgaaacccaaacttctgtcacacctttcaaggtggcacactccctcctcccttaaggttattgtgaggaagcagaaaggccaggtcaaccacatcctttgattgggacattttgggcccggggtgaaaggtcacagatccaagcgctgatcaatcccactaggcccagggtcagaggtcaccaaaaaggcaggcctggacatcaaaaggggcgatcactagtcagtgagaagggggcgtggtgcctggaccaggtttggagaggaaccgggagaaaagggccagagggtgggtttgagctgtcaccgggccggcgttgtggttccgggtcggcgggctgggggcctcaggtgctggtccagcaccgtgatccgctccgggaacagcgcgtccacatcgaacgggaactccatggcccattgtgcgcggtcggacccgccccacacgacgtcacttccgcccctcctctcgccgcaccgcctctcggagtctttatttccaggagccccgcctgtagaccttgccccctagcgtcctggcaactgacagggcccccgtttttcttgccaaaccagctgtgcccctagcagtgccactcctttccatccctgcatcccacggcagtgagtgccatggcaacgtagtcttccttggcccagtgtctcactgtccaaccttttatcccctcagtgaacagtgggccatgctgtggagtgggggcccacaaggcatcttgacagagtggcacagctgcccatccccggcttctagtcccaggcgtcacaggcaaggctggcttaagcctgaccacttatctccccacagcatcacccaattgcttatatgaaaagaccatcactcagcccaccccccgctaatggcattcatcggaaacagcccaaagcaaaccagagacagtagagctttattgtgtaaaagctgagttggtagaagtatgaaacggcaacaatgtttagcccagcccatctatttacaatatataggggttggggtttcccatacacatctgtaccacccgccctcagcctcaagatttatccctatcagcaacattcatttcctggatttgtcactggccacaaaagacacaactcttcagggtgatatcccatcacataaacctacatacacattatctcctagtccctctagctctcttcccagtctttttttttttttttgagacagggtctagctgtcacccaggctggagtgcaggggtgtgactgcaactcactgcaacctccgcctcctgggatcaagtgatcctaccttagcctccccaatagttgagactacaggtgtgcaccaccacacccagctaatttttgtattttttggtaaagacgaggtttcaccatggtgcccaggctggtctcaaactcctgggatcaagtgatcagcccaccttggcttcccaaagtgctgggattacaggagtgagccaccacgcctggcctctcttcccagtctacagctcctacagagcactctgagggcctgtctgcccagtggaggaggcttccgctggtgttctagggggcatcttgggcattgactcaggtggggggccactctcttcttggagatgaccctggtaaagccggcgaaggcgagacagttctctctccggtggctgtttccagttgtaccatgggtaccaggggtcacctgagaccagggtgggggctggcggagtagcactcacagccccatgagaggtactgaagtcaaggtcccgtggttcaacctgggggatgtggtaaatgaggagacctaagggattaaaaaagaaaagaaatttaagaggcaatgaggagggtggtttagatgaagtaagaaaaaggattataaagggaaggaccagtcagagccaccaggtacatttatgcatgttgtatactgcaaacaggtgaccggcccagagggcaagtgtgggctgacatactgctggggctcttgcttacaaagctgtgcagtgctgaacaaggactatgaagctgcatctgccctagcagaggggtatactttttactaacttatgcagcagtgccatgtagtccagggccagacatttatataaagaacttcctaaggcattgagaccagcagttgtaaaataggagggaaaaggatggaaagacaaagaacaaggagacaggacaatgataaagtaagacactcaggagaaaggacaggggacaatgtaacgtcaggaagaacatgctgggtgctaccatcttgaacaggtgtgagcatttatatccattttctagccctaagtcatcttccttatacctaaacaaaactgctgtgtgccccgtctcatgctcaccatgatccctggctttctggatggcctgggtcaaccgcttgtgctgcttcacacagactcctgtggggagaaaaatatcttgttctttaaggcacagtaaataatag

SEQ ID NO: 584838 - DNA, 4001 bp, Homo sapiens
taccccaagagcctgggtgagagttggtgtggggcagggggcagaaagaagggcaaaaaacaagggagatgttgacagtaagagcgagaacaaaagctttagaagtttagggcttacaagccatcaattatttgacattctggtctgaatggtactgaccatctttctaacctgttcattctttctactttatttctgggagaattgatgaagtctcatgacttcaaatatggcctcagagtggacaacttgggcaagaacagttccagaattctcagcagtcaataactctcttcttcccagccccacataactctttatattaaaaagacccaagatcaggcgtggtggcttatacctgtaatccaagcactttgggatgccaaggtgggaggatcacttgagcccaggagtttaagtccactctgggcaacataggaagaccccatttttacaaacaataaaaaaaattagccagacatggtggcatgtgtctgtggtcccaactactcaggaggctgaggcaggaggatcacctgagctcaggaggtcaaggctacagtgagctgtgaccctgtcactacactgtagtttgggtgacagagggaggccctatctcaaaaaaaagcaaaaaacaaaaaacaaacaaacaaaaaaatcttcactgctagataaccaaaggggatgtggaaaatgaagatattaaggaaacggcaaaggtagtggagaaggccccccacacctcacacacctcatgactcatagcacacaaatcatttaaatcatttctttgtcacccacgggtgaagggaatgaagcagagtccccgtcacagagagtaagagggatatggctctctcacctcgctggatggctctgtggagagacgcgatgactcggagctgagggaggaggaagagcagggggaagatggctcagacttcacctgaagatctggaggaaagggagttagaaattatcaggaagcagagcttaagaagagtccaaaaagtacccaaggacatgtcggtggggattcctgtaccgcagcaagggagaagaaacaaaaataggggattgaaggagagaggataggcacttatgtagaagcgtgaggatataggaagctacgtagtttctgggaaacagtgggaagatgagggtttctggaaatctgagggaacgacaaagactaccttacctgggaagatcggcaggagttcccatgggggctcagaggggctgacatccatccccacgtccagggagctgccgtcaaactaaataagggaggatacaagagggcaggagtgtgagaaaggatgagaaagtaggggtgactccagatgagttatggcctgtgaatgggtccaggttctgggctcactttccacccaccaagggttagagaaaggctggggacacaataccgggacatcctgctccgggcaacggaagagctgcgtctgctcctcggccacttcatctaggccagaatacaaggtgctgtctgcaagaaatgctgagcgtcggggggtcgttcggtggccccagcctacagatcgcacacaagcccccgccccatccctcattggctccgctcggccagacccaccgcccgcccacttgaaaagtgatacaaccagggcgcttcagcccctccttccccgaccccggaacaactcgacgttccagcagggagcagagttcttccctgacttttgtatcccccttaatgcacaacgagccccctgctccgctctccttcagatggcggattccgtatttgcccagacttcctctttaggcccccgcttctttcccgcgtgcctcagggacagtttgccacagccctctcccctccccggtgcctcactctgcagaccccagtcctccgggctaagcaggttgtcggtgaagaaacgcgtcgggtcagcaatctcgctgagcagcatcagctccgccatctttcccccccaccccccaaccaggagacggttcccaaggcccgcctctccccatcaccaactaatcagttgactctttcaaaaaagggggcgtcccggaagctctaccgaccagtaagagacctgggtgctgagcacgtgaatcaacagatgcggatgactgtgtaggcgggcccaatgggagcacagcagcaggaagtaacttccagacagtgccataccgccaagcgcatgcgccaaacaggctccagtgataaagcgcctgggagatgtagtacccagtattaaggtccaccatctcccccagccactactaagtttagtttagacagcttctatgtgtcctcggagatagataagcccctcaaaaggggcgcactgtgaccactgctacctcccctaggaagccaaaagctgagaatgggatatgggctgaaaccttccctctggccccccacccccaaatctcacagcacagaccacaattcacaagttcctgtctcttttaaggtttaacttttaatcagccaaacatcttgcgcagaccctgagccagccctgcatcctggttcttcccctgaatgaccaccttccccagttcctcctgggctgcccggtttttgggatctatcgccagcaccttcttgaggtcagcagttgctttttccaggttcccaagggcagcctgggcaaccccccttcggtataaggcctttaaatggccaggctcccgctccaacacccggtcacagctctgggctgccaactgaggctgccctagcaacaactgacaggcagccagattggcatgaaggacagttcgttctggagggccaggtgggggtaaagtcaggagcagccgaagagcccgtccatagcatcgggcagctccttcagggttcccagctcgaaatagttctgtgccccttgcacgttcttccctggccagggcttccttctcgctagtctccagctcccaggagtctcggccttgagtgaaggatgccagtgtgagcctgacaggaggtccagagtgcccaggcagctgaagctctgcttcctcaccttgacacatggactccaagcatttctctatgagctccccccaagtttcctccctccatggccctacgcccatagttagctctgtccagccctctggcggccctgatccgaaaggaaaccccaaagccagtacccggcagcaggagcctagtttgggtttgtccaagccatggccacggattacgatcttcttgacaaagctcccatcggggcagtaccagagatcagaagcttgaagggcctctggcatctgactggttgatccatgagacttatgagagtctccttcaagttcagcaaccagtttttcagctccttgagtatgctctagaatttggctggctggatctgggcttacttccagctcaagcgtttcggtaggagggtctcggggctgctgcctaatctgaataactgaatcaaggttctcccgaaggttcttttcccactcttgttgcggctgagaggtgtccttttctccaattgtattgactggtggcgtctccatatggatgcttagtcccttccacggtgagtgaacagttttggtcagaaagggatgaaccaggttcaggtcagcacctgaaaagaaaaccaaacaatgctaatagcagggttcttatttagactcctttctcgtcctttcccattcttctgagacccaggcccctagtcctgaaagtccccagttttgctttcctccaaaaatctgctccagcttccccgttccacccacatataatttagaactataaattccacaattccctgcggttaaggtagccgcgccaactacggacacccggtcgggtcaataagtacctgcgcggccaaagtgcctagcatggtgacaggaggagccgggccattcgaatcacctctccttccaaagctaaatggctactgaatgctgccctcggagccttgccccacgcggagagggcagccggagaggggcgcggtgcggga

SEQ ID NO: 584839 - DNA, 4001 bp, Homo sapiens
agctaattttttatttttttgtagagacagggtctcgttatgtcgcccaggctggggattctctcaaagatggtattacaagcatgagccatcacgcccggccaagttatattctttagttgctcagtccgtaacccttggagtcgtccttgacccttcttctacctgactgctctcaaaagtctagaatctggtcatttcgcactaccgccactattactaccctgattcaagtcacctcgacctttaacctggataaatgcagtcaatggcctactaacaactcttatttctgcacctgctgcatacagtcaacatagcaatcagatcttttaaaacacaagttagatcaactcactgcttactcaaaacccaactcattcaaagtacaaattaaggttcttataaattcccacatgctcctaaatgacttggccccatttccacctaagtatccactacttctttccctcttgttcattattttccagtcaaactagctagtatgcgcctgcttcagggcttcagtggcagctccttccaagtggcacccttctttatcacccgtaggcctccaagttaatatcatcttttctatggccaccactcccatctcttggcattccctatacccctgcactgctttggtttttttctctagcactttccgccacttgacgtacacagttggcccttcctacccatgggttcttcgtccttgtattcaaccaatcatggatgaaaaaatattcggggaaggaaaaaaaagtcagtactgaacatgtatagactcttttttgtcattattccctaaacaatacaccataacaactatttatacagcatttaagttgtattgcgcattataaataatgcagagttgaactaaagataggaggatgtgcataggttatctgcaaacactacaccattttatatcagggacttgagcatttgaggactttggtatccaagggaggtcctggaaccaatctcccacagatgccgagggacaggaaagactgtaccttaatttttgtatcaatgtcttctcaccccatccccaaagtggaacttcatgatggcagggatttttattcttttgtttactattttgtttactgttttgtccagtgcctaacacataggaggtactcagtttgggggaaattaatgaaataaatacacacttgaggtgtgtgcactattctaaaaatccatatccatacagttccattctgtacactttcccccaattttaagtagcatatctttgaagataaaagcacaggcttaaatctggtgtaaaatacctctcaattactaccctgagcacaacatcgttattttcaaattcaaaattcaaccagaaactccctctatggaaatcacaaatagttcagttcagagccaagtatccagtttcaaggtctcagaaatttaacaagccaattctggaaggctttggaagttcagctactgtctggtaagtctccgggttctgattgctcaagacaggctgtacctcctcacccctcagaaaaatctagaaccaatagtttcctaggttcctcaagttcaggataattttaaaataatccaaagtacaaatgaagtatgtaaaagtgtcttgccaacagaaaatgtctttggtagcactaaatattgttattgagacagggaatatcgtaaatagataaattgcttggaggacatacccaccgagtttggacagactcacactgcactgtgcaataaaggtttaaataactgtgttccacaaacaattcaggtcctgaactgaactctagagcctgcgactagactctcgctttcctaccttagtaagcaacagacatgtaccccaagagggaccccgcaggccacacccgccaaccggccccagggctccgggccggcgtctcgccaactccaccttgcccggaggaaccaccttcacccgccatcgcggccgggcgggcgctcctccaggcaactactcacccctccttcctaccacacctacctggcccctccccagccctcctcctctaggaatttcctcacacaaggtggacacacacacgtaccctactccaagctatggctcctccttccggctccccgcactggtggggacgcccagattccgcgctccggtggggcggcggggcaagctgcccgcctgacacactgtcctgcggggacgcggtagcaggactccaggaagcccgcgcagccgcaaaaagcaccggcgcggaggtcggagctgaaccctgctgcacttccgccctctggtatccagcgaatacaaccggcaacgctgcggagccctggcagcgcaccacaagtccagtcaccctcggcgcccggagatgacgtcacgagaccccacgtggtccgaactccgccctccgtgttctgcctaacccagcaaggaggcccgagtcgctcttgagcatgcgccaacggggcagtacgcttgaactcgcgaccaaacctctccaagttcatagcttctaccctcttctgagaatcttgcgtcaaagcgtagttattggggcttggggaggttaacttaacagttccacaaaaacagtttttaaaatactgaaacactgcctccctagagcttgatcgcaacatccctttcttcctggcatcacacaacagtattaataaaacattagttttcaaagtactttcccatccattttcttatttgatcttcttctctactttgttggaaccaccgcaggcattaataacctaatttaacagaagactatatgagcactgaaccctcccacccatccaagagtacatatctttatcttactctttgtaaaaataattggggccgggcgcggtggctcacgcctgtaatcccagcaccttgggaggccgaggcgggcggatcacgaggtcaggagatcgagaccatcatggctaacacggtgaaaccccgtctctactaaaaatacaaaaaaaattagccgggcgcggtggcgggcttctgtagtcccagctactggagagtctgaggcaggagaatggcgtgaacccgggaggtggagcttgcagtgagccaagatagggccaccgcagtcccgcctgggcgaaagagcgagactccgtctcaaaaaaaaaatagtaataattggtaaacttactaataaagaatctttgaattggctctatccagaagtcttagcaggcatttaaggtttttctcttaattacacgtgccttaacgccatgcatgttaagtaagtactgtgctgagactcaaaacaggttcttgataattgggaacataaggaaaattctagtagtagccacaggattcttttaaaaagaaaaatcttcttggagttggactaagtacaatgattttcaaatggtaaattacagtacattagtgggtatctaaatcaagttagggaagcatgcccagcatctttttaaatgaaataaaatagaaaatatcagcatgcttcacacatgtaaagggtaaatattgtgtcccaaaatttttacttcagtatgtatgtggtgtacactggataggaatgtgaaatacatttcttagtaagggtagcagtcagaaaagtttgaaagccacagttatggtcctcttcacctactcaatgcagaaatcctcactacagtgtccccagtaaacagctattagcctctgtaagaaagcttgtgggattaaggtgcattgccttcccagtgtcagacaaaagtatataaaatttcctttaaaatgtatctaaaaaataagatggatttaggggcgcatagatggataaatatgtgattaaccaaatatagtaaaatataatggtagaatataatggtaaaatataatggtagaatctagatggtagaatctaggttcattgtaaatgggtattcactgtaaaatttgttcagctttgctgtgtgttcaaaattatttcctaacaaaatgttgggaccaggcacagtggctc

SEQ ID NO: 584840 - DNA, 4001 bp, Homo sapiens
agtacaaattaaggttcttataaattcccacatgctcctaaatgacttggccccatttccacctaagtatccactacttctttccctcttgttcattattttccagtcaaactagctagtatgcgcctgcttcagggcttcagtggcagctccttccaagtggcacccttctttatcacccgtaggcctccaagttaatatcatcttttctatggccaccactcccatctcttggcattccctatacccctgcactgctttggtttttttctctagcactttccgccacttgacgtacacagttggcccttcctacccatgggttcttcgtccttgtattcaaccaatcatggatgaaaaaatattcggggaaggaaaaaaaagtcagtactgaacatgtatagactcttttttgtcattattccctaaacaatacaccataacaactatttatacagcatttaagttgtattgcgcattataaataatgcagagttgaactaaagataggaggatgtgcataggttatctgcaaacactacaccattttatatcagggacttgagcatttgaggactttggtatccaagggaggtcctggaaccaatctcccacagatgccgagggacaggaaagactgtaccttaatttttgtatcaatgtcttctcaccccatccccaaagtggaacttcatgatggcagggatttttattcttttgtttactattttgtttactgttttgtccagtgcctaacacataggaggtactcagtttgggggaaattaatgaaataaatacacacttgaggtgtgtgcactattctaaaaatccatatccatacagttccattctgtacactttcccccaattttaagtagcatatctttgaagataaaagcacaggcttaaatctggtgtaaaatacctctcaattactaccctgagcacaacatcgttattttcaaattcaaaattcaaccagaaactccctctatggaaatcacaaatagttcagttcagagccaagtatccagtttcaaggtctcagaaatttaacaagccaattctggaaggctttggaagttcagctactgtctggtaagtctccgggttctgattgctcaagacaggctgtacctcctcacccctcagaaaaatctagaaccaatagtttcctaggttcctcaagttcaggataattttaaaataatccaaagtacaaatgaagtatgtaaaagtgtcttgccaacagaaaatgtctttggtagcactaaatattgttattgagacagggaatatcgtaaatagataaattgcttggaggacatacccaccgagtttggacagactcacactgcactgtgcaataaaggtttaaataactgtgttccacaaacaattcaggtcctgaactgaactctagagcctgcgactagactctcgctttcctaccttagtaagcaacagacatgtaccccaagagggaccccgcaggccacacccgccaaccggccccagggctccgggccggcgtctcgccaactccaccttgcccggaggaaccaccttcacccgccatcgcggccgggcgggcgctcctccaggcaactactcacccctccttcctaccacacctacctggcccctccccagccctcctcctctaggaatttcctcacacaaggtggacacacacacgtaccctactccaagctatggctcctccttccggctccccgcactggtggggacgcccagattccgcgctccggtggggcggcggggcaagctgcccgcctgacacactgtcctgcggggacgcggtagcaggactccaggaagcccgcgcagccgcaaaaagcaccggcgcggaggtcggagctgaaccctgctgcacttccgccctctggtatccagcgaatacaaccggcaacgctgcggagccctggcagcgcaccacaagtccagtcaccctcggcgcccggagatgacgtcacgagaccccacgtggtccgaactccgccctccgtgttctgcctaacccagcaaggaggcccgagtcgctcttgagcatgcgccaacggggcagtacgcttgaactcgcgaccaaacctctccaagttcatagcttctaccctcttctgagaatcttgcgtcaaagcgtagttattggggcttggggaggttaacttaacagttccacaaaaacagtttttaaaatactgaaacactgcctccctagagcttgatcgcaacatccctttcttcctggcatcacacaacagtattaataaaacattagttttcaaagtactttcccatccattttcttatttgatcttcttctctactttgttggaaccaccgcaggcattaataacctaatttaacagaagactatatgagcactgaaccctcccacccatccaagagtacatatctttatcttactctttgtaaaaataattggggccgggcgcggtggctcacgcctgtaatcccagcaccttgggaggccgaggcgggcggatcacgaggtcaggagatcgagaccatcatggctaacacggtgaaaccccgtctctactaaaaatacaaaaaaaattagccgggcgcggtggcgggcttctgtagtcccagctactggagagtctgaggcaggagaatggcgtgaacccgggaggtggagcttgcagtgagccaagatagggccaccgcagtcccgcctgggcgaaagagcgagactccgtctcaaaaaaaaaatagtaataattggtaaacttactaataaagaatctttgaattggctctatccagaagtcttagcaggcatttaaggtttttctcttaattacacgtgccttaacgccatgcatgttaagtaagtactgtgctgagactcaaaacaggttcttgataattgggaacataaggaaaattctagtagtagccacaggattcttttaaaaagaaaaatcttcttggagttggactaagtacaatgattttcaaatggtaaattacagtacattagtgggtatctaaatcaagttagggaagcatgcccagcatctttttaaatgaaataaaatagaaaatatcagcatgcttcacacatgtaaagggtaaatattgtgtcccaaaatttttacttcagtatgtatgtggtgtacactggataggaatgtgaaatacatttcttagtaagggtagcagtcagaaaagtttgaaagccacagttatggtcctcttcacctactcaatgcagaaatcctcactacagtgtccccagtaaacagctattagcctctgtaagaaagcttgtgggattaaggtgcattgccttcccagtgtcagacaaaagtatataaaatttcctttaaaatgtatctaaaaaataagatggatttaggggcgcatagatggataaatatgtgattaaccaaatatagtaaaatataatggtagaatataatggtaaaatataatggtagaatctagatggtagaatctaggttcattgtaaatgggtattcactgtaaaatttgttcagctttgctgtgtgttcaaaattatttcctaacaaaatgttgggaccaggcacagtggctcatgcctgtaatcccagcactttgggaggcccaggtaagaggatagcttgagcccaggagttcaagaccagcctgcacaacatggcaagaccacatctctacaaaaaacacaaaaattaggagggcatggtggcatgcgcctacagtcccagctactccagtggttgaggaaggaggattacatgagcccaggaggtcaaggttgcagtgagctatgattgtatcactgcagtctaggtaacagagagagaccctgtctcaaaaaaaaaaaaaaattgttttgggggaaactatgtatgaagaaacccaataggtgaaaggtgattacttgatttgacttaaaattcaacttcctgtaatttttataaattgaccattttctttct

SEQ ID NO: 584841 - DNA, 4001 bp, Homo sapiens
aacagctgtgtaggttttgaccagtgagcaggtggtggtaatagtatcacagggttgctacttactgaatcactgctacaacatgcaaggaactgtgctagactttacagaatgattcctaatcattgaagcaaccctcacaaggtaggcattattatcatcccagtttcacagaggaggacatcgaggctaccaagttaagtagcttgtcctggtttcacagccagcaagtgacagggtcaagagagggacccacatcggccagacactgaagtcaggatgttttccacattcctacttccccatattacaaatttcacagagggtttaggtgagaatgacttggaagtttacaaagtcccagtgagggttaaagaacaacaaggagattcagatgtgagcaggatatttataagtgtcacaggaaaattattggatcctgcctcccaggatttctaggggatggaaagaagacagggattatggtgggaggtgattttgattggaggatttctttgagggagggaactggcagaaggagtcaggccctacggtggccctaggcagaaatccggtagttggggtggacctggggcctgacgtcgcagaccatgccaagaagctgggccaggacacgctctcggtttctctgctgggagctctgcatgccctgcacctggcgccttgtagcctgctccacctcagcagacaggttcccctgggagcccatggcctggggggtagggagaggggtggaagagagaaagggaaaagcagaaacagacaagggtccaggcatatgaggggaaagatcctgaaacaaagcctagaagaaaggccctctcagaaaccacccccatcccacagaaatatcccaacaccaaagagatcaacacagtcccctttccccttagacctaacatgcaacttcatcctaaaacagaccgtaatatccccaccacctcaccatccatgaccataaaactctaccctccaccacaaatgttaatcatactccacatagatgttatactttacacagactgtggcattccgcccacaagctctatgtggccttcaaaactcccagactctcctacatatcatcacaaagtttcaccaatgttgtggtccctgccagggtcccctcagcctcagccctctgccaccatattttcttgttgagtcacccttacacacctcactagatgcacccaccaacttgcagtggggtctcaacccgactctgcctcaactcaccgcctgctgcttgctctggaattcgtgctctcgctctctgcggtattgctccacctccatctgtgcctcctcctttgcctgcttcagtcgccgggccttccctggaggcagaagaaaggacagtgagtggggatggacccacacacacacaatgtaatagcaggagtcagtcccttccagaaagttatacagccttctctcagccaaccaggtgccagattctaatatccatccatttcttccctcctaaccagcctccagaccctagctgtctgtcttcccgccagccttgggttttcccaaaatgtttgctgtcccccacccccaattttctttccaaactcctaagggaggaaagaggagactcactctttctggcatctgccaccttctcagctgcccgcttctcagcttgcagaagctgctggataccttgggactgactggccatttctgttgttatggccgatgctgttttgaatgctgtcaaagtaccagatggctcccaccccccaccgcttacttctcctcctccagctcgttgctgcagtcctccactacccctgggtcttagtgctcccctgctcactcagcctcctgcaccgagtgtctctcccaatctcatcctcctattgatgactggtcctcctctccagcacttcttgctcaggcagtacccaaaggggccgcctgggagcagcagagaccaggcccaaagctgcgggcttacaacaggttagccatcccagtcggaaaggtctagggatgaggcaggggcggagacgggggagtactgaggtgagagaaggagaacttgattggtggtaacagaggaagcataaagggttgtgaatgcggtgaaaaggtaaggatgtcatcatgcaacctgtgttgggaaaagagcattctgggcttaattctaaactaactctctacctttctctctctctccaccatcccgccccctcccctgcctcccgttgttaacatctccatctttttctacatatttctcaagtccaaatttttgcatctcacttgccccatcctacgatagtcttcttccgtcttttgtctgtattttttctttttttttgatctgtccctgttgttgtcccactgtggtttttgtttttgttttccatgtttaatgtgatttttatcctgtctttatctcctctattttctctgtcttctcatcttttcgtccatcactgaaccatctcctctctctgccaagttagaggaggcgggaaaaaacctccaaataactctcttttctccctcccctcccctcgcctccttttcctcgcctccagtccagtcttctggtttcagacggcccctttaatttaagttccctagtttcccctgggagatctggccaagaactacccggtcggggcggaacgacatccggtaacgcccctcacagttcacttccgtcctccacctgcgtctctgcttgcgccatttcctccagcctggagtgtctccgcccttcccgcctcccgtctccgagcttcttaaacacaggccttgggcctacggctctgggggtacttgggggggcgggggcaggtctgatgagtaacccctccccccaggttccagaggaagaagcctccacatctgtctgccgggtacatgatattcaatttctagatcattattggagattatctgtgactttttaaaactcagatttctgctgataaaaattttccccatccggccctgttgggtttttttaaagttctttgttaaaaattaaaaatttacctgggctcctgagccttaaaccaattatttacccttttctcgaattttacattaaaaaaattaaacctctgatcctatcacccccctcaaaaaaaattttttttcaaatctatcatctgataaaggatcagggttaggttaggcctcatctcttgctgaagatattaaaaaaagacggaaccaaagggagaaacaacaggggatgtcagagatggagggagaaggaccagccaaggctgaagtcctgactgctgccttttttccttccccagcccaagagttccatggcctccacttcccgccgccaacgccgagaacgtcgctttcgtcgttacttgtctgcaggacggctggtccgggcccaggccctcctccagcgacacccaggcctcgatgtagatgctgggcagcccccaccactgcaccgggcctgtgcccgccacgatgcccctgccctgtgcctgctgcttcggctcggggctgaccctgcccaccaggaccgccatggggacacggcactgcatgctgctgcccgccagggcccagatggtgagtctgctcagtggggaacaaggtcataagcagctgaccagacctgaaatgaaagccaaccaatagttgagaaataagctggttatttggtcatcaggacctagggaaggagttaaccaagttggcatgtggctgtcatttgtccctttacattactgagctaccattgtctgaagaacccaacattccccaaagatcaactggtcttcaaatttcacatctgtttagattagtagctactttgtttcttgacagattgtttgctcgtagccaaaaagtagcatagaaggtaggctctggagttagattgcctggattcaaaccccagctccaaatcccagctccacacttcatagctacgtattcttggacaggttacttgaggcttagtttgcccatgtgtaaaa

SEQ ID NO: 584842 - DNA, 4001 bp, Homo sapiens
tagccacatcgcgcattatataaccagcttcttccgactgttttttttttttttttttttttttttttgcccttactactcttcagcaatttccctcttctcaaatatttatattacccttttatctgtaggattatataccaagaaagcaaaacaaaacagagcagccacgggctcgaaccgaatccccgccgtccttagaaacggatttttttttgttttgttttgttttctggcagagtctcgatcaccaccctacttccacccccactaaggttcttgctcaatctccctagaaaacctgaattgtttcatccctttcagtcagccccctacgtggtctgaaacaaaatgaaagcacaagccacggagtttaagaaggcagcctgaaggcggggggctgaagaggggtcggggcgctgcagagtcagccaagtagccaaggaagggccccctccgcgtcgcgacggccctcgccccccgcccggcgcgcgcgcgcacaaatacacacacacagtcactcacacactcactcacactcacgccgcgctccgacaccgcctcacctctcgctccgcccgtccggcccccttccctgccccctgcgggaccggcctgcgcgcagcactggaaccacgtaggaggaggcggcggcgcccccgggagtggcagagtctccggcccggcccagagtgaacgagcagtggggctccagggcgcatcccaatccccgcagcgcctcctccgcggcggccgccgcctcctcctccttcccctcctcctggcttcattcaccctcccagcagccgcgcagccgttcactcccggctcagggcagcgcctgccgcggctcctcgtctcctgccgcgggtgctggcgggggcgccggcccggactggggcgctcgcgggctcccggctccgggcggcggctgccgctgcacatgatcaggaagcggccgcaccaacagggcggcggtggcggcggcggccagggccgtcaccgccactccagccgcgctccaggcacccgcacacccgctacccccgcgcggtccccgaggccacccctctgcgccccccgcccggcacccggccgcgcgcaaagtcccgtcccggctgcaggagcagtcccttccccgcccgcagccgcacacccggcgaggccggccctccgaggggagacccccgccccagggcgccgaggccgggcgaccacccgcggagaagtccagccctccgtgagaccccctctctctcaccgccctctccggggaggaggaatgggaagagggcggccgggaaagggaccaccccccaaccccagccgccgcctcccccctgcgccacccggagggaggaggacatggctctccgcacttgcgaccggaccagcagccgggggagcggggcgccgccgccgctctccccgcccgcgccccccgcccgggcgcgccccctagcccggcgggcgcccacccagcccctgacagcccccccgccggccgcccctgcgcccagagtgggggtgtcggcccgggagcctggagccggggacggttgtatgtacacacatacacacacacacacacacacacgcacacacacagaacacgacgcgtcgatttccttcgctcctcttccagctgttttccgtgcagccgattggggttttgggtttgtttgctggttgttgcttttgcccctctcgggagatcgggggaggagggattttaatctaaataaggggagaagggaatgggggaggggggaaagaatcggaggaggaaaaaaaaatagtcacttactgtaaagtgtaaatggatctggggttgcgtggggaagggggggcagagggagagaaacaatgtcttgcggctgctgttgctctggctgctgctccacggggcttgttttggatccccctgcagtgaaacaggtcctgtacggctccgccactgtagtagaaatgatgtctgcggtatactctgctctctcctcctcctcctcctcctcctcctccccctcctcccgctcccctcccctccctcctccctccgcccgcccgccctccctccctccctcgcgctctctcgcgctcgctcgctcgctcgctccagtatgtaaatgtgtaatagaagccaaatatggagcagttggctgccgccgccgcagctcaaggatccgacttcatgggggtggggggcaccctctggcgggcggcccggcgagccgcacagagcacggcgagcgcaccgcgcggcggccggcccgcgcccttaacccttcgctgcgcgccgcccggggaggcgggcacctttcccaaagagtggctcgggatggggtgcgggggaggggagacgcggaccggagggcaaggttccttccaggtttgggaagggggcggggagctgggcgatgaggtaatttgagcggtgacgggtcggtcctcgcgcgcctccctgggtccctgcacctagttggaggggactgaacgacaacggggcgctactcaggcaacctgggggactcccccaagggctgtcaggcttcagctgggagccgatgcaacaccccagcggggaggggaggtcggcccattctaatcccgacgtgtccttggtcccaggcgctcggagcagcatctgagagggctcactctgatcatcagctgcacgttaagccacaaaccggcgtcgcttcggcgttccggaacccaggcctgggggccgcggggattgcctctgcgtgcaactccggaaagtttcaaggggtcccccgactgcacaggtaccctcacctttcctgccggcgaacgctggcgaccgcccgaccctgccctctttctctcttcgcacgcaggtccggaaatcggctttgatatggaactactccgctctagcctggaaaggagacccgcgcactcctctcgcagctaatttcggatcattaatttaatcggaaatgaggtaaccagtgtaggagacagagaaagcaaccggagcatcaaatggcagttctcgagaatcgacgaggaacttaaatctggactcagggtttcagtgcggtctccgactcccaccaccccgcccctccgcctgtctcgccgccaggtgtgacctccacgcgaaggaatcttcttcggatgggtgcaccttgccaacaggtgtggcacctggaggactaggaggcgcctccagactaagggcgctcagtgcggcgttcttgttgcagatgattctggaaggccggtaggtgtcgggcgacatttgaccttcttcaggtgcttagaactaagtgtctggaaacatgatcctttcgcgtaagtttctttctgaaagccaccaatcttgactgtaagctgtatttgagagatcttttggctgagtttacttatgacctaacggttagtcaccaactgaggcagggcacaggatgaccaaaaaaaaagtgtcagtttttacacaactctggcctgcaagagcctacgtgcttcataaataaaaataaacatacgagcgaggaaggtgcagagccccggaaatatttttttctcacatttttgaaataccatgcacatatatgtggctatttaagtataactactagtgttcactcttactcatttctacaacttttttttttccatttaaaaatcgattattgttacggtttaaacctcgggttggtctaaagtgacattgttggtctcattacagcctctagtggacagttaacatcagtttcctgaaaaggctctgactggttttgttttcgttgacaagctttgtcaaggtgaaggttagtacgtaagagcataaccgggtaaaatgtcccctcacccctatcctcacccccgcccccaacaccctgcttggcaaagacgacttcagaaaggagcagaagcttgttggctttatatagaaaagacgtatgctttgtgctgcaggtattattattactggactgtgaataaacagaaagcttctgctattcatttca

SEQ ID NO: 584843 - DNA, 4001 bp, Homo sapiens
ggttggtattaaagaggaaagcgattttttggataatgtgtctggatcatcttgtggacctgttcccctcccccttgccaagcatgaggccattctaggatcggaggggtcagtgtcctgcctctacccccaccccataccttgtggctgctgtggccttagctttgccttttaggggccttcctcctcagagaggctgtcctctctcccatgtccctggagatgtccttcccatgcagcagggtctggcagcctctgggctctccaggtttgtggtgttctgggggtcctggtgaagaccacactgcactcgaagaagtggagacaagtttattgaggagcttgacacccctcttctgccctagcttgagagaacaactgcagcatttttttctttttctcttcccgatgaccatcttttgggctggcgggccaggcccctgggtgtctcccatatcgctgtctttagtgagactgaggatctggtataaggaaacagatcagctgcagccagtgagggcccctgcgttgggcctgggagagagaaggtcctgttcctgcctttcctgtggccccaggcactctcagctctgaagccaggctattgctcgacaccgcaggatgcccaggactccctggaaccaggagcaaaagggcgcagtcctttccccgtcagagccacccaccagcttccaggcttcctgcatcttccaggggtccagcctgtgggacgtcagcaggaatttcccatagcagcaccggtctagcgggtagtgggtggcaccagccagcttgacacactgtgttggggcgaggcctcctcgtcgggcacttacccccacaaagacatcctctaatgggagaaggggtgcccggctggccaccttgagaatgagctgcacagcagacgctgacagcacataccccgtgcctgaggcatagggtggaaaggggccccaggtgtgaggccactgctcctctgatacgcggtgcctgccccccggtgtccgagaggggttcacgcgccagtgcacccggcccaagtacagaagaggcacttcctcgctgtgcaaaacctggcctccttcctgctcagcctctctctggggttccgtgcttctctcccattgcccccaacggccccctcgcaagaccagctctgataccagttcagggacgttgacatacacatcatcgtccgtcttgaggacgtatcgggccatggggcagtgtttctcagcccagttcagcccgctgagggtctttagggtgaggttgcggtaggagtcctggaaggcggcctgcaagatatccccctgggctgctgactccgaggccaggtcactcccctgggaaccccacacggggtgctgtgcgttcggctctcccagcaagaatagcgtctgtaccctgagcccccgggcctcgcgcagcccgccccacgaagcccgaatggcgtttctctggttcaggttctccggagccgtgcacaccaggatgagcaggaagggaggggccccgggaccactgcaagcttcctggttggggatcaagaggcggggcagggccaggggcggccccggtgaggcgggggctgggagcagggaggctagtgagaggctcagcagctcctcccccaaccccgaaggcccgaagagggtccagacgatcaccagcagcaaagcggcgagaaggaggcgccggaagagcctgagctgcatggtgcggcgtactccgaggggatccgtaagagcgaagggcggagactagctccccgggcctgggtcacggccggggacttaaccgaccacgcccgggatgcggaggtctgagcgcgcgaccgggaccagcgcaccctggggggcggggagaggcggtgcagctgcggaccgcggtcgaggcatgctgcgggggtggctaccttgtcgccgcggcctcgccgccagcaagctccgctccatggctggccgactgcggcactcacggcccctcccccgcctcgccccggcggccggtctgccgcccgcttccgcgttgcgcgctcccatccccgccggaagcggcgtcggagcagcgcggcagggcgcggaaacccgggcgggtggagtggcaccaaacggagtgagaccggtctgtccagccgctccccatcccaacccaccgacgtactccaccagggagaccacacccttcataaccaacgtccgcgtttttgcctttgttgcttcggtcacagcccgaaggattttcccttatgactagatgaccccttaaaagaaaacaaaaacaaaaacaaaaaaacccagagtgaccaagacctgcaaactcaccttaactgcaactggctaggctcagctaacccactccacaatgatgctgcacaccaaccccagggtgttggtctctaaactggtctgggtcagcccctcaaggctgaactgttttaccctcacatttctctttacagagagggacatcactagctacatatagggagactggggggtctgcagcatcaccactgctaaaactaatagcactgtgtgggcaactgagtagggcagctctaaatggaaaaaggacccagcactttaacattccctattagaatggacagaaaggacaggaagccataggtatataaactatttattaacagacaaggcctacagacttatttcttcttggacacacccacggtgcggccacggcggccagtggtcttggtgtgctggcctcggacacgaaggctgcaggtaaaaagagaagagtcacaggtcatgcacagcagaaacaaaaggttggggaaaaagaagagcgagtaggaggaatgctgagtcgaggtaggcagggagatgagaccccccactcacccccagaagtgacgcagccctctatgggcccgaatcttcttcagtcgctccaggtcttcacggagcttgttgtccagaccattggctaggacctggattcagaggagggggcaagggatgttttatcccctgacctcctatgcccaattctgttaggaccctccacccttcctctaatcctgccctcatttcagtacacacctggctgtattttccatcctttacatccttctgtctgttcaagaaccagtctgggatcttgtactggcgtggattctgcataatggtgatcacacgttccacctggcaggcagaccaaggtcagatctagatggacccctttctgaggctgaccccacccccagcccccttccttgtcctcacctcatcctcagtgagttctcccgccctcttggtgaggtcaatgtctgctttcctcaacaccacatgagcatatcttcggcccacaccctgaatgaagtgaggggtttcggaattagtgttgaatctgatttttaaattcctttatagcctcattcaaaaagctcacaaaggtaggatctgcaataatctattttgcaatcccctaggtcaccctttcctcacccacctttccagatataaaccgttcgacagaaggttaactttgggccggtcgcagtggctcacgcctgtaatcccagcactttgggaggcccaagtgggcagatgacattgagggcaggagttcaaaaccagcctggccaacatggtgaaaccctgtctctactaaaaatacaagaaaagttgctgagcatggtggcaggtgcctgtaatcccagctacttgggaggctgcagcagaatagcttgaacctaggaggtggaggttgcagcaagccaagatcacgcaaccacactctaacctgggcgacagtgagaccccgtctcaaaaaaagaaaaaagtaactttgttcaggggtatgactgaatcatgaacacagaatttagtattacagacaaccctttgaaagcaggcagtatcttttttttcccccattgctcagcatatgtagttgtcactaagtgccttctgattcttgcatttaggagaacaaggggcctgccactccaagctgatgcagtaaac

SEQ ID NO: 584844 - DNA, 4001 bp, Homo sapiens
ggatcaggcagcccagatgtttaccttgggctgcaaaaaagacgtaaccacagggcagaacagtttattttccagaaagggttttcttgcaaaaaaaaaaaaaaagtaatcttgagggtcagaaaagacttttgtgaggtgtgggaaagagaggaaggacctccatagaagtcagtgtttcttctaacaaccatttccgtgccagtgggccgcaatagtcaaatttctctctaggctatctccacctttctccctatatggtcctagactgagaatcacacctgtaggcactgaaaagcctcgagtaacacctagcctacccgtccccaccacccccacccctccaccgccacccgctacggtgcaggtccctccctgatctcctatcgcagccagcgcctgcaggtctaagctccatcctcaggtcgtcaggagcctggcccctggaaatcattcccgcgcctcacacctgtgctattctcttgacacaatctccacacagaaaagccccagggcagactcccgccccttaagccacagtgatcctctcacacacagcccctccacccccacggccagcggaggctgcggagtgccagcaaggagcggctccactcggtgccccgaatgcgcgcacggagaactgagaactcaaaagtgcacccggagtgcaaggggcgtgtgactgcagcccggccggcccggaggcccactcccgccctcgcccacccagcggggcaggctggcctttacctcctggaagagctccagactataggtgttgtcgtcgtcagcgaagaagagcacgccgggctgcgcgcgctggtgctggtgcctctggcgcagccaggcgaggcccgcgttgcgctgctcagtggcgcgcggcagcccgggccgcttgtagcgccgcggcgtgggcacgtgcaggtgagtgctgggcagcccggcccgcgccaggaagcggctcaccagctcgctgcgcgccgccgcgtcctccaccaggatccagtgcagctgcgccacctggcggaacgtgttggccaggcgggtcagctccgctttctgcaccgggcggctgtaggtgggcgtgatggcatagatggtgggcagctgcggctccggctgtggctgcggccgagactggttgcgcttttgggtcccgtgagccgggccgcccctgcggagcgggagtcgggcgcccccgcggcccaccgcgtagggagagaagtaggggcgcggggtgagcgggggcactggcctgcgcgtgtccacgtcgagcatgatgatgacaattaggatccagggcaggaggataaagaagcgggtgaaaagcgcggacttcatggtgcacgctccctggcctctcggacaccccagagaggggcgagccgagggaccccagtgcgcagcttggacagcggcggcgccagcacttagggagtggtgatgggtgcgctgtccatggggccgagggcgctgcagagacctggagccgcggggctcactacctgggcgtggaggagcggcaggttcgcgcaagctagagcgacaaggggtgcaggcgggcgggcaggggctgcccccgactccaggtgagctggcgggaagcgggactcggtccagccgcgcgccgccggtcccggagttgtgccgagtgcgggaaaggcgctgatccccaccgcgctctttctgaagagtggaagccgagaagcggcacccggtgcgcctcgccgctccagtccggcggtgctgcgggcacaagggctccagccgcgggcccccaggacgctctctgggacgccttcgagggcgggcggcggcgctgggggctttccttcctcacattcccgccggggtggcgaggagcgggtggagacgctgggggttgtgtcccggctgtgttcgcgcgccgcagcggaagcctgctctcagtcccttgctcttgtcttctcagaacctctccggatccagcagcaagatcccaaagcaaggaaagaaagaaaaagcgagggggcgggggcgctgcagaatccagcgtcctcccaagtcctcctgtgggaagacagcagcgctgctactggtggagaggggctgcgagagggaggcgcggagggaccccttggctctccgccgggtctggcgctaacggccccgcgagcaagctcgggaggcggccgctgcaccgcgggtggaggagcgggaggagcgtccccgcggggctgcacgacctcctggagggggtgatgctcgttcacctctcttcagctttgtgaaataccgcaaggtctttggagatgagccaggaaaatccattcacgtgcggaaatttgccgggctacgcgcgttgctgctgatgcctagggttcggagtgaaaggaggggagaaagcgaagggattcctcctcctgctcccagctgctgcgttgatgtgctggggtgtatcgaacagcggcaacaaaaagcgctttcactgcaaggcagacatcaataggagcccacggagatggaggggtgctgcacataggtgtttggcatgtgagacagtccataagaaagaatcaattcggagggctgctgcctgactgcagtttgatcatggcgggtgggggcgggtggaattcctaaaactccagccgagcatgtttaacttatttttcttcagtaatttggagtcacggtccctcccagttcttcgctgtcaccggaattactccgtttggctctcccaaggctcctgtcaagaaggcctaagaagtagaatggccttcattttcaggataaggaagctgaggttcagggtttaaaatgatttctctgaggtcagtggcaagtggcatatggaaatagaacgtgggtctcctgcgtgtgtctatagctagtggcgtcctcactgcatggcctgcagaaatcccacccaacacagccgggccggtttggccttcctacatataaagatggtgcgattgaaatcaaacagagtgtaccatgacgaatagaaccatgatagggtctggaagaccccaagtaaacagttggcacttagtttagacactttttgctgtctagctggcctactagctgagtgcctgaccttctgtaacttaccaggaagaagggctgtgcttcccaggcaggtcccagggaagtgcttgcaaagcagaaggaaagctccagactgttctgccctagcctatgataaataatttctgagcccatcttgtctgggttgtctgcctttctcgggcttgttcacaaataaatctctctccgactgtgcgttctggtgcaactgagagctctggggcgaatggctctccagcttttctgacagctcctcttctcccagtcctacccctgaaccccccacctgttaaaaggcattggctcatctgtgaatttccctaacttcctcttcagattctgaaacgtgagagtgaaatttcagactaacacccagccaccccaacaactccctagagctagccttctgtcccaacttccctgtgccatccacaactcatacattaaactctgcagattagtgcatcctaaacatagaaaacaacgaagccattagacctcttcccattctctcgaatagcctaatgtgcctctgaatataacacaaccttggaaatgtattctgcaccagcatcatgccaggatggggaagaggaaagaagtcaaggcctccctttaagaaaaggtttttcttaggaagcagtgcacccctctcccctaagttactgaagtctggttcatcctgttggaaattttaaatttggttaaaatgccttgtgtttgctggaataaaattcatgttgttactgaattgtactaaaaacatcactaacctttgttagtggggaacttttggttggtccaactatgccataaaacctatttgctattacatcctctccaggaaccagggctattcagagatgaaacactgtgtgtgtgtgtgtgtgtgtgtgtgtgtgtgtgtgtctgtgtgtgtg

SEQ ID NO: 584845 - DNA, 4001 bp, Homo sapiens
gacaaaagcaaaatatctcattaggcatcatctccgccaaggttcccactaggcaggaaaggatttttatctaaagtaattaccctttttagttaaatacactcaacagatgaaatttacagagagtgagagactgcagcactagacagcgaaggtgaaaaccaggaacgccgcgtctcgccgcccgcgggcccgccgggagactgcgggtccgtctcgcgggtggggcgccccggtccctctcgtttcctggaggccacaggtcacggcgacggcggtgaccgggagagcaggctgcgaggcgcgcctcatcgggccacagacaaaccaccccggcagcggccgcgccggaacttccctcaagttaccaaactcgcctacgcgcgggagagtgctggggatgccccatgcgcccgcgaccccagaagccaggagtgtgccaccccttcacacactcactcccggccctgcacgcttcccctcacggtccgagttcctgcaaatgcttggccagaccgaggtcgccgagatgctcgctccagtctctcccctcgtgggcacctagggtagcccgtgagcgccgcccgccgccgtctccagcggcgccgggctcccgaacacccgccgggtgagcgaagcacagcggggccacggagcgcctcgacgcggggacggggagggcagtgtccccttcataaaccagtctcctgggtgaagcttctggggcttggagactggagtgtagggtgtgtgtgtgtgtgtgtgtgtgtgtgtgttgcaccttgacttcatggaggatctgtgggagaggaggtgcaaggtttccctctcagaagcctggcgcccttaggtcttagctacgcgggacgctttccgacaacccgatctttcgctaggagagattcgatccaggtctgcgccgcgaggcccccagctcgcctcttcctgcgaccctaaacttgggctttgattccccgccggtcgcggtggtccgggccacccggcggcggctgacagctgagcgcaaaggcgccgcggccaaggtcctcgcggagcagcccgggatgcgcacgccgagggttaaggaggaggccgcccggcctggagctgggatcgcaggctgggggccgggacacccgggcctcgccgggccgggggcagggccgcgggtctgacagctgctgcggctcgcgcggacgcgcgcctcctgcagcccgccctccccatgcctgacttattactctctgctcctcctccctctgctgttccaaaacacccttcgacgccagcaaaatacaatgcgcctcggccgccgtaaacagccgggagggagagcacacattcggcgcggcgcggccgccggctcggctcccacccccttcccgttcctagaaaatgccataaaagcgggcagggcgcggggagggcggctgcgcgcccggcggccggggctcccttcccgcgccgtttccccacgcctccccgcccgccccgcgcgcccgctccccccgcaaacttgccccgccaccccgcccagcggcggggcccggggcccggggcccgggactcacctcgccggagaactttgcgtccttttccgcctcctcttccccgcgtcttcccggctcgcagccccctcccggcagccggcgaggtgggcagttcgtgggtcaccgaaagctcgcggaggggacgcgcatcacatggcagctcgttcccagccccccgagtgcgccgggaagggggaggggaaggggcgaggggaggccggggggaaagcgagagcggggcggcggcgggagtgggcaggcggggtggcgagggcggcggccgctcacgttagcgctgtgcgaccgcagcccgggcgtgcacggccgctgctgccgctgctgctgctgctgctgctgctgaggcggcggcggctcggcgctgtttgctccgcgccgcgcggcttgcgctctccccggaacgcccacactctcaatcgctacattgttgacattcggcgctgacgtcacccgctccccattcacaataactttacgggagccgggcagcgcacctccccggccgctggggcgcggtacgcccggcgactagcgtaagccgctccgcgaatggcgctccgggggctggggcggggggcgggggacgggggcgggcgcgcgcgctccgctggctcgcgggagggggcgcgcctcatgccgccgcagcagcagatctccccgctttgtgcggccgcgcggcccggagagccccctcctcccggcccggctgaccgccccgctcggcctggccttcccggccacgaaagacgagggttgggggcatagcagggtgagagtagtggtgagggctggtgtggcacgtggggagggggccagagccctaggtgctgcacctggggaaggagagcagacgtcgggaccggggatcccagggttagctagcgttttcccggaagggcaagaaaagatgctccactggcccccacaaagctgaccggactcccttttgggtggggaccgggcgagtaaaagcagccttttgaatgttgacttctcaatccttttcaggaggccctccgcctgccctactgagcgaacctttaagcccccaagccagtgtttttggaaagagagtggtcaatttcaggaggacattaaaagccaacctcccgggcttcagccccagctcctactgccttccagccactctcccctgcctttcctttctgcggctcttaggatgttgttgctgcccttaaaggccgtcgtgtgagtgccctgtcagaagaaagcttggtggtggttaggattttacagaaggtaattaggatttaggctgaatgtacatttgcaataaaataaggttgtgttagtgttgtgctggtgcctgcaactttacctcttgccaaggccagaaaattctgccacgtttccctaaacacctataacttggccctcttgtgtacaggcagtattccatattattacacgtggtgctgatttttaatgaatattataaaagtttggctcgctctactgagagaaggatcataaatcccccctgtaaaacgggcactggcgtatgctgaggaagcagtgaagcgtcctgggagtcttgtgatatcatctaaagtgttgctctgaactaccttcatttgagggcagagttttgaaaggccccatttggaatgtctgtgtggaaagctaagtgatggctgaaagcaagctgaaggtgctgagctaatttttctaacagcactgcagagtccctgcgtggaggtctggcacgggactgtgagattttctctgctaaccgacccggccttcagataaggaaaagtcctagagctaggagtagccctcagtctcctgacctctggtctggtgccccctaggacaaaacaccctgcttctgaggtccctgcctgacccctggcaaggacagagtactaattcctggtctgccctggccaggccgtttcttatagttttatggatggttctgtttctcattcctcattcttgtaagtatgtgtttgtgagataactttacgcattttagtagcagcaataaatgtttttctcacaacaagggatgcttgagagcatccgtatgagagtggtgtagattcatttattttcaagcaagcggtggctgcccagctgtgagtggagttgggcacatcagcgtaggggtggttgaggagggaaatgaggctgccagctgatctcccacctccattctggattctacaagctgatcttgtcagatggatacaacaaaggctaacaggtcatttcagttagtctgcttgcccaaagactcagactggagctttttcactttgagattttcaagcatgaggtgggacattaaatagagatgaaaaaacctaaaacacctgtgataggttgcatcatccagtcattcaaggaggctgaattaggagtagttagcctctcaggttacatccagctctgcaatcatgcacc

SEQ ID NO: 584846 - DNA, 4001 bp, Homo sapiens
aaacttttctttctggctaagggagaggagaatgaagtggttgagaacatgccctcaacgttctgaagacatggagagatgtgtgttacttgttatgtggctccctaaaaagaaacattaccagttagagggacttcaagtaactgaggccaccaatttctactttcgctctactttttctgggagtggaacggtcaggtttgccagtattgtgaaaatccatgaggaagcattacttctctcttccacttgcctcattctgagtggaaccccagaacctggtgtagggcttaataatccaagaaattattttgagtggagaatctctcactctctggctcttttctcccaatagtaacaataataatgcctcacttgttaagagataccgtggttattgaagtattttctcagcaaacagatacttcatgtttgggtgtattaatgtaggaagataaagacacacatgcagtgtttcctaaactttttggctcacatgcttctttgctcatgcacaacctagacaaaactatgtaaccaactcctgtgtacagtttcacggaattgcaggtgcctaacaagattttcttttaactacacctgctcacaaaatttacacagtaacttgagacaaacgttcacaggaagtagataaaacttttcaatacaccgttaaagtctttccaaaaatctattaacattaaattgtttagaaattctatacaagtctactactgtattaccaaataaattcttaagcaagaaaaggggaaaactatcttttcatgctttcaggccagtaactagcacttagtcttctatgtagggaggtgcccaataaataccgagagacgaacggaaccgctgaatcccgtccgcgaggttaggggagaaacagaagcggcaacgtctctgctgcacgaagcacccggtaacttactgcctacccctcactcctgtctaatctttgctctcaatggattgctgggttggttttgttttattcatttttgttctgaagcaaggaaacttaacttcacgtggagggccactgtaaactgctgcctcccttaaaaaatgcataacgagaagagtaagttaaaacgtttggggccacacagaaggttctagaagttctgcagacccaagctgccacagtccttaatcgcatggaatctcactgtaacttttatctcctctgatttttttccgctccctaacacctaggtaaattaatcaaagtgtggccaccgataacgccctcacaggtttagcttaaatcgaatgcgttttctctcggactaggggagataatccaagaaacaaacaaaactacaccacgtccatccacaacaaatctcaacaagcaacttcggttgccgcagcctcactgtgccccaggccccggcccgccacacgcggcctccgtccgctaaccgcccgcgaaccgcccgcgcggcgagcagaacgcccgagaccgcccgcccggagctcacctgagctccagctggtccaggctctccagcaggcggctggagcggtcagccatggaggaggagcggcagaagcgcccctcgttggctttagcgttgatcttcgcctgagccatctaagcctccgacgcggggtagccaagaggtcaccggcccctccggcggcagcgagtggagcgctccttgggctgcaggcgtcgccgtcaccacgcgggcgcccgccctccctctgacgcccgcgggggcaacccgggaggactcgccgacaccgcggctgcagcgtagccaaagaagggcaggcgcggcgcccgcggggctcggggacgccgggcctgggagggggctgcagcggctggagttagaggttcgcgagccacacgggctcgaggatgggccgacaggggctcgggcctggggagcgcaagtctctgaggcacgggaggggcggacgcagagaccgagcgcctaatgtggctagcggatcgtctgctccccggacccaggaactacccgaagcccgcgcggacccacagaccacccccagctccgccccgcgaggccccgcctcttcatgcaacctaaaagtaaccaactccccccacgcgaaggttcctatcggtcgacgggctgtgggtgtattgctcagtgacggcttcgtttagtttctcccagcacccataattcaaagcaagaacaacgacattatggggagaaaacgtccttttgtgaaacagaaggcagtaagtacagctcgtaggcagcccacactcacctgaccttcctgttaccactttatactgagatgagagtaatgaaagcccggacaacactgaagctatgaagtaaaaaagaaaaagctactccatctttccctgtctagctagatgtgggaagcaaagtgaatttacttcatttttaccattctaattttcttttgtttttgagatggggtctaactgtcgcccacgttggagtgtagtggcgcgatcacgacttactgcagcctcgacctcccgggttcaagcggtcctcccacctcagcctcccaaagtgctgggattacagatgtgaaccaccacgcctggcttaatgaaggggttttaaatttttgctattaaaattattcctgttgagcgagccgagatctcgccactgcactccagcctgggcgatagagcgagaccttgtctcaaaaaaataaataaataaataaatattctgagtgaaataattggcattaaaaagtcctcaacttttaaaaatcctgttaacaaaaaagatgcagtaggcctctaggtcaggcaccagctgtcggtaaaagacggaatagagctgaggatacaaagattagtctacttaaaaagttaggctttagtcccctctcctgatagctctatgcctctcattgcaaggatgacaatgtacagggcacagaaaatgatagataataatagtttaaagctgagccaccacctttaatcagagatcaaagccatttaaatacttgaacagagttgaagcccttaaggctggatcccaattccctctgaactcattttaaatcctaattaactcttggggtaggggattatttgaccttattaaaaataactttatcatgacacaaacgaaaacaaaacacattttgtgagtggtttgaaagtctatcaagtgactttagaatcatcctgaactctttttctctcttatcctagatccacaccattagtaaaccccatcaattttgccttcagaatatatccagattcttcccaattctaccgccaccattctggttcaagctacctggtgagtttgcacctggaatactacaataccttcctctctggtctccctgcttctactcttgcctctcatgtacatgttatctcagtgcagcaactacagcaatcctaaataaggcagatcataccatttattctcagaaaccttcactggctccttacctcaaagtaaaagcccaggtcattagaaaaacctcagtaagttcatttcctattactctcctagctcatcctgtcagccatactagtcttcttgcttttccttgaatatactaagctcctgtctggaccttaacctcctccacctggaactctcttcccgatatgtattttcatcctcattccctcaccttcttcaggtctttgctcaagtttacctatcagtgagatcttttctgacaaccctattaaaaatagcaagcctccccccaactccctgtccctgcactatttattcccttcccttctttattttccgtcgttacacgtatcaccatcagatatgcagttttattgccttgcttactaacattgtacaatcccctcctctccaccaatatgtgctccacagaggggtaagggctttgttttgcttactggtatattccaagtgcttagaacagttgctggcacatggtgggtactcaatattttgtgattgaatgaattaatgagtgaatgatgtaatgaaaagataagcatc

SEQ ID NO: 584847 - DNA, 4001 bp, Homo sapiens
gctcacacctgtaatcccagcactttgggaggccgaggcaggtggatcacctgaggtcaggagttcaagaccagcctggccaacacggtaaaaccctgtctctactaaaaatacaaaaattagccgggcgtggtagtaggcgtcgtctgtaatcccagatactcaggaggctgaggcaggaaaattgcttgaacccaggaggcagaggttgcagtgagctgagattgcgccccagccctccatcctgggcaacaagagcaaaactccatctcaaaaaaaaaaaaaaaagcaaaaagagaaatatttttcctaactacaaactgactcttgggaagtaccagagtatttatatacatctaatcacaagtctatatatggctttcttatatccaggtaatatcacattttagaaaaccatggaccaccccacatgcaatttgtctccaagtattacaggagtaaagacacagatagctatgtccaaggctttaagctcaagagactcaagctatgccataaaaattagtaatttcactcaacagtctatcaaggacctatctccattatgggttctgatttctaccctttaagaacacagcatagacctgaccaatgtctatcagtaagacacacttgcttagggttcctgtgctgtttcccttcccaaaggccagagccatgcctgtccctttgggttggggtccacccatgatgatgacacacagattcttccttcctctgtatttccctctgcattaagttctatccatgtggaggacagaacaaaatcagcctcactcacaaaacatcagaaaacgttctactggaatacgaacaaagggatcaataaaaataaaatctgaggccaggtgcggtggctcatgcctgtaataccagcactttgggaggccgaggagggcacatcacctgaggtaaggagttcgagaccagcctgaccaacatggtgaaaccccgtctctactaaaaatacaaaaatcagctgggtatagtggcacacgcctataatcccagctactcaggaggctgagataggaaaatcgcttgaacccaagaggtggaagtttcagtgagtcgagatcgcgccactgcactccagcctggaagacagggcgtgactccatctcaaaaaaaagaaaaaaaaagaaaatctggtgaccagaaaatcaagctcatctctcaggctaaggggcctaaacgaggaaaagctaaaggtgtcttccagaactagtgaggtgtctcacctgggcccccacaataaaggtacgagtttgagagtccaaggtcttcaccaacacctccaagctgtcaggctcctccacagcggtactggtactatcattaggctccatggccgacaggtctctaaagaagaacgaaggaaggaaggcccgctgttgcccagaccagagtgtacccgaaagactccctagcattaatccctgccccaatacctaaaaagtttctcctgcacacacacacattcacacctgtccccatcccccttctgattccggggcacagggagagaaacacaaagggcaggagatcgacggcttagggagctggaggacgagaggtgggaggggctccacgacgccaatcacaataagcagggagccagtcagattaggaaggaagcacgagaccagagactagtgtcatcaccggtcacggcaggacaagcgccccagaggtcggaaaatcctgggacaacgcgaaagcggtggtcgccccacactctgcggagaaagtggtttcgcgcacgcgcgccacgcccatcgaaccctcctaactcactatagacccgaaacggcactcacggggcgacagacctgctagctgactgcccgcgtctactgccttcccacggtgttccagcagaacggcacaactaacccacagccaaacacacacacacacacacacacacacacacacacacacacccaccaccccgcggctccgcccccgacttccccacggaccgtcacttccggtctcccccaaacctgccaccgacggccacttccgtttccccgatagtatttggggatctcgaagcgatacttccggctccccccaggtccccaagctttacttttgtggggcacgacgagaaagtccgcagccccaaacagtgagtttctgagggcgagtcgggccggggccggcctaggtgggagggagccgagcaccccgaggagccgccaccgctgtcgcccgggggaccgtactacgcctgcgtgcgtcgcactacggatgcgtggacacttaagcatcgccccaccccctcccccctctggcggcgttcacgtctgtgcgcgcgcttgagcgctagaagattgaggtggctaccgtaaatgcctgaaaaacagtcaccagctgggactctaccactgcctcgagaggggctatggacggtcgtatggaccttggactttggagatgggggattatgccacattcatctatgtttaaatcttggcaggctgataatttcaggcggcactgtcctagccagctaaaactcttctccaccctattgccctcgctgcgccctttcttctgtgcctccggaagttactctttcagtaggcgtttgggggcggcactggtcaattttgttctcggttgcttggttgggctagatttcggttctgccgggtgggcgttttaagggctgtgggcgtcacattcgtcggtgtgtggccaaggggacatgacacgttttaggaaaagtaaacgtgctactaagttgcacgacttgtcaagaaaagaggcgcttccgagtttgagaattgggagcaaatggagtccgagtggacagaaagacaagaccctgaccgtggggaatttaaaggccggccagcgtgcttccgaaggccgggggtggaggcattaccgcctctccgtgccctcttctcttaacctgccctgggccaagggcctcggccccgcgaaactgcgagtcctccagaaagacacatcgctgttggggtgtccaacctttctgggattcgtagtttatacccaggtcctggttatattttagttaagagttctaataagcagctgtttaatgagcacttgtgccagcccatatactacgggttttgtgtattattttaaaaagccttttaacgagcttttaacattttttaagtgagtacacttagacgaacataagtgtcagaattgacaaatccaggcctacaggactccagatcgagcacttgtactttactgccccaataaaaagctgttaacattttagcttatttttttgagagagggtctcgctttgtcgcccaggctggagtgcagtggcgcaatcacaactcactgtagcctctgcctcccgagcccaaccgatcttcccacctcagcctccctagtagggaccacagatgcacaccaccacacctggctaattttatttttatagagatggggtcttgctatgttgcccagcctggtcttgcagacttggcctcccaaagtgctgggattataggtgtgagctactgtgcctaaccacattttagctttttattacaaaaattttcggccgggcgcagtgactcacacttgggaggatgaggcgggtggatcacgaggtcaggagttcaagaccagcctggccaaaatggtgaaaccccatctctactaaaaatacaaaaattagcctggcgtggtggcgggcgcctgtaatcccagctacttgggaggctgaggcagagaattgctttgaacccgggaggtggagattgcagtgagccaagatcgcgccactgcactccagcttgggcaacagaacgagactcccatctcaaaaaaaaaaaaaaaaaaattcaaacattacaccaaaatagaacagtattaataaactctaatatactggtcacccaaattttgtttgttttttaactaaatcgcaagcctcagccctcggcaaattttttgtggcagtccatgggata

SEQ ID NO: 584848 - DNA, 4001 bp, Homo sapiens
tcctaactacaaactgactcttgggaagtaccagagtatttatatacatctaatcacaagtctatatatggctttcttatatccaggtaatatcacattttagaaaaccatggaccaccccacatgcaatttgtctccaagtattacaggagtaaagacacagatagctatgtccaaggctttaagctcaagagactcaagctatgccataaaaattagtaatttcactcaacagtctatcaaggacctatctccattatgggttctgatttctaccctttaagaacacagcatagacctgaccaatgtctatcagtaagacacacttgcttagggttcctgtgctgtttcccttcccaaaggccagagccatgcctgtccctttgggttggggtccacccatgatgatgacacacagattcttccttcctctgtatttccctctgcattaagttctatccatgtggaggacagaacaaaatcagcctcactcacaaaacatcagaaaacgttctactggaatacgaacaaagggatcaataaaaataaaatctgaggccaggtgcggtggctcatgcctgtaataccagcactttgggaggccgaggagggcacatcacctgaggtaaggagttcgagaccagcctgaccaacatggtgaaaccccgtctctactaaaaatacaaaaatcagctgggtatagtggcacacgcctataatcccagctactcaggaggctgagataggaaaatcgcttgaacccaagaggtggaagtttcagtgagtcgagatcgcgccactgcactccagcctggaagacagggcgtgactccatctcaaaaaaaagaaaaaaaaagaaaatctggtgaccagaaaatcaagctcatctctcaggctaaggggcctaaacgaggaaaagctaaaggtgtcttccagaactagtgaggtgtctcacctgggcccccacaataaaggtacgagtttgagagtccaaggtcttcaccaacacctccaagctgtcaggctcctccacagcggtactggtactatcattaggctccatggccgacaggtctctaaagaagaacgaaggaaggaaggcccgctgttgcccagaccagagtgtacccgaaagactccctagcattaatccctgccccaatacctaaaaagtttctcctgcacacacacacattcacacctgtccccatcccccttctgattccggggcacagggagagaaacacaaagggcaggagatcgacggcttagggagctggaggacgagaggtgggaggggctccacgacgccaatcacaataagcagggagccagtcagattaggaaggaagcacgagaccagagactagtgtcatcaccggtcacggcaggacaagcgccccagaggtcggaaaatcctgggacaacgcgaaagcggtggtcgccccacactctgcggagaaagtggtttcgcgcacgcgcgccacgcccatcgaaccctcctaactcactatagacccgaaacggcactcacggggcgacagacctgctagctgactgcccgcgtctactgccttcccacggtgttccagcagaacggcacaactaacccacagccaaacacacacacacacacacacacacacacacacacacacacccaccaccccgcggctccgcccccgacttccccacggaccgtcacttccggtctcccccaaacctgccaccgacggccacttccgtttccccgatagtatttggggatctcgaagcgatacttccggctccccccaggtccccaagctttacttttgtggggcacgacgagaaagtccgcagccccaaacagtgagtttctgagggcgagtcgggccggggccggcctaggtgggagggagccgagcaccccgaggagccgccaccgctgtcgcccgggggaccgtactacgcctgcgtgcgtcgcactacggatgcgtggacacttaagcatcgccccaccccctcccccctctggcggcgttcacgtctgtgcgcgcgcttgagcgctagaagattgaggtggctaccgtaaatgcctgaaaaacagtcaccagctgggactctaccactgcctcgagaggggctatggacggtcgtatggaccttggactttggagatgggggattatgccacattcatctatgtttaaatcttggcaggctgataatttcaggcggcactgtcctagccagctaaaactcttctccaccctattgccctcgctgcgccctttcttctgtgcctccggaagttactctttcagtaggcgtttgggggcggcactggtcaattttgttctcggttgcttggttgggctagatttcggttctgccgggtgggcgttttaagggctgtgggcgtcacattcgtcggtgtgtggccaaggggacatgacacgttttaggaaaagtaaacgtgctactaagttgcacgacttgtcaagaaaagaggcgcttccgagtttgagaattgggagcaaatggagtccgagtggacagaaagacaagaccctgaccgtggggaatttaaaggccggccagcgtgcttccgaaggccgggggtggaggcattaccgcctctccgtgccctcttctcttaacctgccctgggccaagggcctcggccccgcgaaactgcgagtcctccagaaagacacatcgctgttggggtgtccaacctttctgggattcgtagtttatacccaggtcctggttatattttagttaagagttctaataagcagctgtttaatgagcacttgtgccagcccatatactacgggttttgtgtattattttaaaaagccttttaacgagcttttaacattttttaagtgagtacacttagacgaacataagtgtcagaattgacaaatccaggcctacaggactccagatcgagcacttgtactttactgccccaataaaaagctgttaacattttagcttatttttttgagagagggtctcgctttgtcgcccaggctggagtgcagtggcgcaatcacaactcactgtagcctctgcctcccgagcccaaccgatcttcccacctcagcctccctagtagggaccacagatgcacaccaccacacctggctaattttatttttatagagatggggtcttgctatgttgcccagcctggtcttgcagacttggcctcccaaagtgctgggattataggtgtgagctactgtgcctaaccacattttagctttttattacaaaaattttcggccgggcgcagtgactcacacttgggaggatgaggcgggtggatcacgaggtcaggagttcaagaccagcctggccaaaatggtgaaaccccatctctactaaaaatacaaaaattagcctggcgtggtggcgggcgcctgtaatcccagctacttgggaggctgaggcagagaattgctttgaacccgggaggtggagattgcagtgagccaagatcgcgccactgcactccagcttgggcaacagaacgagactcccatctcaaaaaaaaaaaaaaaaaaattcaaacattacaccaaaatagaacagtattaataaactctaatatactggtcacccaaattttgtttgttttttaactaaatcgcaagcctcagccctcggcaaattttttgtggcagtccatgggatataaatttatcaagctaggtgtggtggctcatgcctgtaatcccaacactttaggaggctaaggtgggccgactgcttgagctcaggagtttaataccagcctggggcaacatggtgaaactccgtgtctacaaaaaattagctaggcgtgatggcgtgcacctatacctcctactcgggaatcatctgagccggggaagtcaaagtcatgcctgggcgacagagtgagaccctgtcttaaaaataaataagtaaataaataatctatcgaggaagatccatctctcacagcattaactgctccagtc

SEQ ID NO: 584849 - DNA, 4001 bp, Homo sapiens
ctgtaatttaaggcttacacatggtaataaaatacattaacatttttgttcctagcagatttcaattattaaattgctccctttccaacaacaactccaaagctcctcttttcttttcttttcttttttaattttaaccctggctttggataataaagtagtccttggttatatttacctctgtaagttgttatccaaaaataacttgaatatttttcagctttaacctttaagaagttatttcttagaataaatgacactgcttttgtttgtttgtttagcctttgagctgataaaagtgatgccaagttaattttaaaagtctttaggctgcagtctcttccactgttctgtaaacagagacagacatacagacatatagatagttaagagttttcatgcctttgcctgggtcttctctgaatcaaaggataaaaccctcttccttcccattgcataacacacaccaacgcatgcacaccaaatccagtgaccgaagtccctgaagatagatctgcattttccagattataattcaaattctatgtcttgatataggcaaacacagccccaactctaaatctctatatagcagcagtttaaaataacatcagaactgctgggaccatcaaaacagtgttctctgtttcaagcaaatagctcaatgaataatgcattttcttcatgagaaaataaagccaatgagcatttaaaggttaaaaaaaaacagagaaagttgtaagaaattctggaaataatttcctttttttttttttttttttggtgttgcactttgcaggcaatgcaggtctgcgcagtgttcttcaggatagagtgtaggcgttgagagccaatgtgacaataagtgtctaaattaggaattccatccatgaaaggggacttcattttataatcaggaactcaaaaagaggtcgtatgtcttttcctaatgaaattggtacttttgctttcatttatttgacagtgcatgtctgcaatgccgtgctcatcaatgatcagagagtgaggaaatagctctgaattcactttaatgcctgctcaagagagcgcactcaatataatgctctttatttttaatcagtctggagtacacagtcttattttgttctaaataataaaaaataaatcattaccctcacccccctttggactgcagggcccgttcaaaaagccgtgtttccctcttaaagaaggggtgggggcgggggcaaaggctggccacggaggtgtcaaggatgttttatttatttatttatttatttatttatttatttatctcttgctgagaagcaaaccagcattgagtttagctattctcaaaactgattttctgggtgacactttagtttagtcgaacatagacggcgccatcactccacagatttttccccccaatagaagacccactgccttctcttaacttccttttaacctaaaattttcccctcataaaattaccccaatcacacaaaactgccagattttctaggtctctccgcttattccttctgacccagcacatctcttgaaaaccagacttctctaacttttcaactgcggcgtttaagtaaatgcagacagtcggatctgctcacagcctccccatccgccagcaacagcctttcctttcattttcctcccttctcaaacattaagcccaaagctccacggtggcgacccccggcagagaaaaggtgacccctggacccccttccttaccttccactccgaaagctcagggaggctcttgctctaagacaccagcacaggcacgcgtcccagcaacagtgacggagagactccccttcggtcccaatcaccgttgcccattttccccggctcagcttccaaaatcaggatttatttttaaaaatgcatacatacgaaaagcaaaaggtggggggtgggaaccaaaggggggtcgatgagagagaggaaaaaaaagccagcaggagcccagaaccttgcgccgtatccaactgaatccaacctccaaaccgaggggggctaaagggagggagaagcccccccaagggagactctaaggaaccccccaaaatgtaagtggcttaatagcaaagatttgtttcataaaagctacccccaacaaaccaagaagcaaagaaagcgctgagacgagaagtgaccggcggcggcggcggctgctatggcagatttgttggggcggtgggtttattacaggagtattcgtggtcggatcggaaggctcaagcttatgctttttcctctttccgctttcctccctcctcctcctcccccctgcaggtactgatggacggacggcgactaaggagagcggggaaaaaaatccttggctggtgatgtcggaaagctgtttgaatgcccagcgaggagggaggcgcgagagggagcgagatagtaaagctctgtctcgggtgtgcgcgccggcgcgcagtgctcgctctcccttgggcgcgcgcgcggggggtgcgcgtgtcccgggagcgcgtccgcgcggcggcctcccgcgtgctcgtgtgcgcgcgcgtcccgggtgccgcgcgcccttcttatgcacagctgcggtgcgccccgccgcccgccagaggctcggctcgcgcggcgcggccgctgcgacttcctggagttctgcctgccgggggcgcgggcgggtgtgtgagagagaaggcgaagggagccgcggggtgggagaggagggagtcccggcgggagggcgggggagaggctggcgggaggggggctccacggagctccagccagggccgcggttcgcctgcacgtcacggctactcaaacccaagcacgtcccgaaagcggtattttctgcgtctgggaggtttttgcatcctcagttcccaccgctggggctggcggcgaccaactgtaagagaaactcactgggaggcgaggcaggggggtgcggaggatgggaaggcgactctgaagggtgggaagtgaatgctggacttgatcgtctttctctttctttcagcgcagacctgtcgcagccagagagctgtcatttcagtaccgggattcagaattgatccagtccgcagcggagggggcacatcccagctaccgagctgctgagtgtctctggctggaacaatagtatttttttctctgcgaggctgcaattaacatcttatttgttctggctccatacaggctttgtcaggatcgcggtgcggcgaccgacgttgggctcttgcattgctttgtgcttggcaatggaatcatggtttcggggtctaaacttttgtttcgttttgtagtcttaatgtatctgattctttttcaagtttccctagtaacaggtttggggacggggtgggaagaagcgagaaaaggggtgaagagaaaaaaccagattatatagaaaggaaaaagggaaaagggatgtttccccaccttttaatctaactatctatctgtctgtctatctatcatcatagatagtcattttgcctcctggacagttggctgacgaagtgtctgataaaccagcttcagatacatgctacaaaaggtcattcgcctcctgattatgtttctacttgtaaacgcagttggtggtttgcaaaacaagtgctaaaatagtgcagtgatgtggtgggaggaaaccataatgggtaattcatataaagtgctggaatcttcgtaagggtgagtttctcgagcggcaggtgaagttgaataaagcaattttccatcatttgttcccctcactcttgcatttttttcctccgcttgtttctctcccctggggcgattatggatagccaagaacaccattttaaaagagattgatagtgaaaacaggaagtttatggtctgttatccactggagttgtttgaaatattaaaattggtcctttacttcttaatgcatattaatagagtgaccctcttcaaggctttcccgtcttaaacgaatgcctgggataaacactgtaaggggaaacagttaataa

SEQ ID NO: 584850 - DNA, 4001 bp, Homo sapiens
ggtgaacactggaaactcacatgaacccagcagggtgagcgccatcatacccactttacaggcaggaaaagtgaggcacaaagagttgagtgcccgaggtcacatcgttagtcacggaaagtcaggttgtttgtctgaatctccgtgagtccatgtactcaacacgcatgcaagatttcttttccagtttgtggacctcagagtgtgttctttctcagggcaactttccctatttacctcctgtctgtgccttccccactgctgccttgcagtgaccggagggagccctcaggatcagggccttctttgaagccccataacctgcctcgtactcccaccacacacctggtcttctgtccccggccccaattttcctctttgcctggtcctgaccgcagccccaacctgctgtgacccctcatcagggcgagtgtttcctggatgtcagctgtttcactttcagtttgcacccctcccagagccccatttccccaggcagcctccagccctcagaaggagagcgccctcctcctatcccagagggagggggtgtgcagccccaccctgggccaagcacacagccccacccccaccgcccagggcctggggaccttcgcccaccctccttccgctaggcctgggagtgttttcgaaagtgccccaagagctctcaagaaggggtggaggagggctggaccacctgtgccctcacccagctccccactcctcctcgatctgccggacagggacagggtgaaggcagaccttcctctcctccacctctaggggcaaggccttgttaaaacagaactttgcagccgggcatagtggcccacgaggtcagaagttcaagaccagcttggccaacataatgaaaccccatctctactaaaaatacaaaaattagctgggcatggtggcgtgcgcctgtagtcccagctactcgggaggctgaggcaggagaatcgcttgaaccttggaggcggaggttgcggtcagccgagattgcgccactgcactccagcctgggcaacagagcgagactccatttcaaaaaacaaaaaaaaagagttttgcttgcctcccaccccccgtagctccttacataagatggccttccttcttccccagtctccaggacccggcacccccaggacagtagggctggaggatgctgactgcacctccaactccctctaccaacaccccaggcttccgaggggagcaggtagagcctcagaacacccaccaaggccagcaacctatgctgactcaggcctagctctgcctcccccatccaagtggcctaaattcccggtgaggggagccacccccgacttcctgggcttgctgggccccgatgaatgttgcccagggatacatgcctggccaggccctggacccagtctagggatgttgggcagcagcaagcgctgagaaagttctctctctgcccttgaccttggctctgacctccactcccatctcccagactgttaaaggacccagttcttacagttctccggcatccagggctgggccaagaggggaagctgtgaggggcagccagaggcaggcatggcaggatcaggtccccagccggggcggcagacctgcccagggaagccttgagcttccccttccccacccggctcccggcaggctccctgccccaccctggggctggggctgctgagatctgggaggatggacaagacccttccagcttacctgccgggatcctggcccaacccgggtggctcagcagggtggagatggaggtcccgaggggctggcggctgctgctcccaggggctgagtgggagcccagtttccaggaatgggcgtcagtgcattcccggcatctggatgtagcctttacttgtccctgtgcagcccgagggacccgcgagactccagtgatcatagaggtgccagcggcacccggctccaatcagctccctctagaggaagttgctctgtggccaccggatgcagacgcacaggccgacagcctgtagggtgatctgggtgggccaggcccaggagcatgtcccgcccactttccccaccccacctcccaggcaggcagggcggctgtcagtggcccactgcttttcccatccctgattctcaatccttgtctttgatcttctcccccacctctacatcaatcaataccaataaaaaacccagggtgagaagtttcttaagcactgctgcatgcctggcactttagcaactatttgtctcattggatcttctcagcaactcttgtaagtgagtgctgttgacaatacccattcagatgaacagaggctcagctgggttaatcatcagttctgggccaggcgcggtggctcacgcctataatcccagcaccttgggaggctgaggcaggcagatcacgaggtcaagagatcgagaccattctggctaacatggtgaaaccccgtctctactaaaaatacaaaaaattagctgggtgtggtggcgggcgcctgtaatcccagctagttggaaggctgaggcaggagaatcccttgaacctgggaggtggaggttgcagtaaaccaggattgcgccattgcactccagccctggtgacagtgcaagactccatctcaaaaaaaataaatagtaataatcagttctgtagtcgcattggggaatactaatactagattgagattcaacctgcaatttagacctgtgcaccatgcaccttggtggtctctggatgtttgaaatcctgaaggtgatagtcaagtaaacggagattaaaactcaatagaggctgggcccagtggctcacgcctgtaatcccaacactttggaaggctgaggtgggaggattgcttgagcccaggagttcaagaccagcctgggcaacaaagtgagaccatgtctctacaaaaaaaaattagaaattagctgggtatggtagtgcacacctgtgcatttggtggtcccagctacctaggaggctgaggcaggaggatcacctgagcacaggaagtcgaggccacagtgagccatgtttgcaccactgcattccgccctgggcaacagagcaagaccttgtctcaacaacaacaaaaaaggcagccagctgcggtgtgtcacgcctagaatcccatcccagccatttgggaggccaaggcaagaggatcgcttgaggccaggtgcaggagttccaggccagcctgggcaacagcaataccctgcttataccaaaaaaaaaaaaaaaaaaaaaaaaaattagcaaggcatggtgttgtatgcctgtggtcttagctactggggaggctgaggtgggaggattgcttgagcccaggaggtcgaggctgcagtaagctatgattgcaccagggcaacagagggagagtctgtctctagaaaaaaaaaaaaaaaaaaaaaaaaggccgggcacggtggctcacgcctgtaatcccatcccagcactttgggagcccgaggcaggcagatcacctgaggtcaggagttcaagaccagcttgcctaacatggcgaaaccccgtctcttttaaaaatacacaaaagggaggccaaggcaggtggatcacctgaggtcaggagattgagaccatcctggctaacatggtgaaaccccgtctctactaaaaatacaaaaaaattagccgggcatggtggcaggcgcctgtagtcccagctacatgggaggctgaggcaggagaatggcgtgaactcaggaggcagagcttgcagtgagccgagatcacgccactgcactccagcctgggtgacagaatgagactccgtctcaaaaaaaaaaaaaaaaaattggtcgggcacggtggctcacgcctgtaatcccagcactttgggaggccgaggctggctgatcacctgaggttggaagttcgagaccagcctgaccaacgtggagaaactccacccctattaaaaatacaaaattagccaggcgtggtggcgcatgcctgtaatcccagctactct

SEQ ID NO: 584851 - DNA, 4001 bp, Homo sapiens
cgcctcccaaagtgctgggattacagacgtgagccactgcgcccggcagattttttttttttttttttactttttatccattatccaaattatctgttaatatgtttgtattatttttaaaataagaacaagtttatatatatcatgatatatatcatgataacatgatatcattttacttagattttagtaagtttacaactatggaaagttggactatttctcaagtattagaccaaaatttctttgctttgaagacagaatttgctttgaagacagaattgagggctcatcttggtggtggaaaaaaaaaaaaaaacacctactattaacctttatggtacctactgtttcacaatactgggacgccctccaagtaaattatatctacacgcatcttagtacattgtttagaatggaagctctggaatctgatcaattagattccaaagctggagctttggagctaccactaacttacctgtgtaatcttggtcaaactgtctcaagactccattaacctaactgcaaaatgggaataaaaactttactaaccttttaaggttgtcctaacccttaaatgagatgatgaaacatacacacagcacctgaccctggtaagcactcaataactgttcattcttatccacaagacacacttccaaaaatgtcagctctagcatgcacatgagaagttattagacaaggaagcaatacatgtttccctacagtttcctgatattctgaagagagacactggatctgatattctgatgagagacattacatgaaacttgcagaaatggtaaaaatcatgcaacagtcatactatgaggagtttgctacatgcccttcctatggcttcctcctctcatccccttcacctccttggctaagtggcagcatagcccaggacaagctcagtactaagctcaagtagaaagtctgaattctttcacatctctaggaaggacctgttctgtgaccttgggaaaatcagttcaattactcagaattctgtaggtaagaagaaaccaagggacatatatacatatatgcatatatatatgcatatatatgtgtgcatatatatatatgcatatatatatatatgcgcacatatatatgcatatatatgcgcgtatatatatccacacatatatatatgtgtgtggatatatacacacacacacacacacacacatacacacaatttctgtatgtaagaagaaaccaagggactgagtaactgaattgattttatatacatatatatattttatatataatatatataatatacatttaaaatatatatatataaacatatatatatatcttttaaatgcctctacctaagctagtggcccagtcctggccaggctggaacaacacctaaggcctgggttgagaaagcaaggacggaggacagagaaaagggaggcgttccctgggcaccacccctccaccctcaggctcttccaggtggcagtatgccctctcacccatctcaaagttgcgggggaggggggactgcgtctcgagggctgaacagtcacaaaaatagagcaagaagtgaaccacagttagaccctgaggcaaggaggttccagagagtcaggaagttaataagctgggatgcaaggattgcagcctgccggcccctgcccctcgcgggcgcctgcgagcctgggagtccgggctgcagcgggaccgagtgggcagtcccagggctcaccgtactcccggggctccggatctggctggaaagtaaaatgagccacctgccgcctctgggccgcatcctcgacagtcgcggcggggtgcaaaaagccccgcgccagccccgcgccaggaagccgacgccagtgcccctcagcccctgccgccctgagcctgagtagccagccggcagccgccgctacaaccgccatccccgctcaccaccgggattctcaggctatgcagccgcacgccgcctgcggggagggcggagcacccgaggaggcttccacattggtcgggccagaggggcggtcccatgaaacagaccaatcggaactggaaatttaggggcggggaaggcgacgtgacgagctggtcggcttctgctccttgtgcgcatgcggaagaggggaagtgtgggctagaggtggcgccaatgaaatagtttctggggtggagcctccccgaggtcggccgtgcggtcctcgggtgaggacccgagtttgcaaagttccacacagtgcctggaggcgatcttttccggtgtcatttacagtgccatttccaatggtttaacatccatacttttttttaaatgtaacccttttttatcctgtcctgtctctattattgtgtgagaggtgaagagagctactgattggcattggttattgttttgactttcgaaaaactgctgtagtcactgctcaaagctttcactccttattcacaccctccttaaaatgcttaataagcatatatagatttttattgatttcgtttttccacatttaaatgagagatgaaagaggtaaacttagatttcatcctgcaaatccactgaataggaattcagatacattttgcccagaagtagcaaaaattacctgattggcttagtctaagtagcttagaaacctggagaatttgagtcactaattttcatttatagtaatcaactatgtaaatttgttttaatctaagtgtttaccaggatacattctctgtccatgaatttactaaaaaaaaaaaaaagcacataaaacatgaaatatcataaaatcaaatatgacaagagacaacagagacagtgtgtccatcagatgaaaatgggagggtggggaaggatggtcccaaaacagaatttgaagaagaaagtgggagtggaggaaaagaacattcctcttccattatgccttgcctcttaacccatctttggttttgcacaggggcaagggaggagagggtagaaatggggcaaaaggagaggcagagaaatgtgttttctgactgagattaagaaacagcaattgaaaactgccaaagggagaaccagaattatgtctccatttttcctacccccacactaagtccaaaaattcaacattggggaaattttttatcttggcttttgttagtgttcatttctgctgttttaatagtgtggggtagagtgttttgcatgtgcatgaagggtatttttgttttaatgaaggaaggggtaacaaaatgaaattacatttacatagtcaaatttgggtttaaactaaggagagtaaagaacaaggataaaaatgaatagagctttttttctatttgttgatagtttagggagctgggggtactgagattatttaggtcggggagaaaaagagaaaaataataactgatgagaattttattgaacctctgctacgtacaacccaatgacaagccaccattgagacaaataagatcaaggcatagttttacttctaaaatgtccaaggtggtagagaaaagagacagattaggcaactacaatccaatgtgataggagtcctagaatagtgcaaacaaagtgaaacacaaaaagagcaataaactcttatttgaaagtcaagtgtttccagatataactctgagctagacctaaaagatgactagaagttaccaggcagactagggagaaaatggcattccaaactaagaagaaacctgtataaaggctgataggcatgaagagcacagtgcattccaggaagagaaaatagcttggtgcttctagattcagggtgtagggaatgatacagggttaacagaaaaagtaggaaaaacagattaaagggagattttgaaggtctaagaggtttgaactttcaactacatgcagccaggaaaaacaaacagagcacctgccagattcacctgttttgcaaactgattttttaaattttccccatctctaccacaccatttgcctggtaaccatgaaaatgtctatgttattacagtgg

SEQ ID NO: 584852 - DNA, 4001 bp, Homo sapiens
ctctactaaaaatacaaaaattagcccggtgtggtggcgggcgcctgtagtcccagctactcgggaggctgaggcaggagaatcgcttggacccggagacggaggctgcagtgagccgagactgggccactgcactcctgcctaggcgacagagcgacattccgtctcaagaatcagtcaatcaaccagacctgagcctaccagtgagtagtactttttacacgtctgtcttcaagtcttatactaccactgttcctcaaagtcaagaagggctctggctaaacagcttcctttgccaccattttaattatctgaattaaacaagatatttcagtattcaccacaatgtactggttgaaacatgaaatcactaagagaaggtgctccaaggttgtttaccatgagctaccttttttaagtgacaaggtctcgctctgttgcccccgctggagtgcagtgggacgagcacagctcacagcagcctcaaactcccgccgaggggccactttttccctcccatcaaattacctatcctgaattggtcatgatcaaacaaaaatacaaaagccttgtagcagtttttcctacgtaaaggttatttactgcctgaacagtatcctaaccattccaactaaagtcgaactgaaatgagaattcacaagaggaacaagaaattttgttttgctttgtaacaccaaaaaatttaaaagaggctgttgcagtgaggtacaagtctgaagtagctcatctttttcgtcagtgttagccacacttgctttcaacttcagtcttaatttgtttccagttctaaaatgctttttaaaaaagtctgaggtagcaaagtagctgctggtacttcagcttgattctgaagaaataaatcttaaaagcgaatcaagccaactcatgaatttaaaatgaaggcaaagtccaattcgccactcccacccatttctcacaccagctgtccaccaatcgtggctgcaacatttctgacacgactaaatgggctgaatcacttgaaaagactcggcttcgctagtactcatgaagaaccgcactttcagccggatggggcagggccacgctcagaaccaccagctaagacccaatcctctcgctagggaaccgtaactaggcaaccagcaccagtcaacagcgcgcgctcgcttcaaaacagcaggttgccgcgggtaccgaaattaactccagagaaccagggtcagcagcgagaggcagaacagagcactaaaacctagtagcatcacaaaaacgaggcattaactgacgggtggtctgaagccggagggcagttttaaagaccacgcgaaaaggggtagacctactcaacgcactttgctgcgggtcacagttattttctcaaaaccccacaggccacgaagaaaggtggcagtcccagccaatgagaggcggacacaagttgcacctccagcggccgtcggcgccataggcgggggagagaaaaatgaacgagcgcgcgtgcgcggagcgttcagtcgggcgcgcgcagaggtacgggctgaagaaatgggggaagggtggaagaggaagatatgcgcacgcgcacgggaggccgcgcgggctgtgggtctccaggcaggttcgcaaacacgcgcgcgcccgccgttagcactgctcagcgcccccgcccggccttttcggcccgtagtgcctcgaaaacctgagagaagctaacgaaaaaacgcataaataacggcgcaacgtctccttggttctcctttcgccgccaacccgacaccacccacaaaagagtcaaaaatatggcctgtcctcggtcttcactgcccctggagtaacttgaatacattgcgaggcctacctgacacgccgaatcgcggttccgggaatttatctccgttgcaaccacacagcggccatttcccgactcaagaacgcgaggaaaaccatagagctaccttcgacgcgctagcacgtctccgtcacttccgatctggggcgtggcctcgggtgccgctaaatatgcgggcaagccccgcccacccttccgctccggtccggcttcctggctgctattaagatgttgcctgcggccttctgggaagtcgcgtggctggtctcgcgggaagatgtgacggctccgccctctggcccgtagcgtcagccttggccggagaggcggtagagtagggtgggtgttttgtcaggcctgagttagcttcgccatacggcgcttttcgctggtgtctctgcctcgttctgagtagaccccctagacctcaccgccgcccctgcgttttacctcagtaagctcgtctggtctgttctttctgtggggccggctcagaccaggcaaaaaacaaaaagacaatcccacactgaggaaaagaccaggaggcaagacgtggctgtaattgcagacacgctgctccctcagccagcaagcgccacttttcctcttggacgcctaactggagattagaaaatgtggcttttggtttgctattaaattcggcagacgcacttagttgaaaaatggccacgatctaaatccctttcgtggcgtctgatcaaatcggagctcaagccgcagcagccggaaacctcttaggctgctcgtgccaaagaaggccgcccttctggcggcgtgatgacagctttaccacatcggcaacgttggcataggcatgaaaaaataaagagcacgaagcagttgagctttcagcctgtgacgatgatttgtggcagccgaggaacacagcccaacgtagcttggttgtccagaattataagtcagattataaataggcaagccacattcgatttgaatagaatttaaataacagccgtagcacattttgcattaatacttctccgggctgcactttcttagggcctaaaaccgctattgctttgatgtttagagatgttaactaccttgatggatttcagacttgtaattagcaaccagggtgtcagtgagtgaatcgaaactaggattgggccctggttgtgaatttaacactgtgcttagagcattctttcttcacagtccagtttaccagctgaactagaaaaacgacaacattttcatggagtgaatcgtaggttttttattgtacagtctgtccctcaccccattaccacctcaggatgtggacacagaaatccttggcctttttgttgtgccctgatgtcccaagcattcgcaggttctcagaaatatttgttgagtgaatgaactatatttaaaaaaaaaacaactaagggctcaatacacgtctgctattctgcatgtattgggagtcggggcgctcccaatacatgctgttattcatttattcaaaataccccaaattgcaggctaggatattatcttcgacctccctctgcaattctattgcacatgtgttgaaaatgaagtatctatttgaggcaatataactgattatgattttatttacataacatgaggtagtaacaaaggagatcctttggaacaaagcctttagtaagtggaagttatacagacttcccttgaaatagatccatttgatacgtgatgctttcccaatctacaaagtaggaggttcttgaatttagatgttttatgcacattcttattttcaaaacctgaaattccaccattacagattcattctttgtaataaatttttttcctattaaaatacaaacgccgaaaagagcagaggaaaaaagagcccatttaacaaatgagcattgcagaaaaatagaacattatctcaagaagaaatacaagttgtaaacaaatgaccaaactgctaaaaaggtacaaagagaatgctgagataaattagtaagctgattttaattttaaaaaaaaaaaaaaaacagagtctcgctctgtcgcccaggctggagtgcagtggcgcgatctcggctcactgtaacctccgcacccccaggttcaagcaagtctcctgcctcagcctcccaggtagctggggttacaggctccc

SEQ ID NO: 584853 - DNA, 4001 bp, Homo sapiens
gtctcatctgccagttcctaaccagcctatcgtcttgctgggcatggagaaggtaggcggaatcacataaaactttcccattatattagttcttcagcaagaagatggcatctctggtatcaacaacaacaaaaaaaaacgctgggcgtggtggtacacgtctgtaatcccagcactttgggaggccgaagctggcgaatgacctgaggtcgggagttcgagaccagcctgaccaacatgcagaaatcccctctctactaaaaatacaaaactagccgggcatggtggcgcgcgcctataatcccagttacttgggaggctgaggcaggagaatcacttgaacccaggaggcagaggttgcggtgagccaagatcagaccattgcaatccagcctgggcaacaagagcaaaactctgtctcaagaaaaaaaaaaaaaaaagaaaggctgggcgcggtggctcacgcctgtaatcccaacattttgggaggccaaggtgagcggatcatgaggtcaggagattgagaccatcctggctaacacggtgaaagcccgtctctattaaaaatacaaaaaattagccgggagtggtggcacgcgcctgtagtcccagctactcgggaggctgtggcaggaaaatcccttgaacctgggaggcggaagttgcagcgagaagagatcacgccactgcactacagcctggtgatagagcgagactctgtctaaaaaaaaaaagcacggtggctcatgcctgtgatcccaacactttgggaggccaggcaggcagatcacctgaggtccggaaaccagcctgggcaacatggtgaaactccgtctctactacaaatacaaacattagcaaggcatggtggcacatggactgtaatcccagctactccgtgaggctgaggcaggaaaatcgcttgaacccgggaggcagacgttgcagtgagcagagatcaagccactgcactccagcccgggtgacagagcgagactccgtctcaaaaaaaaaaaaaaaacaaaaaaaaaactcatgttccatgacaggaggttgatgtgacagatttcaagggccacacagacaccagctaacccagcagcagcaactggcgctctggctccatctttcctctagaatccaagaggctctctccattcatttaggaaatacgcactgaacgcctactaagttatgagacaccgggttagaggctggggatgtgaaactgtgagggagataaaaaatcttgcccaagtcccagtaccgaggaaagcttgacaggctcttgtatggtagtataaagccaatatctagggatgaatggtttaaaaaaaaaagagagaaaaacggactgcaagggtggaagtggggagcgggtaacaagagaaagtcctccatcccagccgtttatatacctggctacctgaaggactcagttccttacctcagtttcctgcaaccgtagctttctggcactatgccacgctgccctgtggcatgtttactatttgtattcaaccattcaaaagttactttaaggagatgaactgcacatttccaactctagtgagtaaccttgttcctcccggcactcttgtcgagttagcgtttacgtgcagaattcttccagaaagaccacctgagcaatcaataaaacttttatctctgtaaaaacaccttgtttaaaatagctacatagggagacgtaggtaaacaagcacacaagggcctccaaatcggtggtgcacagctcacggatgaggcaagggcaaagcatgcgtgggaaatcacgtttatcatagagaaggaaaggagcgctcacgaggagcggcgagcgccccaggcttcagctttgcggccggccggccaggcctcgcgccagcccgggtgcacacccaaggcgccgggcccgcctccagctcctgggcagcgggaaccgcgaaccgccgtggaacggccgggaagggagcgctgcgccccctggcggcggggcccatccctctccgctcccggccgccgccgccgcgggccggcctcgctccatttgcagcctccggaggcttcgttcctccgagcggctgctcccccggcctcccgctcgccgcccggcatctccctccagtccccgccccctgctcccgctccgacacccccttccacacgccgagcagtgccccgccaaagccccgccgagcgcgagcgccaagccgccgcgagtacggcagagccttccggccgccccggccgctccatcgcggcgcccggcgggggtgcggggccggcgcgcggcgcgagtggggcgggcggcggcggcggcgcggacggttccaccgcgcgaaccccccgcccccgcgcggcgcgcgtgctccccagaacgccatggagccgccgcgttccgagcgggcacaaaggggcgcgcagcacaatgggcgcggcgagcccgtgggcgcccggcgcccgctccggtcgctcggcccgcgcgggggtgggcgctactaccggcgggcgcgctcggagcagcccccctccgcgtcccctcccctgctcccgcccccaccccggcatggatgttgcagccactctaccggccgctcgccccggagccgccaacgctgccgccgccgcgcggccggcttgatccgccccgcacttacctgggacgcgagttctgtactttgccgggcgggcccgcgccgagtttgggcgccacgtgggggggagggcgcggggccggggagtgggggccgcgcgcggagggcctggccagggcggcccggggaggcgctgggggcggcgggcgggcgagcgccgtgtattttcccctctctttgtgtgtgtccgtgcgctgcgctctcgcgtgacgtgacgggactccgtgtgtcatttccgcacaaggacacaggagcccccgctgcagtggaaccacaacccctccgcccccacccccggcccgcccctccccctcagcggggcacacgcgggaccggcggcggcggcgctcgggcgtgaacggccgcggcggggagctcgggcgcgcactcccgggacccaggcggcccggcgcgctcggccagcgcagtggctccacgtgggcccgcgctggctgcccggggcgggggcggcggccgcgcacccacggcgcgccgggcaggcgccgcgaacaatgtcccctgtaccccatgtgtcctcccaccgcgagttcgtcctcggaaacgtggtttctcagacccgagagtttggccccaaacggctttttctacttttttgccccttgcgggacggcgactgtgcggagcttgtcccgcctcgcgcccacgcctctcccgcatttttggcctttgggccgcagcccaggcccccggggccggtcttcccgcgccgccaccggcacaaagaccttggggcgcgagggcccgggtggctcctgcggccccgcggggcggcatggagtccggcgggacccgggagagcgaccctggcgctgggaaaagctggctctggccactccccctgcacggtggccgccctctgttgtgagcctcagagctaaaatctgctcttgcaacccgaagttctggggtgtgaggctgcggagcgagagcttcggaagcgcccgcgctcacagacacacaccccacaaacacaaacccacgggctgtctgcgccgagcgcctaaaatagaaaaacacgagtcaccaactcaataaaggctgattctgtctactcctaactcttggactgtagattcccagttgataaatacgaaatctacccctcgggtattttctcaagtctcagtggctgggtagggggagggggaggtgctgggtgagagtcagggaagcccaattcaacagtttagccacgtttgtattttaggcaaacaatgagaatgtaaatttaagaaaaatcctttaatttgccgatcaaagaaagtataaaaagaaaaatgcaaatgatcccatctgctgctcacagctgactggctgcaagggagg

SEQ ID NO: 584854 - DNA, 4001 bp, Homo sapiens
aattctgttagttatttcccccaatgtctgcacacggttagttcagttttgttgtttaaaattactccaccatgccattgttgagtcaatgcggtggagaattcttcctttcctgatgtgccacacattgcaaactctcaggattttcttcaataacctctgcataattgttgaatagtttctcactgcagtgggctgcggtatcaagaaacctttagccatatgcacatgatgtagtgctacctgtcacccactctgagtgctagagacccatgaagcctatcctggaattcagtgcagcctacatgctgccattcaaaattcccaccttatgcagtgtctccaagcaagggcccttctgagttcaatccaaaacaactgaatgaatgagatgcaacatgtcaacaattcgaatgtttattttgtttaaggaaaccagctgtaaacaaaacgtatctgttgttttccatgcttatgaatctggcactaagagactgcattaaccaatgcctttttaggtttaatacttacacacggtaatatgttactggctttaaggacatcaatgattaagctttcatgcagagctgtacggttttgtatagttggaaaacaacactgattttgagatcactacaagcaaataaaacttttattcctcccaattatttacctgcttttcaaatttttataaatttttatgacacaatttcttcagtctattaaatattccaaaaaagaggctaatacagttgttataagaaactccgcaaatgcagtcaagtgttaccttgtcactataattaaagttttcttatgcgagtaaatgaaacaaacaatccagccccacacagggaaagccagcattgccttgggggcagcagaacgcggcacagcaccgcccgccaaggccgcaagatgccgcagaatgactgctgcagcagccgcttcctggccaggtggccgtggccgtccgcagaaaggcacactgcagcgctctcgctataccttccgtgctggcattgcatcagtgttaaatcccctggccaccaactgccatatactttttgctggttatgaagaaacgtggggaggggacaaaggggagacagagtgtgcctgcaagtgtgagagatcactattgcctcacactccctaaaaaatttctcccccaaatgtttataagccaagtaccaacttacttcatctgccaggtccctaaatctgaaatcgccttgcccttcaaatgcactaaatgagtcagggttttagggcaaacccagggatacaagaagatcgaaagtgcccaattcttagctgcgagataagcaccaagtttggggtggaagagttcacctctgccgaccagagcgtactaccccggagcgctcctagtttagagaggcttggagaggagtgggcctcccgttcctggagtatcccaattcccagggaaggcccttcccggcgctcgcgcttcagagtgcgaggaaacccccacaagcaatagctcacccggctgcattcttcaaagccccaacctcggggcggggcgcagggaggtgggaggtggagggtagcaccgccgggaggctcctgtcagcgcctctcggttttccccctggctccttggcgccccctgacgacgggctccgcagcaatttggccgagggaggctggataggcggaagctccgggtgtccgggaagctagaggcacccggccaatgcacccgcggacggcgcggactggcgggcggccccgcgggagggcgctgggctctcaggcccgggtgcagcccgcggacgccgccgaaaccgccgcagccatgtccgcgcgcccgcgctgccgcagcctggccgtgatgtcatcagccgagcccccgccgcggcgccccattcccgccccccgcaggctgccgcggctgcagcctgagcgccgcgtccccgccccgacccacgtgcgcccggcttctgggatgctgaggtcggcggcggccgcaggacgatgcgcggggcccgggcggccgcggcggcggcgctgctcctccccactcgccgcgtccccggcggggctgcgcccgggggctgcgcacggacgggggcgggggcgcctggggagggaggggagaggatcccagccgccgagtcgcagcctcgtcgctgtctgctgagtcatggcaagcgctccccgcagccctggatcactcgcgtagcgcggctggcgcggggtgcgcagccattgggctgggcgcggggccgcgagcgccaggcatgacgcgctgagccgcgctcacccgtgcccgccgtcccggcgtgcgcccagcgcgggtgcctgtgccgccgccctccagccccgccgtcgagtcgccctcgcctcgcccgcaccatgatcgccgcggctttcctcgtcttgctgagaccctacagcatccaatgtgccctcttcctcttgttgcttctgctgggcaccatcgccaccatcgtcttcttctgctgctggcaccgcaagctccagaaagggaggcatccgatgaaatcggtcttctcgggtcgttcaagaagccgaggtaagacacgccgcgacgggtttctgcgggctaccaggaacaattaagccgatttggagagtgaagcgcggctcgctcccttctcctcggctgcccctagccccatcattgcccactccccaggctgagtgcgtttctttaacgccccttgccctttttgccgtcacctccgccctccagtctcccaggtttgaataaccacggcgatgccgagggcagggaggggaggaaagaactcaaatttttagtcagtttgctaaagccttaagggtaatttgagcgtagtccggggctgcgccagcctcgccttcacgcatccttcgctggagcgtaggggtaagaaagtaaggcatggaaacttcggggctccccaactcccccagaactttcatgcaaacttctcgcggagaaatcacgtagagaccgatggccccaggactcctcctccctcccccaggatgtcccaccgaattccaggagtctgcgatgtgctttcccaaccctggtctcccaggtaagtcatgagtcactcggtaggtgaagaacaaggagttaaatgaagtctcatttatctcttttctccccagatgctgttttgagatcgcaccactttcgttctgaggtaatttatttagcgcgcacgctcaaggtcagaagaagttctctttcctgagtaccaatattaattatatgcgtgttaagaaaccagtaggacactgaatgacgaacatgctgtcccctagccgaaagtggcatgtttccttttaagtgatttcatattagtgcccagcgaacggttttagcaaatttcttgtgtagtggagctgttgtacaagaggggaaaaggcaaaccctaaaagtgctgcagaccttaaaaaacttagccacagggtggatgtcacttgagtttacagtttatattttgctggtggaagtgttttctgggtgctgtcagttgactctggttgttcacttggataaacgaagaggttagtgcagaacaatttgatccatatgcatttcattttcgattttcaagtttacatttctgttttctcctaaagctctccatgttttattggggaccatctgatgatttttgcaaagcgatgatggtagtgtgtgcttaaatgcttgtgctagtctccactctcaaaacgtggaccatccctctagggcaagtaactcctaatcactgcacccaggaaccagctccactgaagaaacacaagcgctccttgacctaggatttctttaggagttttcaggccaacctccacttatcctaagataatttcccctctttttaggaaagttgcacgccgccaggcttggaggttgctgcttggtgcagtttactcatgttggcaaagacttcatagttaaacgccctccatttacctgaagttatcttgcctttcatttcattagt

SEQ ID NO: 584855 - DNA, 4001 bp, Homo sapiens
tgtatattttatgaacacatgaactaaaatccgattttaaaactggggaatttctcttctgtataataacacactaacaattagggaagtacttttataaaataagtttaaatactcacttcaaattcttttacaaaataacgagtttcaccttgaataactggtctgtgatccaaaagccttgaatgaatttctccaagatctataaagataaaatgaaattcagggttaatccatgctaaatggcataatctctagcttgttttactctctcccttccccactaagagatgaaggttaaaatccagtttagactatggactaagaagaaatctcatccactgccagtggatgtgtacactgatacaactacttttgagaacaatctttcagtattcaataaagttgcagacatgtatacctagcattttcatgcctaggtatgtaccctggaaaactcttgcacaaatgagtaaggccatttatacatatttattacagcataggtgtaatatcaaaagaaaaaacgcaaaacaccttaaccatactcatacaatggaattctatcaatcaccaagtaaaaataaatacatcagagttacacttatcaacataaatataaaaaataatacgtattttataataaatataataaaaaagcaagtttcagaaggattaaagcaatttacataaaactttaaaatattcaaaatatttccttttgggatatagacagaagcaacaaaactataaagaaatgcacaagaataataaacaccaaattctggatagtggctaccttgagacgagggaggggaactagtgcaattagagcaagacacagtggggcttttagtaatttatttattaaggtgggtggtgaatgttcattgtaagtctctttttcataagtctgaaaaagtcattaagaaaaggtctgaatttaagtcttttggtgagtcagtttattattcttcttagttacaactatgtagtttaaaatgtaagtctcaaaattccttgagaaattaaatctaagacaatgtattattcatattcattcactggcaatgttccccaaatttttcatttttgcagacatacgatgggcaggtttcaattctctattttaatgaattttattagtacatatcttcttaagcatgtcaagtagaaaaaataatacaagcactgtatataagcactttatatctggtatatataaagcactacaactcaactgtcaaagactttcacgcagcaaacagcgttgtgagctttaggagtcaaacctaaagcagattctgtgagaatctaggttgtaaccttctcccagctcaaagcacacagaacacatggacatttctgaacgtgaatggttctttacagtgctatagagcgccttcgtaagtgtatctcacttactcctcgcacgaccaggaacagatcgggtaggagagtgagtaaagccagtgacccgaagtcactcaactcctaagcgactgcctcccgcctcccaggtccaatgccctttccactacacgtcggtggcgaggctgcccaaaggctctgcgcccaggggtcctgagcttgcggaatggacgggggcgggcctgatggctcaggctgcgacagaggaaagcggggaaacacgaagagttgggctggttggttgtggtgggacgcatttggcgcggggaaaaaggcggggaccgaccacgactcccccacccgcacaaacgcacgcgcgccagcccgggacccgggggtcggcccgggtcagagggcgccgcctgggagatgaggctgtgctgggatccaccaggaactatagccctgacactccgtacccttgataatgaggtgcgctgagcccgcagtccccagggagtccctcttcttgctgccaccgcccggggcggcctcacaacccacaggggtctctgtccctccgccactcatcccgaccagttccgcccacccgcggccacgctgcgcctgcgcaaacccggccgccctcttacaaggcgcgcccgggttttttttgtgtgtgtgtcattacagggcgccggagaaatttaatctacccagcgggcggttccggaaaggcgcctgccgtgtagtcaggctgtgaactggcagaagctcttgccgccatgctggatcagggcggatgctgctagaataggaaggtgcttgaactttggagctaaactcagagccctggttatttggctcaaagctggtgcattccagtacagttgtcctcccatatctgctgagaatacattccaagacccccagtagattcctgaaactgcatatagtactgaaccatgtatatactatgttttttcctgtatatacatatgataaagtttataaattaggcacagtaagagatgaacaattagaacaatttaataaaagttatgtgaatgtagtctctctcccaaaatatcttattgtaccgtcctgcgggtaatgaaaccacagaaagtgaaacctcagataaggggggactactgtatagcaaagccaattagctgggggctgtttccctactatgccatgagtgtggctgactattcctgcctttctttttagacacctgtttcctagaatgcttctcttgctccctctttctgttcaagtcagtaaactcacgttgtataataaagaatttgactggactttgactctggttcctgggaggtaccctcaatccttagaatttcccaagtgatagaagtgtctttgttattcatggtgggcctctggaaatacacctgagtttatgctaatgagatggctcatggagggcccaagatgatttcagaatggaggctggccacaccagaagggccggccaaccatgagggcttaggctttgagtcacataagcaggcccacctctggggagcagattggggctggagactgagttcagccatgtggccagtgatttaaccaactatgcctacataatggaaccccagtgagtactctggatgtggaagctcaggtgagcttactggtcgataatcattcatcaaagtgtcaggagggggaagcgttcctgaggacacgtaagcttctatttgggaaatctcccacatctcgccctatacatctcttcatttggctggtcctgatatgtgtcctttataataaaactgtaatagcaaggaaagcactttcttgagttctatgagtcattctgtgaaacctgagggagtaaagcgaatagcaatgaaacatcatgtgtagagagaagctgcgtgggtgagaactgaggcaccctagcagacagtgctcaggccctgggcatatgacagagacagctggtcagaagtgcaggtggcctgggaaccccaaagcttgtggcaggtgtctgaaggggagtcttgaggaggaccatgctttgacctctgaagtctgtgctaacttcggatagcactgcagtttaacaaacacttacatggcacttgctacatgccaggtaatactgtaagtggtctacaaatttgcattcatttaatcctcatggccggcctttgaagtagttattattaatgtcctcatttacagacgaggaggctgaggcacagagaggttaaatgactgcctgacttgtatgtggcagaaacaactgcctctgtgtctctgtgtatgtgtttaagcataggtggtgggtgaagagagagtggggaagggagatttggagagaagggagagagaagccatattaactttaacaggccacatgggcttttcattttttcattcaaaaacatttaacaaatacgttattgagcagctgctacgtgcccagcatagtgctaggagctaagacacagtggtgaacaagactaatgcagccttttcctttcctcatgcagcctgcaggggagccaacactgaataagtacacaattacttttctgcaagtctgttgcttgtagcctgtgaatatgtgttctagccatttgattatacac

SEQ ID NO: 584856 - DNA, 4001 bp, Homo sapiens
aaaaccaccatgaagtaccagctacaactaaaacataattttaaaattttctcattaatattgttgtggtttacagaaaatttcaaatattttatctcatatagaaggaaaattttgtatagataaagaccactaaagcatgttttacatttttcttgcctgtgaaaaaaatcaagtagctataacatactttactcattacagttaagaactgttagattgaaactttatttctgaaatatttactatagaatttcagaatcccttccttgattccttgatagtaatcttttatggtgctattcaatcttggttaattttacctctatatttttacagtagttgcctcccctagatgagagatttttaagtagtatgtgaatatatacttacatgtgctttaaatcacttaaaaaaaaagtgcttccgaatgtcacttttactttcccatctgtaagtgcttcttttttttattgttgcccatagcatagctatcctcataaatttccctgtttttagactattgcctttgcattcatatatttaagcgaggttgaaattttaacaagatctgaaaagacccacactataagtgtttaaatttaactattcatattaaatatatatatatgactttttgcctaaggcatcaatgaaagaaagaaaacagaagctaaacaggagagttagagaaaatgtctttatataaacatgaccacctaccaagcagctcctttaccattagggaaaacttccactttgtaataacatagattaacaaacaaatgaacaacatacctaagttgacaaagctcatgaccatgtcagcatcattcagaaagttggtatcatggaggctggctagaggaggactctgggtggtcagaggagtcgtccgagataactgtatgcgacgaggatacccattgggagaggctgggtatccctttcttgcccctctggtctcttctgccaaggatgcccttactgagtactccgactcttcaggattttcttcattggtcatggcattgtagagatccagcataaagagaggtgcagaggacgcttgttttccaggtgaaaatggtctgggtctgtgaggcaaacccaagatagagagaatttccctttgtatttcccgtctttcgtggttccgtagtcttctataaataaaactggagtgaacatgattgtctcccaaacctccttttgcataacccactagaacccagcagctccagaggaaacccacaatacccttaagtaaaaatacagtcagatgcatttttgtccaaaagcaaaagttgatatttttagtccttcttgtcctcttaaaaaaaaaaaaaacctaaggttctaggaggtacagtttcccagtagctgaaaaaacaaatttacctatttttcatgacagtgacatttctgagcacaacatcctcaccgattttcctgtcctattttaaatattttggaatatgtcaagagtagttatttctaagaaagctgaaactcagatttccaattatccacagttgttaagagtttttgctgcattgatgtagcagaagacggctaatattatttgatcagatgacctatgcattcctatatgaatttatgataatcaggcctttggtatttgaattagcaaaagttgatcttctgataaactgtagttcccaaagtaatcttcacttgcttttgagttcttctcaacccttgagctctttccaaaacaaatcctgatttctgaatcacagatctatgctgatctgcaccttggtgttggaatatatatctgtccggcagcttggtgataactttaacatcttttgtgtcgtcttagtgtaaaataatactctaggttgtactattcaagtaaatgtgtttccctgaatttacttgaaatccttcctgtaagtccattcaatccctttctccttcttactgttaattccacctccagcaggcacaaatataccagccctcttcaagagagatctaaagagtagtgtaagcacaaccctgctgggaaagaagaggcttctcattgtaatttgaaactggtaaagcaaaaagaacttaacccttttgctaccagaaaagtctccattttcacaattttataaccacgcatctaacatgaaacagtgatgcatgggacatacaaattctaggggaaataaaaggcagttttcaagtagtacactgaaaattttgccatccattttacatagtacttctttagatcttttttcagtgacatgtacttaatacacttctgtattaagtctcaggttgtgcctaagttagcttgatgaatctcggttctgtatttgagattatttctagtttttgtaagtcattaaaatgcacttcttaaaaaataaaaggatgagttgtaaattgaggttaattcactgtttcttaatgacagccagatccttttaaaataaaatacagcagacaattaatcactaataaatatattctagctgccaaaatagtagttgtaataattcaataacagtaattagataacctagctttaagtgtctttaagtattaaaattttaagcagaaagttgaaatacaaatatcctaagatgtagtgtcatgattcataacttttaagttatttcagttgaaatatacacagacttacaaattagatatttcccataaattgtattcaatactttgacttgttttaacccatgcaaataaacacaaatcaaatcgtcatgactacatgcagattgaaatttgagtttttaaaatttgatgggtaaaatggggaaaatgcacacctttctaaaataccatacttaatccaaggaaatgagcaaagtatgtgtttatccttaatgtttaatgcctttaaaatttggaagtctacaatgtttttgtgcagctataattttccttacaggctctcacttaaccttagggctcacaatactttcattgtctgggatagtatgctgataccaatgtaaatttatcgagcaaattctagagctgttatgaaattttaatgtttttcctttactctacctagaggcgcctggtttcttgtttctttttaaatatttcctctgaatgtataaagaaaagtcatatttcttagaagtcttcagttattggtgaatgcagaatactgaaagggtttgcagaatcttattgtacgcatcattttcttatacaaagttattgcacgaaaacttgatgttgctatttaatatttgctttactgaaatttaattattaatagtcatgtaggatgccacagtagcagatgcaaatgctgacatacatgcaacacccttgtaaaatagatatcacaaagaatagcaatagtgcaggttgaaagtaagttaagaaataccacttcaaaaagaaatagtttaaatggctaaaattcttgacattgcttatttaacatccaaaccaaactaagaaacaaagtcaaatcaattacttcaagacaaaaagtttctctgcatttacaaaacatcctagataaagcaggctacagttctcaatattttaaaatatatcatcaaagttatgaatttgcttcatttgtctctagagcacagcatagagttacaaagtaaaaatttaccacactagaggaagaaacaactcttactatcttccatatgtgtggatttttgttctaagatacatgtgaaaaataaaaatgagactaggcatcacaagtcttaaaaactcattttcccaaagcatgatttataatatcaatcagtgtaattataatttaattgtttcaccaggcatatagcctacctctatattggaaatcagttgctagtattcttagtcagaatattaagtaatcacccttcccgccgaccttcccttccaactcagactagatttggcaaacactcatttttcaaaaagatcaacttgtgcagtgagagaaagaaaataaagaaaaagccttccaggaataaagaggaaatagtaat

SEQ ID NO: 584857 - DNA, 4001 bp, Homo sapiens
acttcagggcctgggcacaaccaccgtctcacatgggaaggaggcccgtgaagccccaccccgccgcgcagctgcaaccatcccgggcgtagccagtgcacccatgatctgtccgctgacagcgcgtccctccatcctatgtctgcgctaaactaagtcagcttatgaatgaaaagcagtgcaaaccggaggcactgactccgaagaaaagagtcttctctgcacccttctcatttacagatgagaaaactcagtggggtgggaggggggagaaagggcgatgtgactgggtccgggtttgccacagaacatttgtggcggagctccatttagccgcccgtgaatttccattctgttgcctggcaaccggttcagaggagctcagcgcccaaccccggcccctaccccgcaccctttctctgcccgtgcagcttgggctgcattgatcaaaggttcagcctttggggacaatggccaagggcatgtgagccggggcacaggatggattaccccagttgagctttcatcccgccccaaacagaagcgagccccgcccggccgggatccgagcgccttccgcggtccttttgggacttccctctgcaacctcccctagtgccgtggatacctctaaacatactcatgccaagttttcaaagttcccagccgctgtcggattccctaaaagtctcggtgggaaaactgcactccaagttagggggcaaaaggcggcagtttagaggggaaaatcgtactgaagagccctcttcccaggatggccacactcgggctggactctcctgctgcagttgagttaacctggccagagctgggcagaagtgaaaaaaagcgcggaacgtgctcagggagtccgcaaatacacgcccgctggggacagcgctcccggagccccgcggcccggccggccagccgcctctgggggcctcggcgcgcagccctgcccgcggcgcgggggagcgcatgtgccgcccaccgccgcgcaggtggcgggagcacagcctgcctgtccccgcgttctctggcgcaccaggcgggacccgcgcgccgggagctcctccaccccctcactccatcccctgggcccgggacactgaaaagggggaaatgttctcgtcattacgttaccccaaatccttacccaggttcacaaagctcatgaccatgtccgcgtcgttgaggaaggcgctgtcctgcgcgctggtcagtggggacgcgccgccgctgccagatccgggggccagaaggctcttgcggttgagcgggtgcgcggcgcccgggggcggctgccgacgctgggacgagctggctgcttcgtggggccaggactgctgcctctccccctccgacgccccgtcctcgtcgttgtcggcggacagggcgttgtacagatccagcatgaagaggggcgcggacttcagtcgcccgggagggggctctccgcgaggcagctgctgctgctgctgctgctcctcctgctgccggagcgccgggggctgcggctgttggaggccgtgcaggggccggggccggtgcgggagccccagcaccgacaagatctccttctgcatctcccgcttctcctgcgtcttgagccgccggtacaggaagcccgaggaggactgcggcgacggcggcggctgctccgtgcggccggggctcccgccgtcccccagcagctgccccccggcggcggcggccgcggcagcgggcaagggcggccgcagcggcgggggcccgcagcagctgcacagcagcccccaccaccagcacagccactgcgccctccgccccagccccggcatccccgcccggccgggctgcccccgcggatcccgcgaggcgtggagcggcggagcgaggccggagcgcggccgctgtggcccttggcgtgagcagtccccgccacctctcggcgggctcgcttccccttcctggccctcagtccttatctctcatggtcgtccggggcgcccccagttgcccaggctagagaggtggcgaaggggcgatcaccaggagaaccgcttggaggggaggaaggggagcctcacagcctcgcgcaggtctctagaggcgcgcggtccaggccaggtgcgtctgagtccgggctgcactgcagcctgcgccctggctcctgcgagtcgcggcgcggtcactctgggcctcgctggccgcacacgtgcgctgccccgcgctctccctggcgactgagtgggacccggggcagcggggagcggggccgctcacgagctgcgggagatgcccggcatcaccgtggcgcacgcccctccccagatcgcagggccaccatgaagtttaccccgttgcagggcccaggctgcggcgacaaggcgtcccgaaatgccagtctattccgcgaggtttaacttccttctcgctcacgaactccgcgcccctgagctctcgggcaccgtcgctcccactcaaaatctccgcgcgccgcacgcctcctcaagcggaggcggcgaggatcttgctttccgttcggcggtcgcccggctgcccagcaaacccgctcgcagaaaggatgggaaggaagggggctagtgcaccgagcagcggccgcggcggcggcgccggaattcggtctcccgcctctccacgccgcgctccccgcagcggccaacgtgggctttctgctgcgcgcccggctcaggtacctcactccagccccgggactccccgccccgcggtaaccgacaggctggcagccaatggggacgcgaagctcgcgggctatttaaatagccccgccccttctttcaccctccctctcccgagaggcgtcgcctccgccgcgcgtaggtttcaagacccgggaattcttggaggcatgcgaagagccgcgaggtgccaaaggcgaagaggtcatcgctagtaagaatgatctgaccaataccccgatctgaagctttctcttttaccatcatttaaaaggcctaagttgatgctttaactaaataaaaataataacagcgattaaatcactatactgccagaactgaggaagaaaagaaaaatgatagcttttccatcccttccttagtttctcttattgatgtaatgtaggcgtttagcggacacgtggctttccacggcagctgctggaagttgggacacaccctccggggaggctactcacaaactgaccacagagagggccacatgtaacccaagccagcgtcctgagggtttggggtcggatgtgttgacttctctgttcatttgtgctttggtttggcttcttaagctagcacccaaaagaaagagggtgtaatcagacgatatattagaaaaggcgtcccctgtcttcttggaaatgtcttgattctccagcttatctattaatgttgcattttaatattgaaatacaatgtgacttatatggtgcaagataaaacttgaggagaggtgataaagataactccaggaagagcaggggcttggcatgcattctgaatggtcaggacaatagacagggtcctgaaacacaggttcctgtggattttagacaagataacaccaccaccaacaccatttgccaatgaggacacaaattcatttgcctttaccccgcccgagaacatccagtcatctatggatcgtagaagcaaattcacgtaaaacatgaaggttttttacttggtgaaaattgtgtggagttgaaaataaaaactgcaattttctgacttgccagccttagtccaaatggtcctaggcatttgagagtgaagtcaaatagattatagactgtgggattcatgaatttatgagatcataggctttctgttggtccaaatcttataagcattcctatcctatttccaagaatctatttctcatgggtaaatagagaccaccactgactccaactacccactgagtccttctttctagttctgccttggcccagacacaagtggtcatttagaagagtctttatttctacaaatatctga

SEQ ID NO: 584858 - DNA, 4001 bp, Homo sapiens
ccttcctcaaccattaaataacctatcagaactatactggtaggccgagagcggtggctcacgcctgtaatcccagcactttgggaggctgaggcaggtggatcatttgaggtcaagagttcgagatcagcttggccaacatggtgaaaccccatctctactaaaaacacaaaaattagccgggcatggtggcaggtacctgtaatcccagctactcgggaggctgaggccacgagaatcgcttaaacctgggaggcagaggttgcagtgagcgagatcacaacactgcactccagcatgggcaaaagagcgagagtcagtctcaaaaaaaaaaagaactatattggtacaatcacagtaacttatttcgatgcctttctgcagacaggaaactggaaaaaataatcattttcactgttaatttatacagctgtagccattaacatgtttttccatctatcaaaatagccctgaccatcttataataattctaaaattaaaggagctagtcaattgcaatatgaaattttaaaagctggtcagatttgccctcttttctccttctaaatcaagttttcaaactaaaagtttctatgttggatcaagtacagttctaaacgctgtgtacctatctagtactgactttatgaaagtagcccatcaacagtcaactgcgcacatgcactgtgtacgttcgttgtatacgtgtgtttgcatgtgtgtagggatgtatgtagagaataaagtaaaacaagcttcatgccgctctatccacatttctgcccagtatctcttgggaccaagagtatccattttcaagacagaaggtcagaaattaatccagtttttttgttattgttttacctgaaatggggggacaggtgggaggacaaaagagaataaagcagattcctgggcatctccacacatgtagatcagatcctctgggagtgaggcccaggattctgaattttcagttcccaacgtgattcttttgcacattaaggtacgagatcagcaagcaaagagaagacttagggctctcgggacccgtgattaaagccttagcggtactcaggctcaggctgatttctgacataagagaaagaagagattattgtccttatgcccttagtgtggactctggacagagcaatggactaatgagggcgttgggattctagtccgtgctccgtcacgggtgagtccatactacaggcaaatgtatctccctgggtctctctggtctgcacactgaaggggctgcactctatagcccaagcctccacggctccagactccttgaactgaggctgaccgaggcgcatgcacgatcgaggggctcgagcaccaagcgcggctggcccccaggatcggggtctcgcggcacaaagggcgacagggcagccaggccgcgcccacgccccgtgcccgcgcgccgggaactcctgctgtcggcacgcgcccctcccgccgcccctcgagcgcgccgatgctggggatccccggggcgaggtggccgccattacccgaacgcggccgcgggtccggcccgtgggacgtggatcccgggcttcagcgctgagagaagcagccgcaggcgcaacacgccccggccgcccagcacagccaccatggtcacaggtcgcgtagctgccgggagtgcgcatgcgctaagaccaagcgcggtacccggcccactctgccccgaagccacgccctctgctccgcccacctcgcctctccatcctgctccgccctctgcccgccccgccccgaagccacgccctgccgggtgctttcccatgggcgaccgaaactcggctcgtggtttcgcagtcctggaaccgccggcacccgcgtagaccgtcccctctcggtgctggctctggctcccgggatgagtgtccccgtcggcgctgccccgccctcgctcgtcgcctcagcgaccatggcctttccaggaggcgaggccgccagccatagcgccctcgctgcgtcggcgtccaggcgggactccggagtgggcggggctccggctctaggcaggctgctatgttggatcaagtaaagttctaaacgctgtgcacctatttagtactgactagtactaggaagtgtatttgcttttcggagatgatgggatctaaattttgtttataccacttcacgcccattaggatggctactagcaaaacccccagaaattagtgttggtgaagatgtagagaaattgaagcccttgtatattgctgttgggaatgtaaaatggtgcagccatgtgatgaacaatactgcggttcctcaacaaatcagttatatgatccagcattttcttttctgggtatataacccaaaagaatttaaaacagggtgtacaagaagaaatgtttttacactcacgttgacagcggcactattcacaatagccaaaagggtggaggcaatttaagtgtccaaaaacagatacatggataagcaaaatgttgtctgtgcatgcaagggaacattttttagcctgaacaaagaacgaaattctgacacttgctactacatggatgaacctggaggacactatgctgagggaggtaagccagtcaaaaaaagacaaatactgtgtgattccacttatataataaggtacctagaggagtcaaacttatagggacagaaaatagaatgggggttgttgagggctggtggaagggggaatggaaagttggtgtttcatggggacagagtttcagtttggagagatgaaaaagtcctggggatggattttggtgatgcctgcattacattgtgagtgtacttactgccactgaactacacacctaaaagtggtttaagtggtaagttttatgtatgttttaccacaattaattttttttcttttggctgtataattgcagctttataaaggttatagacattatctaattgaaagctcagtggagaaaaaaaacaactattgctttttaagtcaatcgttctgccttaattggaaataactggcagatttgtggctactgttgtagccttggcttgaataattggagacaacagcttctttgcatattgcatttcttctcctccaagagacctttttggtgtaacagtcagtcctgtgagcacagtgcttgtaggtgttacactcatagaaatttctgtcacctgcagtgtcctcactggcccattggactttcttgagtagtaaaggcagttttggcctaaatacagactatgcaaaagttttcatattctactctcaacataaatctatcacattaattcctgcataaaaggaaagagacatatataatgtttgagtttaatatcgtttgactttcagaaatctttggtgaggtcagtatttccttttttcctgatatgttgattggggtttcatctcagaaatgataaaaatagctgtctgtacagtttcaacaccagttacccttgtgctaataaaaaacggtagcactgagttttaggttattggtgtcacaattttttttttttgagacggagttttggtcttgttgcccaggctggagtgcaatggcgcaatctcagctcactgtaacctctgcctcgcaggttcaagcaattctcctgcctcagcctcctgagtagctgagattacaagcacccgccaccatgcccggctaatttttgtaattttagtagagacgaggttttgccatgttggccaggctggtctcaaactcctgacctcaggtgatccacccgcctcagcctcctaaagtgctaggattacaggtgtgtgccaccgcgtccagcgtggtgtcactatttttaagtaacatacctgacaaccagttctttatatatagcaagatcgtacagtttaaaaaaactgccatttttgtgccaggcaccttatgatatatcatatttctttaatcttcacattagccttctgtgctattgcactctccatttatagatgaggcaactgaggctaagaaaggttagga

SEQ ID NO: 584859 - DNA, 4001 bp, Homo sapiens
aggaaccggcgctgccctcagccgcggaaagtccgggtggcctcggttcccctcaccgcccggtccagcataacccgctaagttggggggaggccgttcctcttgggcctccaggcgacaaaccccctgcctggccggcacgaaagcagtctctttggggcctctcggagagctccgggcagcttggcgcgctctgcagacggcggacagcaagaaaatggcggcggcctcagctgaggcgggcaactaaggagggactgactcttcaaaagacggtccccgatctcagacaccgtcgtcaatatagcccgctgttggtctgcagggattccctcttcttgtcgggcccctacggggccgacgaggtcccgtttcgatctcggatggaggcggatgaacacgaaaagtggtttagggagccgccgcctccatctttgaaatcctcttgagggcggagtagagggggtggacagactccgaggattgggcggggcccgaaaaaggggagctccaggggcttctagggggtctgtactgcccgctgggaccagtcataggccgggacgaaggccatttccaagcggatggaggtggattgtaatggcggccccggacgactcgaaggctctgtatcggtaggcagaatcctccagctcgttctagaggctgctccactccagcacgaaatggcgccgccgagccccgcgccagccctttatatataggcggggaggaggagcttcgccgctcatgcgcgccaccctgcttgagcttttccccaccccctccgcgcgcgcgcgctcgctcacgcgggtgaagaagctgagtcgaaggggaaggaacacctctccgcgggagctttttctattggccagccgcaacgatgacgtcataaacttcatttccaaggtgtcagtcaccaggcagaagagtgccgcagagacccacagggaagtggcaacccgccacatctccaagccaattggctgagctgtggtccgccgactccagggaaagagggtggttggaagaggtgcggaagccatcgccccagagcctccagcactctctccccgcctccccttccaacaaagtcttcccaagcttccatgcacagcccaactggagactgccaagctcgagcaggtcgtgccattcgtagctcctccattggccaaagcagggaaacgggaggggtcgcgtgggcgtagcctgcctgaacccgccaggggtgtggccgcaagacgcctggcgggtggtggttctcggcggtaaggcagcagcagcgaagaatctgaaacgaggaaaaagacgccatcttagaagccgcggcctgctcctctatggcgaacagctacgggcttcagaacggcgatgaggggatctaacgttcccatgccccacagtctaaaacagtgttgccagagtcttataatactccactccctccctcaagccaaacgatggaaagacgagcaaaacattatttactactgtttagtcccaaagaccacaaaagctaaaatacgtctcccaaatttgcacgtccaagcacctttctaatccctccccactcacacctacagttaccaatacatttctgctcgttcgaaaaatcctcggcaaccctaaaagtgggattaaaatctccaaacgcatccatctaccctatacaatgcaacacacctcacctcttcctcaaactccattccggcgtccggctcagagcagaaaaagcaagtcctgggagggatgacttaagggaaaaaccctccccctccaggcgagctcggacctttccccccacacgccacatcacccccaaaggcacacccgtatccgcctctcaggggccctccgccacgggggcgaaagaacccccccgcccccccaccagggtccggagtcctccccacggagcggctggtccatcggtcagcgccagggaggagggcgagcggaggaggcggcggctgcggctcagactagccctccccctcctcccctcctcccctccccccggccgtccgcctccgaggaggggcaggagccattttgggagctcagtttcgccccctccccccaacttactcttaagtcttcctcctaacttggttatctaaataagggtgcagactctgtgaatcaaccagagcccagagtcaggatctccagagcatctctggggccgtccccgcccccttacaagagagtgaaaggatctcccccacccgagaaaacctgggctttggtggggcgtcccctcccccgtttcccctttcttcgctaccagggagaaaacaaacttgtgtacgtatctgggaaaaataatcaacgtaggtgaacaaatatacggtaagattccccctcgccccggaagggctcgtaagggcctaggtccttgagctgcaaccacgccaccctccctcctctgcagtagcccttcaactccaacctcggttactgcgtctaaaatggccgccaatctcctgtcttctgaccccccgagtagggcaaaccccgggagggcgggggaaaatgagcgtcaggagagcagagtccccttcccccagccagggatcaggccctggcccccaaaagtacaagcggccccgtttgggtggctgcagcatggagggcaatgacacagcaactttgcagaggccttttcccctccccctagcggcccaacctcccaaatctgcttttctccaccggggctctgcaggccaggacagaggcccatcagggggccggccatggaataaaaacttaggaggctgagaaaatactaggccttaggaaaagggcagccagacattgctctcgtttattccctgcattccggaaaatcactgcctcccgatcctctatcctcccttcccccacatgagtcaccagggaggctactgctactcagtaatttgggaaagtaactctttcctcctttccgttccctcccccgcagtacacaaggagagaactgttcaggactgggggaggggatgagggaggcgatggaagaggccaccctggagaaacccgaaaccttgggagctgtgaaatcattccaggtcccgagcctccctcgcatctcagaccatgctgtctagaccccctactgccagcacccaccttgggcctggtttctgttcctaagcagacctcaagctttcagcttgtaagcaccccagcctggagtagacacgtgctcagtaaagaccctacaggggcaaaaggccccacaggccgtgtccacgtgaatgcacacaaattcggtaagcgactcgaagcgtaacctccagcctgcggtgtgacgactggagctcccctaccgcggacacaaagggcgcacagcaatgctccctccagaggctctggggagaaaggaagttggcgcctgggaacaacctcagttcacaacatgggtggccaactcctaaagcattcacatccacgggtaggggccacagccaccactcctcagcccaccgccaggtcacccctccctcggccgccgatggatcccttctcacctggctcccggctgctgtacccccaggggacgaatggaatagggggggccacaccgccccctaacccctttgccctccaatgggtacggaggcatgaggctggccattcccctccccccccatggccctctcccgctcgccccccctccacgctcccattggctgtaaaaggtttgaaggacaaatcttcccactctcaggattctttcctgaaccccaagaatccccctcccggactccccaccattggttaagcacttgactgacatctccgccccacaagggccccttctcacctggatcctaaagccttccagggggcctccaaagttgccctcggcttggtacggggtatgtaatccggggtgtcaacccccccccagaaaacgaagccgtgctgggggagggggcgtagcccccagcccctcccttcccgaacgggctgggggggtggggagagcatcg

SEQ ID NO: 584860 - DNA, 4001 bp, Homo sapiens
acctaagaattaaaacatcatatgggaatctcattgtttacatcgcagagctgaactaggaaccttagctctaccctcctgccctgaatcaaacttttaatgttaggaaaaaacaatccctgcaccaacaaacaccacacacaacccacccacccaaagaaagcaaaagatttaatgacataccctgggcattaggaacctgcacacacgggagagtgatccctttacccttctctgggaatccccgttgccagtcccttaagcgctccgtcaccatggcaaccctacagggcgctagaggtgtccgtgaatcccccctaaaaggctaacagaccgccgctagataccagacccaccaaacgccaaacctgctgttcaacctcactccactccaccgtcaaactagctctgcctgactcggttaagactgggccacggcggcattaatagcgtataaattgacaacctgtattcccctccacgagcagtagccgagccgccaccaccgttccaaaaccgtcgctcaattccctccgcgcgaccgagtcgacagctgcgccgcaacagcagcgcgccggggccgctcagtactcccaacacggcgccccacacccctgtgccgccgccctgcaacatccccttcccacacgcggctcgcggaaacgtacttattgtggggagtcacgttttgcagcatcttgaccgcaaggaaccggcgctgccctcagccgcggaaagtccgggtggcctcggttcccctcaccgcccggtccagcataacccgctaagttggggggaggccgttcctcttgggcctccaggcgacaaaccccctgcctggccggcacgaaagcagtctctttggggcctctcggagagctccgggcagcttggcgcgctctgcagacggcggacagcaagaaaatggcggcggcctcagctgaggcgggcaactaaggagggactgactcttcaaaagacggtccccgatctcagacaccgtcgtcaatatagcccgctgttggtctgcagggattccctcttcttgtcgggcccctacggggccgacgaggtcccgtttcgatctcggatggaggcggatgaacacgaaaagtggtttagggagccgccgcctccatctttgaaatcctcttgagggcggagtagagggggtggacagactccgaggattgggcggggcccgaaaaaggggagctccaggggcttctagggggtctgtactgcccgctgggaccagtcataggccgggacgaaggccatttccaagcggatggaggtggattgtaatggcggccccggacgactcgaaggctctgtatcggtaggcagaatcctccagctcgttctagaggctgctccactccagcacgaaatggcgccgccgagccccgcgccagccctttatatataggcggggaggaggagcttcgccgctcatgcgcgccaccctgcttgagcttttccccaccccctccgcgcgcgcgcgctcgctcacgcgggtgaagaagctgagtcgaaggggaaggaacacctctccgcgggagctttttctattggccagccgcaacgatgacgtcataaacttcatttccaaggtgtcagtcaccaggcagaagagtgccgcagagacccacagggaagtggcaacccgccacatctccaagccaattggctgagctgtggtccgccgactccagggaaagagggtggttggaagaggtgcggaagccatcgccccagagcctccagcactctctccccgcctccccttccaacaaagtcttcccaagcttccatgcacagcccaactggagactgccaagctcgagcaggtcgtgccattcgtagctcctccattggccaaagcagggaaacgggaggggtcgcgtgggcgtagcctgcctgaacccgccaggggtgtggccgcaagacgcctggcgggtggtggttctcggcggtaaggcagcagcagcgaagaatctgaaacgaggaaaaagacgccatcttagaagccgcggcctgctcctctatggcgaacagctacgggcttcagaacggcgatgaggggatctaacgttcccatgccccacagtctaaaacagtgttgccagagtcttataatactccactccctccctcaagccaaacgatggaaagacgagcaaaacattatttactactgtttagtcccaaagaccacaaaagctaaaatacgtctcccaaatttgcacgtccaagcacctttctaatccctccccactcacacctacagttaccaatacatttctgctcgttcgaaaaatcctcggcaaccctaaaagtgggattaaaatctccaaacgcatccatctaccctatacaatgcaacacacctcacctcttcctcaaactccattccggcgtccggctcagagcagaaaaagcaagtcctgggagggatgacttaagggaaaaaccctccccctccaggcgagctcggacctttccccccacacgccacatcacccccaaaggcacacccgtatccgcctctcaggggccctccgccacgggggcgaaagaacccccccgcccccccaccagggtccggagtcctccccacggagcggctggtccatcggtcagcgccagggaggagggcgagcggaggaggcggcggctgcggctcagactagccctccccctcctcccctcctcccctccccccggccgtccgcctccgaggaggggcaggagccattttgggagctcagtttcgccccctccccccaacttactcttaagtcttcctcctaacttggttatctaaataagggtgcagactctgtgaatcaaccagagcccagagtcaggatctccagagcatctctggggccgtccccgcccccttacaagagagtgaaaggatctcccccacccgagaaaacctgggctttggtggggcgtcccctcccccgtttcccctttcttcgctaccagggagaaaacaaacttgtgtacgtatctgggaaaaataatcaacgtaggtgaacaaatatacggtaagattccccctcgccccggaagggctcgtaagggcctaggtccttgagctgcaaccacgccaccctccctcctctgcagtagcccttcaactccaacctcggttactgcgtctaaaatggccgccaatctcctgtcttctgaccccccgagtagggcaaaccccgggagggcgggggaaaatgagcgtcaggagagcagagtccccttcccccagccagggatcaggccctggcccccaaaagtacaagcggccccgtttgggtggctgcagcatggagggcaatgacacagcaactttgcagaggccttttcccctccccctagcggcccaacctcccaaatctgcttttctccaccggggctctgcaggccaggacagaggcccatcagggggccggccatggaataaaaacttaggaggctgagaaaatactaggccttaggaaaagggcagccagacattgctctcgtttattccctgcattccggaaaatcactgcctcccgatcctctatcctcccttcccccacatgagtcaccagggaggctactgctactcagtaatttgggaaagtaactctttcctcctttccgttccctcccccgcagtacacaaggagagaactgttcaggactgggggaggggatgagggaggcgatggaagaggccaccctggagaaacccgaaaccttgggagctgtgaaatcattccaggtcccgagcctccctcgcatctcagaccatgctgtctagaccccctactgccagcacccaccttgggcctggtttctgttcctaagcagacctcaagctttcagcttgtaagcaccccagcctggagtagacacgtgctcagtaaagaccctacaggggcaaaaggccccacaggccgtgtccacgtgaatgcacacaaattcggtaagcgactcgaagc

SEQ ID NO: 584861 - DNA, 4001 bp, Homo sapiens
tgagggaaaggaagaagctaagaattttggccaccgtggtcctctcccaacccgaggtgggaatctgtaaaatggagccagggcacaaaagttaaggaaggacacatggagggcacaaggaaagatgccaagatagttacagcaagcggtcggatcaatcacaaaggaccaagatacccagaaatctggtagctaactgccctacaggggagaaatgggaactccctaggggccgcagcatctacactaggcagaccacccccattcacacgcattcttgctcatcccacacctccccggctccaatgtctctactcaccggtagacccagtttgacagcatccacaggctgccggaatggccatgcgaactgatgtttccacagagccttcatcactaccttgtgtaggtattgcagctggttggtaactcgtcctggctttttgggattggacacctccgggggtggtgggttggcaggggtaagttgcaaagcaggcaccgaagccattgtggggctctcaaagccctcatacaagagagagggttttcgaatcctcttccctggtgctgctgcttctgggcccagccccagcaaccctgcattcccttccccagggagcctgtaaagatgggaacaaaattagggcaatatcgtccaaatgaggaaaaagtgcatctgcacaatagtctgatgaatccaggtgctggccctagtgaggtggttaagcttatgccaagtgcttcttaagcagaaacaatatccaaacaatctgtggagcttttattgctggccccgccttccttttattaatatttttagtatactatctagatcccaccttcttaagtctgataggctctatctgttctttttcatattttaaaaaactcccaaattgtttctgacaaggcacgacatctcagaactacagccctatggggatggggcttaagcaaaatgggtggagttaagaaactcaaaccccaagcttcctcctcactaggggtttggtggttgccatggtggttgagcgccggtaaggaggaaaagaacaaattatggctataaaaaattccataaaatgctgataagacacagaataatccacctagatagaagagagagcaccatcttccacaaggtctgggtagttcacgccacaacagaacatagactagaaacccagaggaagaaccatatcaacttaaaaacaaattcagacaaggaagaatttgtcagacttcacagcccgtaacttccaggccctcaaaattattcgcaccaaatcagagtctcctcactccaaggaagtcaaaaagccgtacaaaacagtcaaggtcaccaagtgatagcccccttccacccacccactacacaacacgattccactaccagttccccctgtagcaccaactccggacaccaaacgctaacagtggttcatttacagtccctctggtgctcctccgatcagtctttcctaccacctaagaattaaaacatcatatgggaatctcattgtttacatcgcagagctgaactaggaaccttagctctaccctcctgccctgaatcaaacttttaatgttaggaaaaaacaatccctgcaccaacaaacaccacacacaacccacccacccaaagaaagcaaaagatttaatgacataccctgggcattaggaacctgcacacacgggagagtgatccctttacccttctctgggaatccccgttgccagtcccttaagcgctccgtcaccatggcaaccctacagggcgctagaggtgtccgtgaatcccccctaaaaggctaacagaccgccgctagataccagacccaccaaacgccaaacctgctgttcaacctcactccactccaccgtcaaactagctctgcctgactcggttaagactgggccacggcggcattaatagcgtataaattgacaacctgtattcccctccacgagcagtagccgagccgccaccaccgttccaaaaccgtcgctcaattccctccgcgcgaccgagtcgacagctgcgccgcaacagcagcgcgccggggccgctcagtactcccaacacggcgccccacacccctgtgccgccgccctgcaacatccccttcccacacgcggctcgcggaaacgtacttattgtggggagtcacgttttgcagcatcttgaccgcaaggaaccggcgctgccctcagccgcggaaagtccgggtggcctcggttcccctcaccgcccggtccagcataacccgctaagttggggggaggccgttcctcttgggcctccaggcgacaaaccccctgcctggccggcacgaaagcagtctctttggggcctctcggagagctccgggcagcttggcgcgctctgcagacggcggacagcaagaaaatggcggcggcctcagctgaggcgggcaactaaggagggactgactcttcaaaagacggtccccgatctcagacaccgtcgtcaatatagcccgctgttggtctgcagggattccctcttcttgtcgggcccctacggggccgacgaggtcccgtttcgatctcggatggaggcggatgaacacgaaaagtggtttagggagccgccgcctccatctttgaaatcctcttgagggcggagtagagggggtggacagactccgaggattgggcggggcccgaaaaaggggagctccaggggcttctagggggtctgtactgcccgctgggaccagtcataggccgggacgaaggccatttccaagcggatggaggtggattgtaatggcggccccggacgactcgaaggctctgtatcggtaggcagaatcctccagctcgttctagaggctgctccactccagcacgaaatggcgccgccgagccccgcgccagccctttatatataggcggggaggaggagcttcgccgctcatgcgcgccaccctgcttgagcttttccccaccccctccgcgcgcgcgcgctcgctcacgcgggtgaagaagctgagtcgaaggggaaggaacacctctccgcgggagctttttctattggccagccgcaacgatgacgtcataaacttcatttccaaggtgtcagtcaccaggcagaagagtgccgcagagacccacagggaagtggcaacccgccacatctccaagccaattggctgagctgtggtccgccgactccagggaaagagggtggttggaagaggtgcggaagccatcgccccagagcctccagcactctctccccgcctccccttccaacaaagtcttcccaagcttccatgcacagcccaactggagactgccaagctcgagcaggtcgtgccattcgtagctcctccattggccaaagcagggaaacgggaggggtcgcgtgggcgtagcctgcctgaacccgccaggggtgtggccgcaagacgcctggcgggtggtggttctcggcggtaaggcagcagcagcgaagaatctgaaacgaggaaaaagacgccatcttagaagccgcggcctgctcctctatggcgaacagctacgggcttcagaacggcgatgaggggatctaacgttcccatgccccacagtctaaaacagtgttgccagagtcttataatactccactccctccctcaagccaaacgatggaaagacgagcaaaacattatttactactgtttagtcccaaagaccacaaaagctaaaatacgtctcccaaatttgcacgtccaagcacctttctaatccctccccactcacacctacagttaccaatacatttctgctcgttcgaaaaatcctcggcaaccctaaaagtgggattaaaatctccaaacgcatccatctaccctatacaatgcaacacacctcacctcttcctcaaactccattccggcgtccggctcagagcagaaaaagcaagtcctgggagggatgacttaagggaaaaaccctccccctccaggcgagctcggacctttcccccc

SEQ ID NO: 584862 - DNA, 4001 bp, Homo sapiens
cacccgagaaaacctgggctttggtggggcgtcccctcccccgtttcccctttcttcgctaccagggagaaaacaaacttgtgtacgtatctgggaaaaataatcaacgtaggtgaacaaatatacggtaagattccccctcgccccggaagggctcgtaagggcctaggtccttgagctgcaaccacgccaccctccctcctctgcagtagcccttcaactccaacctcggttactgcgtctaaaatggccgccaatctcctgtcttctgaccccccgagtagggcaaaccccgggagggcgggggaaaatgagcgtcaggagagcagagtccccttcccccagccagggatcaggccctggcccccaaaagtacaagcggccccgtttgggtggctgcagcatggagggcaatgacacagcaactttgcagaggccttttcccctccccctagcggcccaacctcccaaatctgcttttctccaccggggctctgcaggccaggacagaggcccatcagggggccggccatggaataaaaacttaggaggctgagaaaatactaggccttaggaaaagggcagccagacattgctctcgtttattccctgcattccggaaaatcactgcctcccgatcctctatcctcccttcccccacatgagtcaccagggaggctactgctactcagtaatttgggaaagtaactctttcctcctttccgttccctcccccgcagtacacaaggagagaactgttcaggactgggggaggggatgagggaggcgatggaagaggccaccctggagaaacccgaaaccttgggagctgtgaaatcattccaggtcccgagcctccctcgcatctcagaccatgctgtctagaccccctactgccagcacccaccttgggcctggtttctgttcctaagcagacctcaagctttcagcttgtaagcaccccagcctggagtagacacgtgctcagtaaagaccctacaggggcaaaaggccccacaggccgtgtccacgtgaatgcacacaaattcggtaagcgactcgaagcgtaacctccagcctgcggtgtgacgactggagctcccctaccgcggacacaaagggcgcacagcaatgctccctccagaggctctggggagaaaggaagttggcgcctgggaacaacctcagttcacaacatgggtggccaactcctaaagcattcacatccacgggtaggggccacagccaccactcctcagcccaccgccaggtcacccctccctcggccgccgatggatcccttctcacctggctcccggctgctgtacccccaggggacgaatggaatagggggggccacaccgccccctaacccctttgccctccaatgggtacggaggcatgaggctggccattcccctccccccccatggccctctcccgctcgccccccctccacgctcccattggctgtaaaaggtttgaaggacaaatcttcccactctcaggattctttcctgaaccccaagaatccccctcccggactccccaccattggttaagcacttgactgacatctccgccccacaagggccccttctcacctggatcctaaagccttccagggggcctccaaagttgccctcggcttggtacggggtatgtaatccggggtgtcaacccccccccagaaaacgaagccgtgctgggggagggggcgtagcccccagcccctcccttcccgaacgggctgggggggtggggagagcatcggggccgcgcggccacgtcagcagcacccagattggctgaccggggtcacgtgcccgcttcccccccaccccccgcctttcccccagccacgaggaccagctttccgaacgttcctgggggtcgcgccaaggggccaagggggccgcatggcccaggcctatgtcccgaaacccagagcgctataacgctgctgcttgtccatatccccagcttcctatcccgcagtcctggactctgtcccccccactcgcctctccatacgagttcagcatggctgccgcagaccaggaacacacacagcgcaggcgcaagggtgcgccctgactgggggagggggaaggagggccagaggctgcggggagagccgtagtgcgcaggcgtccggaccggaaccgcatctccggcggcggggcttggagcgcgcgcttttcgtggggcgggagcccgcgcccgggtgctgacctcctgcctcagcgccccctcccccactacccgcggcctagcggggtagcctcgggtggccaggcttgtttcctcctcggtgggtgtaaggtgcggcttcgctggtcctggcctgaatccagcggaagcgcacgctgctgagctgtcagcggaggaaaatggggcctggacctggagatatgagggtctggagagaggggccccttccctggtgtcgtgtggtgcgaccactggagagggagtttctcgccctcgtcgcgcctgccgcgcggagagataaggtgcggaccgcagatgtggacttcgtatttggctttagtcttaggcagccttaaaatctctccgtgccgtgaacctacgctagacttttctttagtgagacctgtgagtccctggaccgctctaccttctacgatatttaccagctgataacttttccttctctatttatttcgtagtggaccgtttaaacctcttatactcttaaagttatgatctctcctctcccaagcttgagtgaattccccccaaaattttggaactggtaacataaaatgttatggtgattcagttgccagctaaaaagtaagcctttaatttgtcattagccgataacctctcccttgattacccagagtatggtccagattttcacgctgcagaccctaatctctcctcaccgacagatggcacttcacagaacagaaaggccaatttgcagaactggcttcccatttcccacctgcaaactgggtcaattgtgtattcctttctcatttcactagaggtcctcccttcggtttgaggaaatcctttactattgacctggtcaaccttctctgttacccggaagctgtcttcccttctcccccttttgacctttttaaacttttctcttggtttccccgctgacagaaagataacaaccctctcaatatcgtgccctcttagagactcatgtctctcggcttccttgcacagccaagacctgaaattgaaattatccttactatctcaattctttgtcacattctctttccccatccccactcttcaagctacctctgtcaggctgctaccaccaaaacttttctggcagatgtcaccaagaacctcctaactggcaaagtcaggaagcactttacagttctcactttatttgacctctgaggcattcgacatttgatcatgtttccttcctgacattctctctacccttgacttctataccactctcacttgtttcttttcctatttgtgtaactgttcctctccagtctcagtagatttttcttccttagcccctttttatgtgttgatatttgctgtgattcttgtttgcttctaattttgttcaacttctctaggtaatctgactccatggctcaaagcctctgaagtctgaatctttagttcagacagctctctaagctaaactttctactaaatattcccactgggataactctcagacaccagtatgttcaaaattgatgaaatcactatacactctagacctgctctttctcttctgttgtcctgagtaatggtggctgtttaaccacaaagtctgtaatctgggagcctgttcttgatttccttttctcacacccttacagactcataattttgcctcttaactatccatcaactcacccttctgtcctaattctatcacctgagctataccaacagtctcctaaattatttgctagacacatggctatttggatttaaattaatacaattttaaatttagtgtctca

SEQ ID NO: 584863 - DNA, 4001 bp, Homo sapiens
gatacagggccccatggtgtgggcagacttggaaggatatgaacaaagagaagatttcaaagagaaaaacaattcatcgccttggttgcagggtctaccatctatataaagtagagacggtgataataaaagcactttttccaaactacaaagccctcttacttttaatatttctcacaactaccttaggagatggtgtagctattatcatctacacagaagctcagaaagatgtcactcaacgtaaagctagtaagtgataacgctacaatttgaacccaggtcttccgatgctcaattcctctcagtgggaattaagaacaccacagaggtgctatggtctggtacaaaacgaggctctggggcaatctaggttctaatcttggccctctgtgacctagagaaagtcccttaagctctctatgcctccatactccatcagtaaaatgagggtaacacaatctagctctctaggtgctacttgttaataaggtattattaacatctttacttgaaaggccttccaatcccaaagtgtgactgaaacaaacaaaaaaccaatttggctgaggagcagtgccaggcgggctggcacacaccccatttggagccaaaggaaacagaatcatcgcagcaattctgtccgggttccagaggcccttggctactggattccttacaaatgccaagtccctgggggcagacagggccaacagacctgcttcatcacccacccctccaaaggcaccgaggccctagaagaggtgagaacatctgcctccacaccgaccccaaacagcgcagacaggcggtgcggcgcccactttcatgaaagccgctccatcttctccttccccacctgccacctcctcggctgctcaagcatctctcgaccatgcaagactctacacagacgtgttttgtcccacccacgcctccagacaccggggagaaactctagagggggaagggactgctgatgagggaaatgaaaagagtttcgcccacaaggagcttacagtctagacgagttttttggcgggagtttctcaacctacacagcccttcccacatacacacctccaaaatatctccaacaacccccgcccccccagatttcccctcggcaccccctgacccctcgctcacccaccccatccaggtccccgaagaatgaggagcttctgcaattagactgtatcccctgcacctcacacaagatactcaggagacaaggaggaccccagccaaggctcctgctcctttaagggggcacctcttccagaagaatcttgacccctcggagaagaaaggagggaaataacatctcctcagaggggaggggcgagcgcaccagagacagcctgacgtggagtccgaccctcagacagagaaagcgagcgccagcgaatgagcggggcggagaggcgagaacccattggctgcgtcacctgcccgtcagagggacccaggggacctagggccgctcaaggggcgggactctcgtctggccaggccaattggaaggcgtggcgggggcggggcttagcggctcggaatccagggctggggggggagacaagatggcggctgcgggagggggtcctcgcttctcagctcccccgctcacccgccttctccttccctgccgccgccctcgctccaggagagagctttcgcaccgcccccgccctgctcggaaagccccccgcttctccggtttccccccgtgcagtccctggtccccgaaggccccgatgcccccgcccccgctctgtccggccccgctgccgcccccattacctcagccgcctgcccggccccaccgttcggggcccctgggcgcgggcgggcaggccgccgagcaggtcggcgcggcccgggaagcggagcgcggtcttctcccgcgcctgcctccgtggcctccgccgtgccccctcccggcccgcgctggggccccggcccggccgccgccgccgctcccgggggaggagggggaatggagccgccgctgctgccgctgccgccacggagcccggccgaggggagggagggatcagcccccaggcaggatccgcccctccggcctccccccgccacctccaccccttccctcgctccctccctgactctgcgggctctcccgctgaacaggagcgagagcgcgaaagagggggaaacgggaaaaaaatccccccgcccgtgcctggcgcggcggcggccggggcggtgcggagaggagcgcggaggcgccgccgccgccgccacggggcaccatccccggctcggcctcacggtggcggtgcgggcgcggcggggacaccgagcaagagaccgggtctgcgcccgccgcgatccctgcgcaccacggccctgcccgccacggggcgagcccgataagagggctgtggacgttcgggtctagttgggagagacaggggtccctgactcttgagcggtcagtcatttcctccccagtccttgtgggtgacgtggctacggtttggagcagcaagccccctccccgaactaaagggcctctccaaaggttaagccagggcagtcattgaggtcaaaaccaatatgtagtttcttgactgcaggtgcctgcacgactcccagaaagtcgcgtctcccctaacccccatgcccaggacctgaggacaaaggtctagcgattgtccatcccctcccccagtgaggacagccgggaaagacctgcctttgttgtgtacaggtgagcgtcttgttccgcaccacacatcttttaaaaaaaaaaaaaaaaaatctgactttccgtttaaaaggagtaaacaaaagtttgacagtctgcttaagcatgcctggtaactcgtctgtcactgtgggcatgggaaacactttaaacctgacttggttaatttaatgcattaggcggctttctaaaagatgcttgacaaatggcagcatcagaccaaactggcttttgttttgatctaaaaaaacaaaaaaataaagaaaagggctccattgccacccccttttgcctgtaaactggaaagcttacctcatgtgactgaagtcttaagcaccaatacataatgatgtttataaaggacgtatggataagctgcctgtaaatgtgaaggtgagtgacagtttgaaagtgtttcctctgctggcacttgtggtgtagctggtgagactcaatttctttcttggttctgatgatcaaggacatgtattctagagtcagaaggatgaaggataaagtcttaggatccaaattttctgaatgtttaaagtgaacatactgctactttggaagtatagatgttatactaaggaatttaaatatagagagtttcaaattcaaaagtttgattaaggaagctaatttgtttccaagtaaatagcatcttctggcaaagagatagtacaaaaatgcttctgttaaccaattttttaaatgcaaggggggtggctcgtggagctaagcaagggcaggacaatgttttgaaagctgtgaagatgaaatagtatgaattaatgtcaagtgttctgaagctagggggaataatcatttggagggaaggtgtggaagaaaaagatgattaattgtggaagagaaagccccagaggcaagaaaatattgcaattacagtacttgtagttaagaaaaaaaaagtctgaaaactaacagaaactattaaaacatgaaatataataatcatttatacatatgactagtaacttttatttcttgatggatgttctcaaaatttatttagcacaattcccatttgcgtgatcaggagctatctttttccactaaaatgaatgaataaataccttgagaaaatgcattggtttctacttgtaagtcaacgatttaaatgctgttgaaaaggccttaagtcaacctaatgcatgtgatttttttcaggtttttctattcaaagctttcatattaagaccttattcaacctaagtgtttctcttccattttcaacttctacttt

SEQ ID NO: 584864 - DNA, 4001 bp, Homo sapiens
aaagagttccctaactcagcctacacatcctatcttttctgattttctaccacatttatagtcctcaaacagcactggttacctgctacttaacttggttttataattattttatacatctcctagctagactactgctctcaaagggaaaaaaaagacaggtcttctatgtcatttttcactccataatcctcctcccacacctatcatgatactgggcagagggaggcacatgtattaagtacttgatggactgaactcaatgctttctatacatagatacaccacttgagcatagtgtgctatataacaaatatccattgcatgcctactctgtggcaagcacatttttcctatgtgttagacatagggcaaggaggaaaacacagatgactcctgtcctaaaagctattacagtggagggaggaagacactttgaattccgagtaatctaataagtgttacaaagcaaggttattactggttccaagaggtaacatactttacagattctcagttatgaaacagaatcatagaattttagacctaaatgagaaccttgaacttattttcctctatcctcttacacaaaacattagatttcagtacagcctatcttttcactggttctacaaattgccttaatcaacagaaagaaaagactggcttcttccctgtctccaatattcctcgctcccaagtatggtaaccacaacccctatacatctacccatgatagagtccagagcactgagaagacagcacagggctgaggatgagctacacctttacatgctgggttctcccatcatcaacactttccgcccacacagtgaacagaatccgtattttctgcccagaaaatagcagcctgtactgcctttaggaaaaacaaacaaaacatgcttccatacttccttggatctactaatgacaaaagcacaacacggttctgggaaatatagcaagataactaagtctatgaggaagtaagaaatgaggatgcctatcagcaccttggtctcaaaatctgtaacaacaatgtactaaaacgccaaggaaacacatgcacatacatgtgaagttagaaactctaggcaacaggttggctgccccggatctatactgacaggtcgccctcccaaggtcgtgggtgtgtctgatgccgcacgcaggcactgattcacaactctctccataacaaccagctcctactcagaggctggccagggcaggggagatgagggccccagcagtcccaaactttccaaacccccaccccggggtcccgggtttcgcctcctcagtcccaggcaacgtcgtctcagacaggatacgagactgctagggaacctgggctgcccctgattcgaactcctctctttgggaggctggtagagccaccccgaatccccgaaacgtctacttcccactacaccttcgtggactgcgaacgggacggctaccgctctcccagagcacccgggcccaagaaatgaccctcgtcaggccccgtcccagctcctcccccgcccccggaaaaagcggcggaggggcggggggcggtgcgcgcggatacggcgggggcgcgcgtccccgcgccgcaggtgcggccaggccccacctcccctgcaaggacccggctactcaccccagcgatgctcctctgagaccaagctgcgacacagacgcctcttccgcccgctccgcacccctctctgcgccaccgcccccttggccgcttccgtggccgccgtcctcgccgccgccccggctgctgcggcgcgcgtccgctttcacgcactccgccgtggccgcgcacgcgccactgcgcgctggcgtcacttagcaaccgatcgacagcgggctgctgggtccggcgatgcaggcccagaaagtcgcctaaggcagcttccgcggctttttcgcatcggcccgaccctctgcccctccagaacagggggccccagggtgtggctgccctgccggcacctggctccgggtaagtcgagtcaccacacgtcactgtatggcgtcaccggcgcacgtcactacggatgagaaggtcctgggcgcctgtggagtgacctcgtccagaccgccgcagacccgatcggcaagttcttggaggtgcaggaaggttctccaaggagtaggaccagaaagggatgagagcgcgagcgcggttaatgtcgaggctgctaagtgatgctcgttaatttcgcagcagggtgtgactggcccagccttgactctcagtttcctctctcagtaaatgggcataataataccggtccagcctacgctggagaattgtgaggtgaaaatgaaataaggtatgcaaaggtactttgtaagtataaagcccatttgacttggtggctcaagcctgtaatcccagcactttgggaggccgaggtgggcggatcgcttgagctcaggagttcgacaccagcctgggtaacatagtgaaaccccgtctctacaaaaaagacaaaaactaaatgggcatgttggcgcgcgcctgtagtcacaaatgctcggggggctgaggtgggaggatcgcttgaacctggggagttcaagattgcagtgaaccgtgatcgcgccgctgcactccagcctctgcagtgagagcaagacactgtctcaaaaaaatgtatttatctatctacatagataagagtcctagaaatccgggtgcaggtctgactgtagctggtgtaggaaagtcagttatccccgacgctggagcaagctaggggaccgcccttgcagttgttggaggagacaaattgggaaggacttaattccgggcaaaggaagcttcatgagtaaaagtagaaagtgaaaatggtcaggaaaagcaaggcttggggcagggagacccatttttaggccattgcagtactccagacaagtgataagaacattaaacaaggcattggcagtgggaatagaggaggggatagatgttagcgccattaaggtggtagaattcacagcactgagtgcggataaatgagtaggccaggtttctagcatgagtgctgaggtagacagtggtaacatttagcaagatggcaagctacatgagtcttgattatccacaagtgtctaagttactattatagatagtgatggtgacatttcttaggaggatgaccagatatgtggagtatgatgatgagttcaaatatggatatgtttgttagggaaacatttactctccattcacaatgtctttcttccatatggaatgatatccattagtgtaatactctcctggtttctcttatacctgtctgcaactcactcttgcctagaggagtgacttcctgattggtgaacttaaatgggagaaactggacatgtggcatctatcccattctttttctcttaaaagataactatcttcagggaactgtcctggtgttcttttccgtttcttctggagcagggcctgtgggtagggacaagggtgcctagtccagggctacaaagagagtatatgtatttaattccagagtttggcattaggaagctgtctgtccacagataatatttaataccagctttgtcagctgtgttacacagaataatgatcccccccaaccaaaaaaaaaaggatgaccacaccctaatactcagaacccatgaatatgttatattatgtggcaaaagggactttgcagatatgattaaatgatgtatctagggagattatcctggattgtctgactgggctggaggcaggagggtcagagtcagagaaggagatgtgatgatggaagcagaggtcagacagagatttgaagatgctatactgttggctttgaagatggacccaagaaacgcaagcaaattgtagatgcgggagaaggcaaggaaatggattcttctctagcaccctaagaacacagccctgccaacaccttgattttaggacttctgacttctagaactgcgagataagaaacttgtatgttttaaggtaccaa

SEQ ID NO: 584865 - DNA, 4001 bp, Homo sapiens
caacatcaaaagtcatgcagacattctgaatgttaagtatggtgcagagatactcagaggtagaatcctctagctctggaaatccatatttatgagccaggctcaaaaagtccagcagcacctcctccttctcatctgtcagcgttgcccgcccagtgtagatatatttgagtagcattgtgaatgcttctgcagtggtgtcttggagaggaatttctgcttcaggctgagactctcgcattccaccatataataatgctctgcacatcagggaagaaacacatgaagaaaccctcaaataggatttgctacaaaatattggaaataacagttatcaacattatgcaaatataaatttttttaatgacacaaagatccaagtgaaaaaatgcaaagtaatcatttaaaatggttctttacaggacacaagaggaatgattttaaaactatttgaattaattctgtaagccactgaactaatgagatactctgaaagctcaagatatgtgacagatattaaatagaaagatgagagtgatcttttgagaggcacaatgaagttgatataaagatgttaaaggtcaataaggcaatttaaaaagtaaaactctataggaaaagatataatcagataaacactaatatgatgccattctcccctgtaagactggcagaaattaaaaggcttgttaatatcagtgctgcaaaagcaatggaaaaacatgttctttgatatgctgctttgagagtataaatggcagccctttatggaaagtaatttagtagcatctagtcaaatctaaaatgtgcatacccttcaactcagtaatctctcttttaggactcaattctagggaagtaatacagtaaagaaaaatgtgtaagaaaacatactgaaacactagtaaaaatctgaatgtccatcagcagcaacatggttaaaaaaactgtgatatacgcattctatgcagccattagaaagatcaagggagatcaacaggtactgttttgaaaacatgtccaggatatggtaggcaagtaaataaaattgcagatccatatgtactgcattaaaaaagtacataaccaaatatttacatgtttatgcacatatgtctacatcggtatttctttaaatcaagaaaaatcagaagaaattcatattaaactcttaacatcacttatttctgggaaatggtattagatggctgggagacaaagactttcatctgttactttataaattaaaaatgaaattactgataggattacagtgattttttatttttttcctttcagattaaacaaaaagccctacattattgcttatctaaaaaaatgaaaactagacaatccagttaggtaatgaatttgaatttctacctctatcaatcaagaggaataatatgaaccaattaaacttccaatctatcaggaaagaaaggacgaagaggacaagggagaagtgcagaaaagggagagaagaatacagaatgagaaagaaaagatgcaaaagtgagaggaagagactggaaataagaaagagattctccgtgttgctaaaattctcagagtaggactagcatttcaggtttacctacctggaacttgtcccaccctcccccaggacctagcattcttgcttgccccagaaaaatagttgaaaccacccagaaaagattcatgaatattctgagcatacctcttcactgggttatactctgcctaaaagtacccctgaaggtttccattaatccagagagcatccaaccattaccctaaaattaccaaattaaagaacttctccttctcggggagacctcaagacttatccccaatcctgtatgatccatggtatttatttggattctcaatgctttaaaagtggttttgatgaggctcccttggaacaataaacatgaacccccaacttcaacaaggagacaagcacagaggttcaatgtttactatgaagtttcctcctatacaattccttatctgggaattgataggctattatgacagcacttaggcctcttctgacagctgacaattaacattcctttgcacatgaatacagtcagcattgagaacctgtctaaggtagcattgagcttagctctaaggtagacttagaggtagagcttagctctaagatagtctaaggtagactctgagcttagcttagtgagccagcaaatattacgaaggttcaatatctacaaagacatcaagaacaaggtcaataagcggggggagtatattccattcactcaatacgatcttcaaatttctcaaagtatttgagttttttttaaggatatactaatcacctaaaagatatcctcatagagttgtttcaaattatttttgaaagaggacaaggtacactgtactaataaacaataaacacaggctgagaagttctgacttaataaaaagtgggctcttggccaggtgcagtggctcaagcctgtaatcccagtactttgggaggctgaggcgggcggatcacaaggtcaggagatccagaccatactggctaacacggtgaaaccccgtctctattaaaaatacaaaaaaattagccgagcgtggtggcaggcgcccgtagtcccagctactcgggaggctgaggcaggagaatggcgtgaacccgggaggcggagcttgcagtgagccgagatcgcgccactgcactccagcctgggcgacagagtgagactccgtctcaaaaaaaaaaaaaaaaagtgggctcttataaaacactttaatagtaatgactggaccaaaattttaaaaagaggaagaaatataaaaggaaaagtgtgcagaggacagaggctgataacaaataatggctagaccaaggtcggatgccttggcagagttgaccactaggaagaataggagagtgctagaacttttaacagactcctcacttttctaagctcccggtttcatctacagtggcattttacatgtgtaagattggaagttcatgaaaaaccataggagctctagctacagagtaaatatttccaggagacacactttaccacaacatgtctgactctaggtgttgctgtcttgcttaattctgactataaaagccagacactgcagttatcactacaaggtaattgaaattttctctaatccaatggaatctccattttagataccaagtttcccagataaatctataactctgtgaaccatctttatccttaaaaatagaaaaagatccattatcatgcataaattataactcactcagtaattaattcagtgatgactcccttttgacaaatattaggtaaaatgtagagtagttaaagatcagcttaagatttataaccctggaaattaaggacccaagtaaccaacaacagctgcatacaagtgcacgtcttagatctgctgggttactaacagctcctagacctcaaaccaaggggtatatgtgtccattagcaggtccacagggcagtctacctatgcaaaaagaagctttagtcccattagccatctactgggaggagacagtgagggcaacgaagacttagcctgagaaacattcttgagaccttgaaaaatggttgattgggcactatttggtctgggaatccttctaaccctttaattttaaggtggctcctaaaggaaaaggtgattctcaaaaaataacaaagtctacaaggatgaaatcttcatagatattgaattgagagactgcaagactttgtcattatacttggttatatatttttcatagagcagaaaataccagtgttttctacaagtgaactaaattttcaaaaaaagtattacacacttaccgaaaatattggcacctggctgctaaaattaccctgtgggcaggaaaacgtttcttttccaccacgaatgtgacgtcgccatattcttccccaatcaacaaggcaccaatatgttcagacaaaatgtgcacatgatcaatttcccccactgcagtaaag

SEQ ID NO: 584866 - DNA, 4001 bp, Homo sapiens
aagtgagtcacccgccttggcctcccaaaatgctgggattacaggcgtgagacaccacatcccactttttttttttctttttttgacagcacactctattgtccaggctggagtgcagtggcaaccatcagcttactgtaaccttgaatttcttggctcaagagatcctcctgcctctgcttcccaaagcgctgagattataggagttggccactggtcccagactattttattcttgaaaaataatcttagataaaaacatcctcagttttacagtaaaaatcagaaagagatttgcttgatgtcattcactaggaattgagaaagtcagacctcaatgcgtactttcctcctcaaagcttattattttctttattgtttccctttgaattctggcttgaagcaaaaaagggaacaagaacagaatcttttctatatgaatcaggaatgtgacaaaccgccatgctctctaatcttaggatgtcagtctttagaaactaatccataagccagccttaaagtgtgtggtatgctcaccacagccataagatgtgtaatggtgagaaatacaatttaaatgtacaattcagggactcgatgaagtaaattatggtgtacttgtataaaagaatgttatataactcttatatgtatttaattatttcatgaagaaatgcttaccctattattgaaaaagggctggagataattgaaataaagttctacaataaagacattgcactgttctctccatgttcaactcaaaaccctttctcactgatttcctactgtaggaccttcagtaccttctagctgtggagtcctaatcaggggaaaacaaagagataaggcagataagctgcaagtctgcctttcttcatggtccagtacacagccctcctgtgcaaataactcacagtcatccttcctgtgtccaactatcaccaaacacctgcaagttagctcactgcaacctttgccttatagatactgcacaaagccatcttcaacagacagcataaaaactattctataaattatccagcaagcctttgtttcctggcagtcagcttctcttttgctgatcctgccttttgcctcctcgaaaagtattttcatacttttaaaagtaaatctgcctttctttacaactgtcttggtaaattcttttaccccccctcgcctcccgcccagatagtcgtccctccccggcgacatcaacctaaaagagattttgagaatgaatctgatggtttccaaagtaactgatccatacgaaagtgtatacagcaggggagtcgtcggagaaagtcaaaacccgtctactcaccagccaccttcagatgcaccagggcttcttcgtagcttccatcctccctgaaaaagcacgtgtactccccgtcgtcagagactctgacgccacggatcctcaaggccacgcgccccttggcgatgccgtcctggaccagcgtcgcccgcccgcggtactcgggcatctgctcggcttcctgctcgcgcccgtccctatgcaccagcacggccggcgaaaccttctttcggaaccagcgtagctccaagtgctcggcgctcgcgttcggagacaggcgacagggcagctcggcgtcctcacccacaacggccaggatgggctccgggggtccaatcacgtcaaagggagctgccgaaaaacgagcgggatcagacgggatgtggagatgggaactacggacagacaccgaccagattcccgccaaagcgcagtgccccgcgctctcttactcctttgacagctgagtttgtctggatccagtggaggtctccagggagagccaagtgggattgtttattttacatttattgatatatttcaactatgcagcccagagagagagagagacttacctgaatccagtttgggcagctggaggagaatgagggtgagcagacatctggggagaccggagcttgggaaaactgccatctcccacccttctggagcagcaagataactgatgtgagtcccctcaggagcttcagcctaggagatgaatggacaggagacaactaccggctctgtcaaccctccgctttccaaagtcctctctacagttctttccagctgcaagtgttctggtcatttgcccctgaaacctcctctcagcctccatccccagtatggatttttagtttacactgtggttatcaccttcccacccactactctaactctaaaacttaggagaagggaactgtgaggcataacactcattagttggttgcatatcgatgaacaaatcttggaatcactgcactaaaaaaaaagtctcctttttatttatttatttatttatttttgagacagtcttgctctgttgcccagcttggagtgcagtggcatgatctcggctcaatgcaacctcagcctcctgggttcaagcgattgttctgcctcagcctccggagtagctgggactacaggcgcgcaccaccatgccccgctattttttgtattttcagtagagacggagtttcaccacgttggccaggctggcctcgaactcctgacctcgtgatccacccgccttggcctcccaaagtgctgggattacaggcgtgagccaccgtgcctggccaaagtcttttttcaaatacaagaatttggtatttgcttttggcaatgataataaagataagggtataaaggcagaaatggagtccaaggaaatgaattggagaagagagaaaagatgggaggagatggagcaagaagcaggagctgaagcaagcaaaagggcttgaagagtagagggcctaggaccaaggagaaaggagctggagggagagaagtatgctatgcccctctggctgctcactccctcagggagctgagagtaaccacacatactgacctgggtgatcttggagaaaaaggcacaagaggccactgctaccaagtgagaaagctggctgtggcccccggggcaaaagttaaaagccagcaggaaaaggaagcgggaggtgctctcaggaaagcctgcctccaggtggcctggtatattcactctgaggaaaaaaaaaagggagatgaaaagtttttcagagagatggaaaactggatttgtggtcttcagctcagaaatcaagatatgcattgatgagctggaccaaatgaaaggcagaaaagagaaaaagagaagagaggcaaggaaacacacaaatgagatgtgatggcttcagccagttatttcctctttccaagcctcagttctttgatctctaaaatggtaataatattgatcatacctttcttgaagaggtgttgggaggattaagtgagattaagcaggtaaagtgcttagcacatagtaggaactcagcggaggataaattgttattctattattatttctgcgggttgaaaaatgaaagcccagaggccaaggtagcagtagcctctgtctatagccatcttcgttattggagcgtccgtccaccttaggtgctgtgtctgttggaacaactccattaaaggccagtcttaagggtaggctgtgaattctgtttacagggcccaaaagttgcctccctgacaattatttcttttgaagcaactcatcatgaggcctacaattccttaatttatactaaacctacctctcattgttatgaaaaaatttaaaaatacagaaaaatatttttataaaatggaggtcacacttaatctactaactaatgatagcctcaattcacattttggcatagtccttccaagatttattttatgcttatgtatatcataaaagcaatcaattagactttttgtgtaactcaaaatattgttaatagttgtataattgccatgattgtgggacatttgggatttttttcctattgtaaataatacactttatatataagtctttatttgcaaattggataatgtcctgataaactgtttaataaatttccagaaatagagtcatcagatcaaatggtataag

SEQ ID NO: 584867 - DNA, 4001 bp, Homo sapiens
gggcctgaggttaggagagaaactttccccaaagtcacactgtgccaaagtaacaaagcaaaatgaagcgacgcacctgccactacgaggtgcaggatggcctcatcgtaggacctgccttcttggaagtaacagcggtaggtgccgttttcctgggctgtgatgttgtgtatgaccagggccacgctgcccctgctgatgtctttgctcacaaaggtggttcttcctcggtactcctccatctgctcctctgttctctctctgccacctttatacacaaacactgcgggggagaactgagaccggaaccaccgcacctccatgtcctcagcatttttctcgggtgacagatggcagcgtaacgtagtgttttctccaaccgtggccaagatgggatcagtgggccccacgacaataaactgggctgttcaacaaaggggtagagtcagacaaagacaccagccatcacatctctaaggcaagaaaggaagcagatattctagggacaaacttattttttccatggccatagggtctctttgggctgagaaatctggggaccagtagctgtggctagtcgacagcacccctgggagcagtaactataaagtgtgcttctgcttcatgaaggaaaccctgaggaacctgccctgagcaccctctgtccaccctgtgcccttgaggggattttcctcgatttcccaatctagtgctgtgcctgagtgtactgtaaacttgagccgtgcaataggacacatatccactagctagttccaactgaaatgagctgtaagtgtaaaatacacacaggattatgaagatttaaaatttcaaaatgttgactatctcattggtaatatggtatattaactaagtatttaaatattcgtatttgattatttggggcgaaacaaaatatagtatacaaatttatttcatgtttctttttactttttaaaataaaaagtaaaatttaattttttttgaaaatttgcaattgtacatgcactcggcctttgtgcctcactgtattccttttggacagtgctggtataaattcaatgaacatgttcagaatgaaagggtaagtcaacaactccacagtccttctttctttccctttgcagactacagggttgatgttcctttctgataggtgacagcagcaagtggcacacatccctacctgagaccagtgcacacaggctgaggaggaggaggaggagggaggctggccgggagaagtgcagggcagcagctgattccatgagcacccagagcaggcagggacaggaggcctagggttacagaggagaatcagcctaggagtcttggcacctcagtgctggtcgggcccaacctctcccgtcactcaagtaggtctcatcagtgccccaacttcagggagtcccctgcatccgaaggctcaggtatgtcccgagagagggattccttaaacattccatgaagtaagccatcaatgccaagatcaagggggcctttttccgccctcctcggctcacttctctggccagaatgcagtttcttcagttgtcgctggattctaccacaccctcctcccttcacttcctcctccccgcgacccaggccgggcagcctgaggcaaagacaggcgaggccgcgcctccccaccggtgggctttccctgtcccaggaccccgtctcgtgtccacagcagaccccgcttcccccacctactgtgcccaccccggagctgtagcgcctcccctccgtttcctaccttctagaattaaacgttgctttttcttttctccgctggttctcgacgattctccagtcgtccctcttctctccaatctgcccaggggcacaggcactactagacacaaaccttcccaaaagaggagaaaaaattgttcttccccttctcctaggtcgccatgtttggagatgcaggaaacgaaatctggtctcctgggcttccacagtcccaagagttccctaagtattttagagcccaggattggccgggtgtgagtgaaccagccaatggtgtcgaaccttatttctcagcagttgctgggtagaatacaccgaatcacaaatttcaagcagcaaataaccttttgagattatcgggtctttttatttcctttttctttgttcgaaagcaagactctctctctctctctttctctctcaagactctctctctctctctcgctttgagattccttggggagattccctggggtttgtcactgaggtcggtggctttgctggtgtccacaaggagaggcctctctatgtagagggcaattttgctggggaggaaacatgagcaggaaaacgtaagccgccccctttccaaagccagaggactcctgttcaagttgctggctttggaggttgggcctggagcgcaggagggcttgggggaagctggcatggctggagcgggaggggtagcaaaggaaaggagacagcagttgcagtggctgttatgaaggccttgccattcattccaaagctatcggataagaggtgctgagaatcctgactgaggatcaaaaaccttttccctcagggaggtggcattctggtggtggcagaagatggaattgagcaaaactttctagttgtccttcaccttctagatagtaggtggtcaggttgggtccaagagccacacacagacacacacactagcacacataccatcctcccgtaaacatcatccctctcccaaaggctccaatcttgtaattgtaaagatatcttccagaataatcttcccgaggcccagttgtcaatattcccctcaagtgtctaaatgcttagtctggaggcctccaattcccttctgattcaattcaaaactttgcagttaatacgctagcaatggctccacagtggccttgcatcacaacgttgcactccctgtggccagtgctccttttcccatgccatggctttcatttcaattgcttgctccatctctgccccgtgaaatcctgcccagccttcgtgcctacttcctccaagaacaactctgaatgttcctgcctgaagtgttctcggcctcttctgacacccaaatcttttgctgttcccacgtcctgtcttgtattattgttactcaggtatccactgtgtctctgctgtgacaggagtacctgcttctcaggacagacttctgcaggatgtgattcctctcaccttacagggcccagctctaagctctaagctctgctcttagctgttgttcaatgcatgagtgacatgctcagggtaaggtcattcccaccacatcatggcccagttcctggagtcatttggcaccagagtgcgagagagaggtgctagcaggattaagccactctaggtcaggatttctaggactggaaaggaggaaccagtaggttccttctgcagagaaagctctttgatgagaataagctaaagaaagctctgagaactcttttttccattggactgacccttaaactgtctctttctcatacagtagtctcacacgtcacctgatgtttctggattataattcaaataagattctgggttgagtggcttatgagggtaaatacatcagtattagaactgtatgtatatgaattccaaacaggactgggcagctgttgagaagaggcagaagagaaggatgaaagggtctaacagcatggccagccaggatgagatctgactttatatttttttacctgaagaaataaggcccagggctttgaagtagcccttttgccagaagcatccagctaagccaggcttcagcctctgccaaagttgatctgagctagagggaaacgtgtgtgttctgagaaggaagaggatcagttgacgatggggtagcttagaaagaaatcaggctctactggggtgtgcccggttagatagtaacaacctaacccaatcatgctctgtagtgggagggatagagacaggaagggtcacgttggcaaggttctttatggacctgccaaccc

SEQ ID NO: 584868 - DNA, 4001 bp, Homo sapiens
ccggtactcctccatctgctcctctgttctctctctcccacccttatacacaaacactgcgggggagaactgagaccggaaccaccgcacctccatgtcctcagcatttttctcgggtgacagatggcagcgtaatgtagtgttttctcccaccatggccaggatgggattagctggccccacgacagtaaactgggctgttcaacaagggcagaatcagacaaggatgccagttatcacaactctaaggcaaaacaaaaaacaaaaaacaaaaacaaacaaacaaaaaaaactccagggatgaaaggaagcagatattccaaggctacaggggttcttgggctgagaacccttctggggaccagtagctgtggctggtcggcagcaccaacccctgggagcagtaactattgaggctgctcctgcttcacgaaggaaacattggggagcccgccctgggcaccctgtgcccctgagattttcctccattttgcaatctagcactgtgcctgagtgtagtgtaaacttgaactgtccattagggtatctatccactagctatttaacagttccaataaaaatgaactctaagtgtaaaacacacacagattataaagatttaaaatttcaaaatgtcaaatatctcattggtaatagttctattaactaagcatttaaatattgatatgtgattatttatatgaaacaaaatacattattaaaatttatttcaagtatgtttttaccttttaaaataaaaagtagaataggcacagggtcttgcgcctgtaattgcagatatttgggaggccaaagtgggaggatccttaacagctaggagtttgagaccagcctgggcaaaatagtgagaccctgtctctacaaaaaataaaacttagtcgagtgtggtggcccttgcttgtactctcagctacttgggaggctgagatgggaggatcccttgagcccaggagtttcaggttacagtgagttatgatctcattctccatctgcttcattccggcctggcaacagagcaatatactctctcttaaataaataaacaaataaataaaaagttaaaaaaatctttttgaagatttgcacttgtatatgcacttgacctttgtgcttcactgtgtttcttttggacagtgctggtataaattcagtgaacatgttcagaatgaaaggataagtcaacaaccccacagttcttccttctttccctttgcagactacagggttgatgttcctttctgagaggtgacagcagcaagtgacacacatccctacctgagaccagtgcacacaggctgagaaggaggaggagcaggaggaggaggagggaggctggcagggagaagtgcagagcagcagctggttccatgagcacccagggcaggcagagaccagaggcctagggttacagaggaggagaatcagcctaggagtcttggcacctcagtgctggtcgggcccaacctctcctgtcactcaagtaggtctcatcggtgccccaacttctgggagtcgcttgcatctcaaggctcaggtatctccgaaagagggattccgtaaacattccataagtaagccatcaatgcagagatcaagggggccgttttcctccttcctcttcccacttctcgggccacagtccggtttcttcagttgtccctggattctttcacaccctcgtccctccacttccccctccccgagacccaggtcgggacactcgaggtaaagccaggcgaggctgcgcctccccaccagtaggcttcctgtctcccaggtccccctctcctctccagagcagatcccgctccccgcacctaccgcccccagctaccgcccccaccccggagctgtagcgcctcctctccctttcctaccttctagaactaacctctgttttcttttcccctctgatcctcacatgacgattttccgatacaactcacccatgggcacagtcaccaccagacaacaaagcatcccaaagagaagagaaaagctgtgttcacctcctattaatcgcgatgtttggagttgcggactcggtatctgggacctgttctctgggtgtccaaaaagtcccaagatttccactgagcagtttagagcccaggattggccgagtgaggctgaaccaaccaatggtgtctcgagccttatttctcagctgttactaggtagaatacacacacaaaaaccccccaaaaatctcaagcagcaaataaccttttgggattattaggtatttctatttcctttttctgtctttggaagcaagacttttttcctttattttcctttcttccttcctttcttccttccttccttgcttccttctttcctttctcattctctttttctttctttctttctttcatatgtctctctctcactttattctttctttctttctcgctttctttcttttttcttccttccttccttcctctctcttcctttctctctttctcttccttctcttctccttcctttctttctttctctttctttctttctttctttctttctttctttctttctttctttctttctttctttctttctttccttctctctctctctctttctttctttccttccgttcttttacaaagccttgagatccccaaggtgtcagtggctttgctggtgtagacgaggagagggctctctatgtagagtgattttgctggggaggaaacatgaggaggaaaacataagccgccgtctttccaaagccagaggactcttgttcatgttgctggctttgaaggttgggcctggtgcgcgggaggccttgggggaagcaggcatggctggagtgggaggggtagcaaaggaaaggtgacagcagttgcagtggctgttatgaaggtcttgttgttcactccaaagctattggataagacgtgctgagaatactgagtgaggattaaaaaccctttcccacggggaggtggtattctggtggaggcagaagatggaagtgagcaaagactttcagttgaccttgaccttctgccagtaggtggtggggttaagtccaaggaccacacacacacaccagcacacataacctcctccccatgaacataatccctcccccacagaatccaatcttgtcattgtatagatatcttccagaataatcttcccaaggcccagttgtcaataatcccctcaaatgtctaaatacttagtctggaactggtgcagtggctcacacctgtaatcccaacactttgggaggaggaggcaggcagatcacttgaagtcaggagttcaagaccagcatggccaacatgatgaaaccccgtctctaccaaaaaaaaaaaaaaaaaaaaaattagctgggtgtggtggcacatgcctgtaatcccagctactcaggaggctgaggcaggagaatggcttgaacctgggaggtggaggttagggtgagctgagatcatgccactgcactccagcctgggtgacaaagtgagaccctgcctcaaaataaataaataaataataaaatatacacaaataaatgcttagtctagaggcctccaattcccttctgattcaattcaaaactttgcagttaatacactagcaatggctccacagtggccttgcatcacaacgttgcactccctgtggccagcgctccctttcccatgccatgcctttcacttgaattgcttgctccatctttgccccttgaaatcctgcccagccttcgtgcctacttcctccaagaacaactctgaatgctcctgcctgaagtgctctcggcctcttctaacacccatatcttttgctgttcccatgtcctgtcttctattattgttatccaggtatcaactgtgtctttgctgtgactggagtacctgttcctcaggacagacttctgcaggatgtgattcttctctccttacaaggcccaactctaagctctgctctcagctgttgttcaatgcatgagtgacatgctc

SEQ ID NO: 584869 - DNA, 4001 bp, Homo sapiens
ggtgacagatggcagcgtaatgtagtgttttctcccaccatggccaggatgggattagctggccccacgacagtaaactgggctgttcaacaagggcagaatcagacaaggatgccagttatcacaactctaaggcaaaacaaaaaacaaaaaacaaaaacaaacaaacaaaaaaaactccagggatgaaaggaagcagatattccaaggctacaggggttcttgggctgagaacccttctggggaccagtagctgtggctggtcggcagcaccaacccctgggagcagtaactattgaggctgctcctgcttcacgaaggaaacattggggagcccgccctgggcaccctgtgcccctgagattttcctccattttgcaatctagcactgtgcctgagtgtagtgtaaacttgaactgtccattagggtatctatccactagctatttaacagttccaataaaaatgaactctaagtgtaaaacacacacagattataaagatttaaaatttcaaaatgtcaaatatctcattggtaatagttctattaactaagcatttaaatattgatatgtgattatttatatgaaacaaaatacattattaaaatttatttcaagtatgtttttaccttttaaaataaaaagtagaataggcacagggtcttgcgcctgtaattgcagatatttgggaggccaaagtgggaggatccttaacagctaggagtttgagaccagcctgggcaaaatagtgagaccctgtctctacaaaaaataaaacttagtcgagtgtggtggcccttgcttgtactctcagctacttgggaggctgagatgggaggatcccttgagcccaggagtttcaggttacagtgagttatgatctcattctccatctgcttcattccggcctggcaacagagcaatatactctctcttaaataaataaacaaataaataaaaagttaaaaaaatctttttgaagatttgcacttgtatatgcacttgacctttgtgcttcactgtgtttcttttggacagtgctggtataaattcagtgaacatgttcagaatgaaaggataagtcaacaaccccacagttcttccttctttccctttgcagactacagggttgatgttcctttctgagaggtgacagcagcaagtgacacacatccctacctgagaccagtgcacacaggctgagaaggaggaggagcaggaggaggaggagggaggctggcagggagaagtgcagagcagcagctggttccatgagcacccagggcaggcagagaccagaggcctagggttacagaggaggagaatcagcctaggagtcttggcacctcagtgctggtcgggcccaacctctcctgtcactcaagtaggtctcatcggtgccccaacttctgggagtcgcttgcatctcaaggctcaggtatctccgaaagagggattccgtaaacattccataagtaagccatcaatgcagagatcaagggggccgttttcctccttcctcttcccacttctcgggccacagtccggtttcttcagttgtccctggattctttcacaccctcgtccctccacttccccctccccgagacccaggtcgggacactcgaggtaaagccaggcgaggctgcgcctccccaccagtaggcttcctgtctcccaggtccccctctcctctccagagcagatcccgctccccgcacctaccgcccccagctaccgcccccaccccggagctgtagcgcctcctctccctttcctaccttctagaactaacctctgttttcttttcccctctgatcctcacatgacgattttccgatacaactcacccatgggcacagtcaccaccagacaacaaagcatcccaaagagaagagaaaagctgtgttcacctcctattaatcgcgatgtttggagttgcggactcggtatctgggacctgttctctgggtgtccaaaaagtcccaagatttccactgagcagtttagagcccaggattggccgagtgaggctgaaccaaccaatggtgtctcgagccttatttctcagctgttactaggtagaatacacacacaaaaaccccccaaaaatctcaagcagcaaataaccttttgggattattaggtatttctatttcctttttctgtctttggaagcaagacttttttcctttattttcctttcttccttcctttcttccttccttccttgcttccttctttcctttctcattctctttttctttctttctttctttcatatgtctctctctcactttattctttctttctttctcgctttctttcttttttcttccttccttccttcctctctcttcctttctctctttctcttccttctcttctccttcctttctttctttctctttctttctttctttctttctttctttctttctttctttctttctttctttctttctttctttccttctctctctctctctttctttctttccttccgttcttttacaaagccttgagatccccaaggtgtcagtggctttgctggtgtagacgaggagagggctctctatgtagagtgattttgctggggaggaaacatgaggaggaaaacataagccgccgtctttccaaagccagaggactcttgttcatgttgctggctttgaaggttgggcctggtgcgcgggaggccttgggggaagcaggcatggctggagtgggaggggtagcaaaggaaaggtgacagcagttgcagtggctgttatgaaggtcttgttgttcactccaaagctattggataagacgtgctgagaatactgagtgaggattaaaaaccctttcccacggggaggtggtattctggtggaggcagaagatggaagtgagcaaagactttcagttgaccttgaccttctgccagtaggtggtggggttaagtccaaggaccacacacacacaccagcacacataacctcctccccatgaacataatccctcccccacagaatccaatcttgtcattgtatagatatcttccagaataatcttcccaaggcccagttgtcaataatcccctcaaatgtctaaatacttagtctggaactggtgcagtggctcacacctgtaatcccaacactttgggaggaggaggcaggcagatcacttgaagtcaggagttcaagaccagcatggccaacatgatgaaaccccgtctctaccaaaaaaaaaaaaaaaaaaaaaattagctgggtgtggtggcacatgcctgtaatcccagctactcaggaggctgaggcaggagaatggcttgaacctgggaggtggaggttagggtgagctgagatcatgccactgcactccagcctgggtgacaaagtgagaccctgcctcaaaataaataaataaataataaaatatacacaaataaatgcttagtctagaggcctccaattcccttctgattcaattcaaaactttgcagttaatacactagcaatggctccacagtggccttgcatcacaacgttgcactccctgtggccagcgctccctttcccatgccatgcctttcacttgaattgcttgctccatctttgccccttgaaatcctgcccagccttcgtgcctacttcctccaagaacaactctgaatgctcctgcctgaagtgctctcggcctcttctaacacccatatcttttgctgttcccatgtcctgtcttctattattgttatccaggtatcaactgtgtctttgctgtgactggagtacctgttcctcaggacagacttctgcaggatgtgattcttctctccttacaaggcccaactctaagctctgctctcagctgttgttcaatgcatgagtgacatgctcagggtaaggtcattcccaccacaggatggcccagttcctggaatcattcggcaccagagttcgagagagaggtggcagcactattaagccactctagatcagaagatcaaggacc

SEQ ID NO: 584870 - DNA, 4001 bp, Homo sapiens
tctcgggtgacagatggcagcgtaatgtagtgttttctcccaccatggccaggatgggattagctggccccacgacagtaaactgggctgttcaacaagggcagaatcagacaaggatgccagttatcacaactctaaggcaaaacaaaaaacaaaaaacaaaaacaaacaaacaaaaaaaactccagggatgaaaggaagcagatattccaaggctacaggggttcttgggctgagaacccttctggggaccagtagctgtggctggtcggcagcaccaacccctgggagcagtaactattgaggctgctcctgcttcacgaaggaaacattggggagcccgccctgggcaccctgtgcccctgagattttcctccattttgcaatctagcactgtgcctgagtgtagtgtaaacttgaactgtccattagggtatctatccactagctatttaacagttccaataaaaatgaactctaagtgtaaaacacacacagattataaagatttaaaatttcaaaatgtcaaatatctcattggtaatagttctattaactaagcatttaaatattgatatgtgattatttatatgaaacaaaatacattattaaaatttatttcaagtatgtttttaccttttaaaataaaaagtagaataggcacagggtcttgcgcctgtaattgcagatatttgggaggccaaagtgggaggatccttaacagctaggagtttgagaccagcctgggcaaaatagtgagaccctgtctctacaaaaaataaaacttagtcgagtgtggtggcccttgcttgtactctcagctacttgggaggctgagatgggaggatcccttgagcccaggagtttcaggttacagtgagttatgatctcattctccatctgcttcattccggcctggcaacagagcaatatactctctcttaaataaataaacaaataaataaaaagttaaaaaaatctttttgaagatttgcacttgtatatgcacttgacctttgtgcttcactgtgtttcttttggacagtgctggtataaattcagtgaacatgttcagaatgaaaggataagtcaacaaccccacagttcttccttctttccctttgcagactacagggttgatgttcctttctgagaggtgacagcagcaagtgacacacatccctacctgagaccagtgcacacaggctgagaaggaggaggagcaggaggaggaggagggaggctggcagggagaagtgcagagcagcagctggttccatgagcacccagggcaggcagagaccagaggcctagggttacagaggaggagaatcagcctaggagtcttggcacctcagtgctggtcgggcccaacctctcctgtcactcaagtaggtctcatcggtgccccaacttctgggagtcgcttgcatctcaaggctcaggtatctccgaaagagggattccgtaaacattccataagtaagccatcaatgcagagatcaagggggccgttttcctccttcctcttcccacttctcgggccacagtccggtttcttcagttgtccctggattctttcacaccctcgtccctccacttccccctccccgagacccaggtcgggacactcgaggtaaagccaggcgaggctgcgcctccccaccagtaggcttcctgtctcccaggtccccctctcctctccagagcagatcccgctccccgcacctaccgcccccagctaccgcccccaccccggagctgtagcgcctcctctccctttcctaccttctagaactaacctctgttttcttttcccctctgatcctcacatgacgattttccgatacaactcacccatgggcacagtcaccaccagacaacaaagcatcccaaagagaagagaaaagctgtgttcacctcctattaatcgcgatgtttggagttgcggactcggtatctgggacctgttctctgggtgtccaaaaagtcccaagatttccactgagcagtttagagcccaggattggccgagtgaggctgaaccaaccaatggtgtctcgagccttatttctcagctgttactaggtagaatacacacacaaaaaccccccaaaaatctcaagcagcaaataaccttttgggattattaggtatttctatttcctttttctgtctttggaagcaagacttttttcctttattttcctttcttccttcctttcttccttccttccttgcttccttctttcctttctcattctctttttctttctttctttctttcatatgtctctctctcactttattctttctttctttctcgctttctttcttttttcttccttccttccttcctctctcttcctttctctctttctcttccttctcttctccttcctttctttctttctctttctttctttctttctttctttctttctttctttctttctttctttctttctttctttctttccttctctctctctctctttctttctttccttccgttcttttacaaagccttgagatccccaaggtgtcagtggctttgctggtgtagacgaggagagggctctctatgtagagtgattttgctggggaggaaacatgaggaggaaaacataagccgccgtctttccaaagccagaggactcttgttcatgttgctggctttgaaggttgggcctggtgcgcgggaggccttgggggaagcaggcatggctggagtgggaggggtagcaaaggaaaggtgacagcagttgcagtggctgttatgaaggtcttgttgttcactccaaagctattggataagacgtgctgagaatactgagtgaggattaaaaaccctttcccacggggaggtggtattctggtggaggcagaagatggaagtgagcaaagactttcagttgaccttgaccttctgccagtaggtggtggggttaagtccaaggaccacacacacacaccagcacacataacctcctccccatgaacataatccctcccccacagaatccaatcttgtcattgtatagatatcttccagaataatcttcccaaggcccagttgtcaataatcccctcaaatgtctaaatacttagtctggaactggtgcagtggctcacacctgtaatcccaacactttgggaggaggaggcaggcagatcacttgaagtcaggagttcaagaccagcatggccaacatgatgaaaccccgtctctaccaaaaaaaaaaaaaaaaaaaaaattagctgggtgtggtggcacatgcctgtaatcccagctactcaggaggctgaggcaggagaatggcttgaacctgggaggtggaggttagggtgagctgagatcatgccactgcactccagcctgggtgacaaagtgagaccctgcctcaaaataaataaataaataataaaatatacacaaataaatgcttagtctagaggcctccaattcccttctgattcaattcaaaactttgcagttaatacactagcaatggctccacagtggccttgcatcacaacgttgcactccctgtggccagcgctccctttcccatgccatgcctttcacttgaattgcttgctccatctttgccccttgaaatcctgcccagccttcgtgcctacttcctccaagaacaactctgaatgctcctgcctgaagtgctctcggcctcttctaacacccatatcttttgctgttcccatgtcctgtcttctattattgttatccaggtatcaactgtgtctttgctgtgactggagtacctgttcctcaggacagacttctgcaggatgtgattcttctctccttacaaggcccaactctaagctctgctctcagctgttgttcaatgcatgagtgacatgctcagggtaaggtcattcccaccacaggatggcccagttcctggaatcattcggcaccagagttcgagagagaggtggcagcactattaagccactctagatcagaagatcaa

SEQ ID NO: 584871 - DNA, 4001 bp, Homo sapiens
aaatactaactcctcaacagtttcttccaaaacaaaggagcatgaggcctgcagccataatccctcttgctgtgggtctgggaatggcctctgagaacaagatctgcagagggaggtggggagggatgtaaaggaaacaagagaacagagatctgtgcagccggccatgcttcacccctgcctggatcttgcacccacccagagtaaacaatgcatttcaccacatcttttgctcctcgaaactgctctttatgttgctatagagggggtatcatttttattatcattttccctgagttaacaatttctctgctgtccttagaatgagacataagtttttcttcttcataaaggatatattttttttcctgattatagtcaatattgcaaatgaaaaaaagcataaaggaatacaagtttaagtagtggttcatgcctgtaatccttgcaatttgggaagttgagatgggaggatccctggagcccaggaattcaagaccagcctggtcaacataatgaaaccccatctctacaaatcaatcaataaataaaataaaatatctatagtagtagtcatatactttggtagtgaaaaggtaaatatttctggaagtattttgaccatatatatataaagggccttaaaaaaagttatatgctttgctaaggaatggctattaaaagaaaaaaaaaaggtgtgtgctttgacccaaatgttccacttgtaggaattagtgttgcagaaaaaagaaaatcaggaactaagacaaaaatttatgttttaggctgctcaatacagtaaaatctacaatagccaaatgcagaaaagagaaatagtccaaactagggaagtgtttaaaaataattttaaaggctgggtgtggtggctcacgcctgtaatcccagctctttgggaggctgaggtgggcagatcacctgaggtcaggagtttgagaccagcctagacaatatggcgaaactccgaatctactaaaaatacaaaaactagctgggtgtggtggcgtgcacctgtaatctcagctacccaggagactgaggcaggagaatcactggaacccaggaagcagaggctgcagtaagccgagaacatgccactgcactccagcctgggtgatagagcaagactgcatctcaaaacaaacaaaaaaattgtatattcatacaatgaaatagattgtatccattggatagcattcgttaggtttgggggaaatgatgaataaaaggaaaaacacatactgttcctaaaagattttaaaacaaggtttaatgtatggatctaacattgctaaaattataaataattgcccttcattaaaaacacgattcctaaaggctgcatggaaatctcttttatgattgaaccatgcattgtttgtctatcccccgcctgttgtatatgtatgctggttcaggtttttctacatttttaatacttctgtaatgaacaaatttacatatgaatctataaaggacacctctttttagaatctcttagaatagatgccttgagttgtccagaacagattttaaagattgtttgcccttttctgactacaatacgttcttaagaacatgcaattagactatttcttcaccaaatcccaaactctgcaggtctttattctttgcactacttctcccctttccatgtgtccacatgtgtgcgtgcgcaccccctcaggcacacacccctttctctgggtgagtactctccctgcatgcccactcaccactctcagcgattcagcccctgtcctcccaggcattgtgaaccaggctctaatcgacttcccccactcacctcttagcattcccctctgaaaatcacagcccacagaagaaaggcagttaatagttctccattctttctactatggttaaatctccttctggaagaaaggaaaaagaaagcagagactgtcgggtcatcgtgaggaataataacaatctctctttggaagaataagttttttgattggctcagaggtgatgtttctcatcagttgctgggcagaaaccactgaggaaggctgaaatgaaaactgaaagtacattgaattgtacacgttgaagaaaaattcctgccctacctcccttactgtttatctctttcattcttgtgtgtatatacgtatttctatatagtcacttgtcttaagtcttttatcataatagaaatatcagcagaacacaatgggaaaagattttaatgtggtgaagagagaaagatgagcactaattaaaatgctactgtggcagtttgctaacatttgcttgcatgaatatgggtacatggaggaggaggagattttactacagagtcaaataaacgtatgaatggaaagaaaaccagacacaatgcactttttttttgaaacggagtttcactctgtcacccaggttggagtgcagttgcaggatcttggctcactgcaaccttcgcctcccaggttcaagtgattttcctgcctcagctcctgaataactgggattacaggtgctcgccccatgcccggctactttttgtatttttagtagagacagggttttgccatattggccaggctggtctcaaactcctgagctcaagtgatcctccctcctcagatcccaaagtgctaggattacaggcttaagccactgcacccggcccacaatgcacatttttaagcacctccagcatccaggcttaggatctgttatcaaaaaatgtaatttttctggcttccagaggcagtgctgcttgacacgttttacctttttcagcaaatttttagtgcaggtgtttctgagcatctccattcaccctcagctcctgttctgtgctacactgtattttcctgtgtatttgtttctcctgctgccagtggagtacatattctctgaggccagactctagataaactgtgaatgctgtctctgtaagatgtctataaaacaaattggttcttcctgtggcctaggacctcaaaacagactttctgggattgcaagtcaatgatcgaagttcctaaggctaagatgtgactggggctgatgcaatttaattatattgtaaatgtttgaatttagactgtgtagtatctgattgagatggctggtcccttctgcatcatgcattccccctttcttcttggtgataaggcctaattttcttaggtactacaacgttcttttccatctggtagatagcagagaccaagggacaaagttggaaccagtgttttgtaggtgacagctgtgggcttatgcttctccaagagatccttcaaaggaggggccaaaagagctgggagtgtgagggtacactctctgtacttcctcttcctcttgcctgcgatgtaggcttttgacctggaggtgcagcggccctcctgggaccatgaggcaaccttgacattggaagccacatgcagagacagcagagaatgaagtcagaagcagtctggggcatgaatgacacctctgaggtgccagatcagccctggactgcaaccacctgaattgattttacatgaaaacaaaacaaaacaaaacaaaaaaaacaagaaaacccttgttttgtttaagccagtggtatttctggtctctgttatcagcagaagtacaaaatttttccctctccctttttcctccccagcagtttgtcataaaacttctaaaacataaagcaaaggtgaaagaattttcagtgaataccaattacctaccatgtaaattgtattgatagagttaatattttactaaactttcttactttattataatccatatcactattcattccctatccatccatcatccttatttatttgttcatttgcttcttttctttctcttttttttttttttgagatggagtctcgctgtgtctcccagactagagtgcagtggcatgctgtcggctcactgcaacctccacctcacagtttcaagcaattctcctacctcagcctcccgagtagccgggatcacag

SEQ ID NO: 584872 - DNA, 4001 bp, Homo sapiens
ggaaaactaaatttgctagtgcagtatcccagggtcagaaacagtggggctattcccacccaccccaattaccagagggaggaggagaggaagctgttttgaacacaaaaaagaagagattcatgcattgaggacttcctttagaggagctgttaccttcagcaaggcaatgcagccagcctgagggtaacttgcagtaaggaagccagtgaataagcacccagacttcttccttttctcttcctcctatgattgtctgctagagatccccttaaaccaaacctaaccagcagccacagggcaagggattgcactgagaaagagaaaagctgtcccaacatatggaaactgacaccgggtctctgtgtcatcctgttgaacataagcaatttcacagaacacagacaatggcactttgtgactatgatggatcatgggaaaaacaataccaccccacatcatatgtgagcatagagaaaaacatgaacattgtccaaaccacagcagtgaccaaacatcccccctcagcaatgagggattgctgccccttcatcaattacagcttttgtctcaccctggtctccttcttcctacataagattgattaaggctctcactcagaattaacctgcccacaccttcctgatggaatctcatccagagcagagggctaagtctatgaactcccccggccccaatcccctaacacaagcccaaattgtataccaagtctgctctaacaccttcttactgagaccccgccacagctccccatgatgtgtgttcttcctcactgcaacacgtaagaaatacagctagttctactacaggagtattcctggggatggctagttggagaacactggcagcagatacagtcactattccacctcccaggacccatggtagtgtgcacttggagacacaacagaagccatctgttacacaactaaaccaaaatgactgtgtaccagtcactgaagagatggtttcttatgcttcctatccctcgtccttcacttcgcttatatctctggtggccagaggaaaggagttctttacttgagcatgtagggtacagcaggaattcttcctaaaggaaaacctgtgtcttactcaagggcctcagagaagctaagttgggaggcagtgcaggcaattgctagtgagcagccaggagtgtctgcagtgcttttgcaagagggactctgcatctgctctagatcctacagagaaatgttctcagaacaaaacctggaggctcacctgcaaccttcagctccaccagggctttttcatagaagtcaccatcttggaaataacacaagtactttccactgtcagaggctgtgacgttgtgtattcggagagcagccttccctgcagtgatgccatcccgcagaatcgaagttctccctcgatacggtgcactctgcctgtcttccacttcctttccatctgcatacacgttcaccacctgccttaggctggaacttacccacttcagctccatggtctctgcactcatggtcgggaacaggtgacagggcagatcagcgtcttcacccaccatggccaggatgggcccagagggtccaagcacagaaaactgagctgtcagcacaagggggaagctccatcagagggttttggagttggggtcatgagaggaagggtccttctcagacagggaaggcgagatacagagaacctagaggggaacacaatcctaacagaaggaccatttgtctctttgtgacaggtgatccttcaggttgggatggacttccaggtatgggaatgagttaaaggttctaagagggcatttaggtaattgtctgcttaattaggtaattgagataattgtctgcttcagaaacataaatgtggaatcatggaatcattccctacctgagcaaggagtgagcagctggaccaagaggagggagacatgaaagttgagcagaaggaaagccagggaacttgccattttcatctatgctgcatatcaagagataccagaaggtgtgggacagacactatggcctggaagaagctttaggattctgcatggaaatgtccacttccccagggctaactcaaatatggtgaccgaagaagatcttacctctgccaaaaatgtctgtccttgagtgtctttacctttgggttccagtatggaaaaccatctgtaaaaataatatctgttatctgatcaggacatctctgactctactgcattaaaatattaaaatattcataatcctatcacttccccacacttcccttgccaggtccaagcttccatcatccccctctgattcatgaaggaccctcttcactggattccctggtcccacccttgttcagctctgtgggtgtccaacactatggactcctcaagcgtcaaactcttggccattactacagtcaacttatggcctggtggctcctggtgggatccaggcagactgcctggcagaggctctgaagtcagtcaggggctgaacccaccacgtttaatcacaaagatattgattaggagagctttgaataagaccaggctttactcatcttttctttcttcccttcataaagttattcaacaaatatttactgagcacccacaatgggctggacccactatggtagagttaggaacacaaagagggtagacaataggtaaaggctctacaagtcacaagcttgatgatctcagtcatgggacaaaaccatttcaactttagttactcaaaaatatcgagtatgagacttagaatgttcacaattggcccagcaattccacttcctgatggttacttcagcgaagtactcgcatgggtgcagagagaagcctctgtgggaatgacactgcagcactatttttaaagtataaaagtggttaccaactgaaccagccactcacaagagactggttagaggaatgatggctcatccctaggaggaaattcaatgcagcagttaaaaagagtgatttaatgtcactagcctggataatggagatatactaagtgattaaaaagcaccttgcagaactatactaatgattcaattgaaaaacaaaagcaaagctatacatttctgcataactatatatgtaaatgcctgaaaaagtctaaaatgatggatgctaaactgaaaattggaggttaagtgagtgaaaggacgctttggccttttgcttcctttacttttaaaattattggaatgctttaagtttaaaattttcatgtattagttaataactaattattatgaggaataatagtgactggaacatattagctgctcagtaaatactaactcctcaacagtttctcccaaaacaaaggagcatgaggcctgcagccatcataccagctgctgtgggtctgggaatggcctctgagaacaaggtctgcagatggaggtggggagagatgtagaggaagcaagggaacagaggtctgtgcagctggtcatgctccacccctgcctggatcttgcatccaccatcagactaaacattatatttcaccacatcttctgctcctcgaaactgctctttattctcctaaggagaaggaggtattattaagctaagctaaaaatttctctgctgtcctcagagggagaacttttattttttaggttatttattattcattctttctactatagacaattttgccaaagaaaaaaatataaaggaataaaaccttaaatactctgtagttatatactttgctaatggaagtggaaatgtttctggaagcatttggccatgtacacatggcaagtgcctttaaaatgttgtattatttgcccccaaaattccaactataaaagttagtgttgaagaaaaaaatttagagattgatgcaaatatttatggataaggctgttcaatctagtaaaatctacagtaacaaaatgtagaaactgaaaaatccaaaataaagagttttaaaaataattcgggttttttatttgtttgtttg

SEQ ID NO: 584873 - DNA, 4001 bp, Homo sapiens
ggagatatactaagtgattaaaaagcaccttgcagaactatactaatgattcaattgaaaaacaaaagcaaagctatacatttctgcataactatatatgtaaatgcctgaaaaagtctaaaatgatggatgctaaactgaaaattggaggttaagtgagtgaaaggacgctttggccttttgcttcctttacttttaaaattattggaatgctttaagtttaaaattttcatgtattagttaataactaattattatgaggaataatagtgactggaacatattagctgctcagtaaatactaactcctcaacagtttctcccaaaacaaaggagcatgaggcctgcagccatcataccagctgctgtgggtctgggaatggcctctgagaacaaggtctgcagatggaggtggggagagatgtagaggaagcaagggaacagaggtctgtgcagctggtcatgctccacccctgcctggatcttgcatccaccatcagactaaacattatatttcaccacatcttctgctcctcgaaactgctctttattctcctaaggagaaggaggtattattaagctaagctaaaaatttctctgctgtcctcagagggagaacttttattttttaggttatttattattcattctttctactatagacaattttgccaaagaaaaaaatataaaggaataaaaccttaaatactctgtagttatatactttgctaatggaagtggaaatgtttctggaagcatttggccatgtacacatggcaagtgcctttaaaatgttgtattatttgcccccaaaattccaactataaaagttagtgttgaagaaaaaaatttagagattgatgcaaatatttatggataaggctgttcaatctagtaaaatctacagtaacaaaatgtagaaactgaaaaatccaaaataaagagttttaaaaataattcgggttttttatttgtttgtttgttcttttttcttctttaggagcggctttctgagtcagagtaggctcacagagactcccaataattatatattcatacaatgtagtagcttgtaaccatgggaaatcatgctttaggttttggggaaatgatgaatggaaagaaaaccaagtactatccctaaaagataccaaaaatggtttaatataaggatccagtgttattaaaattataaagaatttcacttaattaaaattatgattcctaatggttacatggaacatgttttatgactgaaccatgcattgtttgtctattccccacctgttgaatatgtatgttggttcagattttactatattataaatacttctgtaataaacacatttacatataaatctatgaggcacatctcttttttcttcttcttcttcagaatttctcagaatagatgccttgagttggccagaacagattttaagggttttttgtttgtttgtttgtttgcccttttctgaccacaatacgttaagaacatgcagttggaatatttcttcattcatgttgtctccctttccttccactaaatcccaacctctgcagttccttatactttgcagtacttctcccgtcttcccacgtgcccatatgtgcatgtgcgagtgtgcacatgtacacatgtacacacacacacacacacacacacacacacacacacacacacaggcactgcacccctttctctgggagagtactctccctgcatgcccactcaccactctcagcgattcagccccgctcctcccatgcgttgtagcccaggctctaatcaatttcctgcacttaccccttggtattcccattggagaatcagagcccacagaataaagacggtcaatcaataattctccattctttctattatggcttagcctctcatccggaagaaaggaaaaagagaaagcaaatattgtcttctcaccatgagaaacagtaagagtcgctctttggaagaattagttttttgattggctcagaggtgatgtttctcatcagttgctgggcagaaaccactgaggaacgttgaaatgaaaactgaaagtacattgaattgtacacgttgaggaaaaactccagccctacctcccttagtgtttgtgtttctgtgtttatctatttgaatcattcttgtgcgtggatgtatataagtatttctttatattcacctgtctcgtgtcttttacatggtaatagaaatattagcagaatggagtaggaaagtaaaaaaatttaatgtgcaaagagaggaagatgtgcactaattaagatgcttctgtggcagtttgcttgcatgtagataggtacgtagaagaggaggatcttttttacagagcctaataaaggtatgaatggaaagaaaatgagacaaactgcacctctttaagaacttctggcatttaggcttaggatatggtatcaaataatataatttttctgatttccagaggcagtgctgcttgacattgttttacctttcccaggaaattcttactgcagatctttctgagcatcttcattcaccctcagctcctggtttgtgctatattgtattttcttgggtatttgtttctcacgctgccagtggagtacatattctctgaagctagacactccataggctgtggtctctgtaaggctcgtttcctgtacaccatctctgtaaggagtttatgggacaatcttgttctccctgtggcttacgacctcaaaacacacttttttgggctgcaagccagaaatctcctagagctaatatgtgactggagctgatgggatttgattatattgcaacagtttgaatttaggctgtgtggtatctgcttgagatggctggttgcttctgcagcgtgcatgcccccttcttcttagtgacaaggcctaattttctggggtactgcatcctgctcttcccccttgaagatagggcaggccaagggactaagttggagccagcggtttgtaggtgaaagttgtgggcttgtacttctcccagaaatccttcaaagggaggccaaaatagctgggagtgtgagggtacactctcccttcttccttcttcctcttgcctagaacatggactttggacccggaggtgcagtagcccaccctgggaccatgaggcagccttgaggttggaagccacacactgggacagcagagaatgaagtcagaagcaggctggggcatgaatgacatatctgaggtgccagatcagccctggactgtcaccatctaaatttatttaaaaaattttttcttttaaaatattttattatatattagtactcagggtaaatttccaaataagtttgtttttcatgaaaggaaaacaaatccttgttttatttaagccagtggtacttctggtctctgttatcaacagaaaaacacaatttttccctcccccttccccctccccaacagtttattataaaacttctaaaacatatagcaaaggtgaaagaatttcagtaaattccaatatatctaccatgtagattgtataattaatattttagtttcttactttattataaatccatcctgctgttcacccctattcatccatcaatatttgtttatttgttcatttgtttatttttaaattcagactctatcagaagctgtgctgcttgagatcgtattagtaagaatgaacatcccacctttgcctggagggtccaagtcactttgacacaaagaagcagccaatgtgctaagcttcagattaggagtttctgagcccaactcttcatatctctgaactttgtagtttccaaactatgagacccctaagttcatttctcactcaatgtctttgtttcttcagctatgggtagggatgtgacctgcttcttaagttgtttggggagaacctagcacagcacctgcacatattaactctttatgaatgtcattattttccattatgaaaggttcggtatcagctggtgcctgttgtggagttggagttttagttt

SEQ ID NO: 584874 - DNA, 4001 bp, Homo sapiens
gctatacatttctgcatatttatagatgtaaacgcctgaaaaagtctaaaaagatgcatgctaaactgaagatcggaagttaagtgagcaaaagaacacgttggccttttgctccctttacttttaaaatattgaaatgctttaaatttaagatttttcatgtattacttaacagtaattattatgagtgataatactgactggaacatataagctgctcagtaaatactaactcctcaacagtttcttccaaagcaaaggagcatgaggcctgcagccacaacacccgctgctgtagctacctgagtctgggaatggcctctgagaacaaggtctgcagagggaggtggggagggatgaagagaaagcaccggaacagaggtctgtgcagccggccatcctccaccctcgcctggatcttgcactgacccagactaaatattgcatttcacatcttctgttcctcaaaacttctctttatgttgctatagaaggggtatcatttttattatcactggtttcaaagttaacaatttctctgctctgcttagagtgagacatatgttttcattctttttaaaggatgtttatattttcttcctgattatagtcaatattgcaaatgaagaaaagcataaaggaataaaagttcagtggctcatgcctgcaatcttagcaatttggatggtcaaggtgggaggattccttgagcccaggggtttaaaacagcctgggtaacataatgagacccccatttctacaaattagtcaatcaataaaattaaaactctgtagtagtaatcatatactttggtagtagaaatataaatatttctcaaagcattttggtcatatatacagcaagcatctttaaaaagttacatgctctaccaaggaaatgctattaaaaaaaaaagttgtatgctttacccaaaagttccacttataggaattattgttgaggcaaaaaaaaaagacagaaattaagacaaaaatttatgtctgaggttgttaaatataataaaatctatacagtagccaaatgtagataattgaaatagccaaaattagtaaagtattacaaaataattatatattcacacaatgaaatagattgtgtccattgaaacacatatattgggttatgaggaaatgattaatggaaggaaaaacagatactgtacctaaaacatacaaaacaaggtttaatgtatggatctaatgctgttaaaatgagaaataattgcccttcattaaaaacatgatgcctaaaagctgcatagaaatctcttttatgatagagccacgcactgtttgtctaccccctgcctgttgtatgtgtatgctggttcagatttttctatattataagtatttctgtaatgaacaaatttacatatgaatctataaggcacatctctttctagaatctcttagaatagatggcttgtgttggccaaaacagattttagcgacttttttgcccttttctgaccacaataagttcttaagaacatgcagttggaatatttcttcatttatgttgtctccctctccttccaccaaatcccaatatctgcaggtctttattctttgcactacttgcctcttctccatgtgcccacatgtgtgcatgggtgcccatgcgcacacacgcacacacacacacacacacacacacacacacacacacacacacagaggcactgcacccctttccctgggcaagtactctccctgcatgcccactcaccactctcagcgattcagctcttgtcctcccaggcattgtagcccaggctctaatcaacattccccacttacttcttagtattcccctctgaaaatcacagcccactgaagaatggtggttaatagttctccattctttctattatggttgagtctctcattccgaagaaaggaaaaagaaagcagaggctatctggttattgtgaggaataataacaatctctttttggaagaattagttttttgattggctcagaggtgatgtttctcatcagttgctgggaggaaaccactgaggagggttgaaatgaaaagtgaaagtacattgaattgtacacgttgcagaaaaattccagccgtacctcccttagtgtttgtgtttctgtgtttatctatttgaatcattattgcgtgtccatgtatataagtatttctacatatttacttaagtcttttatcataatagaaatagcagcagaacaaaatgagaaaagattataatgtggtgaagagagaaagttgtgcactaattaaaatgctactgtggcagtttgctaacatttgcttgcatgaatatgggtacctgaaggaggagattttactacagcgtcaaataaatgtatacatggaaagaaagccagacgcaatgcacatttttaagcacctccagcatccagacttaggatctgttatcaaataatataatgtttctggtttccagaggcagtgctgattgacattttttacctttttcaggaaacttttagtgcaggtgtttctgagcatcttcattcgccctcagctcctggtttgtgctatattgtattttcctgtgtatttatttctcgtgctgccagtggagtacatattatctgaagctggaatctagatagactacaaatgccatctctgtaagaggtctgtgagacaaactggttcttcctgtggcctaggacctcaaaacacactttttggatttgcaagtcagtgatcaaaactcctaagattaagatgtgactggggttgatgaaatttgattatattgtaacagtttgaatttaggctgtgcagtatctggttgagatggctggtcccttctgcatcatgcagtccccctttcttcttggtgataaagcctaattttcttgggtacttcaataggctctgctatctcatagataccagagaacaagggactaagttggaatcaatagtttgtaggtaaagttgtgggcttgtgtttctcccagagatccttcagaatggaggccaagatagctgggagtgtgagtgtacactctccgtacttccttcttcctcttgtcttggatgtagacttttgaactagaggtgcggcagccctcttagaaccatgaggcaaccttgaggttgaaagccacatgcagagacagcagagaatgaagtcagaagcaggctggggcatgaatgacatctctgagctgccaggtcagccctggactaccgccatctaaattcattttacatgaaaacaaacaacaacatcaagaaaaaacaagaaaacccttgttttgtttaagccaatggtatttctggtctctgttaccaacagaatcccacaattcttccctcccccttttccttcccaacagtttaccataacacttctaaaacataaagcaaaggtgaaagaatttttggtgaataccaatatgcctaccatgtagattatagtgatatacttaatattttacgaaactttcttactttattataatccataccactgttcattccctatttatccatcatacttatttatttaaatgttcatttgctcatttttatttcttttctttttctttttttttttttggtgagatggagatttactcttgttgcccaggctggagtgcaatggtgcgatctcggctcaccgcatcctccggctccgaaggttcaagcgattctcctgcctcagcctcctgagtagctgggattgcaggcatgtgccaccatgcccggctaattttgtatttttagtagagactgggtttcaccgtgttgcccaggctgatctcaaactcctgacctcaggtgatacgcccgcttcggcctcccaaagtgctgggattacaggcatgagccactgagcccagcccatttgctcatttttaaattcacagtctatcagaagctgtgctgcttgaaattatatcagtaagaatgatcaccccacccttgcctgaaggatccaagtcatttttgac

SEQ ID NO: 584875 - DNA, 4001 bp, Homo sapiens
actccatccctgtgcacaaacacaggtgtgctgggctctgagcggtaccacctcacctccacgtgcattgtggtcctcttggggagtagctggcaggttaacagggcatcttccccaaccccggccaggataggatgagcagggccaatgactctaaagtcttctataaaataagtgaaaaagaggaacgaggaaatgccaatcagaaaatcatatgcatgctttggggtgtccagcctgtcaaaatggaggcaactagaagagggagagatatatgtttaatgttttagagaaatccagcatgatgatttgcacatctgtttgttacagagtcaattttgtgtactgaaaacaaatgcagttcaaaaatgtgggtgaggttgctgtctgtcacctaccagctatgtgattcggtggcaaatctattactcttggtaagattttgagatttgaagtcctaatttcttcatcttcaagatattaataccagcatacctgggttgtttttattctcaagtaaattatttattccttgagtcatttattctcatgtaaattgactttttaaattggaaaccttattcttgttattaacattttattttcctgaagtttagataataaatccatttattagctttttttagcctttcaggattcctcttctcttagatataaaaactgttttttttttgttttttttttgtttgtttttttcccgtctggagttggcaggaggccaattactgggactatgtacaatgcagttttcacaaggacattttgtgctggattaaggacactggtttgtctagagatttttgggtcttccaaacaaattctaagacatgtctgatctcttccttgttatctgcaaattgaagagatgtttaacagttatgtatgttattatgtttgatcattttatgtcatgtatgatatgttctttctcattctaaatgctccggggccatttgctctttctctgtgcagatccaatcctgctaggaagaacctcaccctacttagctgctgctgggtatcaaatagatgctgctcaaaaggtggctaaagagcctaagtggagatctgcttgtattcttcattgatgaagtctaaatatgaagctagaactgaagacattccatcagattgactgttacagggtagggagctgcagcacaagcacagagaagccagcagcttcatcacatcacaccagctctgcagcgccaaggcagacacaccagctctgcggcaccgaggcagacacaccagctctgcggtgccgaggcagagcctgcgccctctgatgctctgtgtcgtgttttttcccacttcgccatgctgcattttccttagggctctgacatctccttctgacactgattttttttttttgacactgaatttttaaataattatttttcaaggtgcaacattttgacgtcaaaattcagctagtgagatttccaaagtccctttcttctaatttcttatttccaagtattttttttaattgcagcttaatttatgataagaagcagctgcatttcttgaccccaaagtactagagtgaattaataatttaacgtggtgcaaccactgattcaagtgcttttaatgtctcatttaatcctaaagcctgtgctggcctctgagatgtagttactgctgttattctcattaaaaagatgaaagaactaaggtatgaggtgctcaagtaactttccaaaggtgactcagctaggagtggaggagctcctgggagtggaggagctcctcaaaagtgaggagttcctttttggatacaggtggcttggccccagacttacactcttagatgttgttctcgacctttggacccagactagctcactgggacattagactatacagtaaagggagaagggaatcctacctgactgcttcattgtcagcaggatgaataggaaggaggcgactgcaccagacagattgtagcctggaaaatccaccatcctccctggaacaaagacaaggaaacgctgtgcctaagtgaggctgtgacacacccggcacactccatggcttccattggttatgcagtcttagcagagaatccacatcaacccctgcacagtcagtgaaatgggcttggctccatttctctgcaattactgatcacatccaaccctttacctaacgtgttatattgtgagacaatgtagcaaatgtaagaagccttgcttgctcatttcggcttgctagcatactttcacaaagcccctgctgtgatgacctgcagttctccagaaagatgcttcaaagacaaaacaagattgagcacacggcctcccatctctcttgcctgagtcactctactccttaaaagataagcaataatagtccttgccttttcctacacataagataacgtctgattgaaggatacctctgtaacctataaccagatctgctcatacacccaaacgttgatgtagttcggcttcaatgtagcttctgagctaatttgatgtagtggttaatatgtaacctcctgacatcgaaaaggatatggatttgtttctgaatcataaagttttactgattgttttgtgcatgaaatattttagtctatatattgtcatctgtgtccaatgattgtaacctctgtattgtaccctccagtgaaaaaagacaactccaatatgaagagcccctttctttctgcctgaacttccttacaaaagccttccaacttgtaacagactttggaccaccctcaacttcgttggtgtgtcttcctacatcagtcctgacatttgccttccaatagaactttatgaaattattcctgcctcagcaaccctaatttcatgagacaatattttaagcaattttttaggtgtaaggaagtcttgtgactgaaatgaaaaaacacttgaggtaaaggaacaataatattaaaaaaaccccaaaccaaaccaaagcaaacaaaactccttaggttcatctgttgtgagcttgcaaaacttatagagcaagattcaaatattttttcctgtcctcctcccaactcctcctgcaaagcctttctttaccactgttttctacacatggaggaaagggcaggaaggctctgcgtctccacactgcagccagaaagccaacattcagtgctagcgctcagagaacccgggacacagagatgccgtggaaagtgaaagaaagagtagtagaaagatagtcgggaaaatatctgtaagtggccttttagaatagacttaaaaacacgaatgaattaaaaaaacaaaaagcccaactggcagaaactggcaaacccagcaaccccactgtcccagctgaacaaaaatacttcacacagctaaaaactttaaaacttaccaggacaaggatagaaggctagttttaccattgaaaaatacaaacttcagagtgaaagaagtctaagacttattatatgtgatgtgtcaagtattttattgaaagaaaacttgcttcacacaaagtagagaaaccagctcaggagcaatgtcaagtcaattacagtttccccctttccaagaaactactgctagtaagattttatgggacaggggtaaaaatcaacattctgaaatggagatttaacaatcaaatgagtcaggagattgttgttacacaaatattgcccatttgctttataaaaaatatgtactttcatataagatatctctaaggaaacttatatgagcccattcacaatacctagatcgaaaagggcagtatgatatttatgtgaaaatggggttgggtgttagaagacagtgcagaccatgagcaccttgccacctgaaacttaccagtcacctccccttagactgaagggtgttgctgatgcctccctgactccttttgtgaaaagcaggaacatttttttccaccaagtaagagtaaagaaagccccacaacatccataccaagcatgatttctcagccttgtgaactaaaatgaactc

SEQ ID NO: 584876 - DNA, 4001 bp, Homo sapiens
tctatgtacttccaaggcctagcctctgtagagaaggccactgagacagggatgaaagccactctgaaggaacgtcaacctgataaacactttcagaaatcactgttccgtctccccagatctcagtaataaagccagaggagtgcctagccttcctgaggttgagtgaggttctacaccacaagccaccagggtgctacataagccagggaaagccacttctgctcctcgggtctgtttcttccttggaatagggaaaactttaatagcctatggttctataatacacatttacataatcaatcaatcaatacatgttgcccctcgagttcacccaatttcacctgtattgcctattaatccactataattcaatatcaggcttttacaagttcttaaagtgacactaaaagtaccaatttctggtccaagaaaaatgacaggaaaactactattatgacccaagaaccagaaaatattattagcagtttttagaaggtacggtcatcctaaacatgttttgacgcacgacaccttattaaagagagagagagatatatatagatatatgtatctatatatctatataattgtctattgtgaaatgccagttacctattgtcgaaaatattgatcagatcagtttactttgattaccacttaatcgttaagtggcttacacttaacaattcttatacagagaataggtggaaagagaaaggttagactgctaaattggtaaacttttcagattaattttgactaaatcaagagaaattatttttccctcatcagatcatcaaagttgaagtccttaaattacctatactagtaaagttttgtttatcgtttttcaaataggtgattgtagggctaaatagctaaatgctgaaactaacattaaacctctaccaaactaaaaaaatgaaaaagataactgcaaacgagcgtcttgctagtcgagttaattcattctgtaattctaactgaatcttcgcacatctcccgaatggcaaatggcattacattgctaagagtcttttcgcacttattcatgcttcaaagcaggcagtttctgggacttgtctggccaacaacccgttcccaaaggctcggggaaggaggttgcgggtgggtggcgcggacctcgggtccccagccatcggcgctctcccggggccctctgacctcgctccttaaaggaggagggtccgtggcaacggtcctcctcggccaggcgctctcgggacgcgggggtgaggagtgagcgccgtggcccaccctactctccgagcggggacggagtgggcgacaccgcgcgcccggctgcacgcaggctctgcgcggctcgaggcggccctacagggggcgaggaggaaccccggagactcggcggagagagcagagacggagctcaccaaggggcttgccgccgcagagcgcgggagccggcactcggtggggccgagggcccggggacgctggggctgcctgacctgagcggcggccgctgaccgttgagggtctctgtggccgcagcgcccagacccggggagaagggcggcctccaagggccgggagcccctcgagggcgcggccagcgaggagggacagagggcggcgcccccggctgcccgggcgcgtagaacaagcagctgccgccagggccgacaaagttgctccccgaggggctgagatccaactttcgcttcccgatttagccaggggagcgcgaggccgcacacaacccggcgcggggggaaagccggctgcagctgcgcctcccatccttacccggctggtccctggcggggagcctgggcagcgccgaccaaagttcggagcggcagcttcggggcgcgggacgcggggcacacgggctcagctgctcgacgggagcccgacgcgcgctcctcggcgggtcggcgggtccggaagctccgctgcccgggccgggtccccaagcccgcagccgctttgactaaaataggcatcgcgacggcggcggcaggcggcggcagccagggctggggccgcaccgcgcacgcgcatgcgcccgccgccccgcgccccccggcgggcggagcccggcgccgcggccaggatttcccacctcgctcccgcgactccgctgcgggtctgcacacccgaggactcggtttgaaacgcccgcttatttattttcttgtcgcctcgctacaagattctatccttgtttgggcatgagtggggggcggcagtctcgtgggaccggcggcattcgtcgttcctccttacggggataattcgagaagtgcggtccgggtagggagagaaatcaggagagaaaatgagaaagagaatcctcgtttcccctcaaagttggacgacccactcgtatatctcctttttgggagattcgcccataactcagcacaaacagggaatagcccggaaagcgcgcgagttcccgtccgattgtggcgggggaggctgaacgtttggtccacacgggtgcaggacgcgggggtcaggcctcctgctgcggaggaagagggggaagaggccgcgcgggagggacttctgacacgcgccactgtttttgttttcaaacaggggtacttaaccgaaactagcaatcccaggcggtacaaggccctccatcgtaggcaaagcactacctgaatgtagatttgggccatacgttggaaaataagacatgagagtatgctccgatcaacttttactgttcactggacaactattttgggtaagaaaagcaaggaaacttaataaagaattggcgttgttgggagttgtcttgtaggacaatagaggaaggttagatgggtacccagtttccaccaaaagtgtcccattattggttaaaattggcatcagttattagattatgagatcgttcatgcatgtgaaatgtgatctcaatataaaaaataccaccaccgattgtgtgaaggtacattataaagagtacctggaggtgcacactggacaagtctctggttgaagagatggtgcagcctagtaagaaagagcatgggccttgatgtcacacaagccgggtttgaatactccctctcctaccagtttactgtgtgaccttggagaagttacctagcccttctgtgcctcagtttcctttttggaacatggggataatgatgatgatgatgatgatgatgatgataattatgataattgtacctgcacttcatagtatagttttgaggactaaatggtgtaattatatataagggtcttaaaatggtgtttgggacataagttctatgtatatatattgtatttataaaactccttttctaatacgtctgaactttcctataaccataaaagattactttttgagattacttctttagagtctgtttctttctagatgctctgccagccttttttttttgaggcagagtttcactcttgttgcccaagctggagtgcaatggcgcgatctgggcgcactgcaacctccgccccccgggttcaagcgattcttctgcctcagcctccccagtagctgggattacaggtgtgcccacgtccctaccagctgttttgatagctaccactaaatacattttaaggtgtgggtatacatgtgtgcgtaaagacttaactacacagatgttcactggagggtgagttataataatgaatattggaaatagcctaaattctaaccacaggggactaagtaaattatagaacatccagacagtcttgtttatgaaagagcatgggccttgatgtcacacaagctgggtttgaatcccccctctcctaccagtttaaacagccattaaaaataaaaaacatagaaacagactctatgtttaaacaaccattaaaaataatttctagaaagatattatagacatcataataatgtctactaattatataaagcaagctatgcccccaaaaccccagcccactgcctgtttttgtatacccatttttacattttttatggttggaaaaaa

SEQ ID NO: 584877 - DNA, 4001 bp, Homo sapiens
gaaaggatgttaacagacaaatgtgaaagaattccacagcttaaagatgataaaaaacaagcacaccaatttacaaattgtgaatgaaatgatcaagtcaactgaagatctttttacataattctgaaatagctcataaatattaatagtaatagttgacttagatattgatttgctacaaaaaggaaagaaacaaaaattcacctattttccaaatgtctgaaatcagcaaatatataagcctatcaggatggcgggggggaagatcattattttaataactccatttatacaaaatttgcttttcaaggccaaacgagaatgaatctcgtaacttctgcaggacagagaatgatatgaggtatcctctatcactcataacccaacatcacctaccctagcattacataggttaataataactatcatttcgacagcactgtagaatgtacctacactcccattgtcctgtttgtcctctaggaggcagggacaatgtttattcatctatgtacttccaaggcctagcctctgtagagaaggccactgagacagggatgaaagccactctgaaggaacgtcaacctgataaacactttcagaaatcactgttccgtctccccagatctcagtaataaagccagaggagtgcctagccttcctgaggttgagtgaggttctacaccacaagccaccagggtgctacataagccagggaaagccacttctgctcctcgggtctgtttcttccttggaatagggaaaactttaatagcctatggttctataatacacatttacataatcaatcaatcaatacatgttgcccctcgagttcacccaatttcacctgtattgcctattaatccactataattcaatatcaggcttttacaagttcttaaagtgacactaaaagtaccaatttctggtccaagaaaaatgacaggaaaactactattatgacccaagaaccagaaaatattattagcagtttttagaaggtacggtcatcctaaacatgttttgacgcacgacaccttattaaagagagagagagatatatatagatatatgtatctatatatctatataattgtctattgtgaaatgccagttacctattgtcgaaaatattgatcagatcagtttactttgattaccacttaatcgttaagtggcttacacttaacaattcttatacagagaataggtggaaagagaaaggttagactgctaaattggtaaacttttcagattaattttgactaaatcaagagaaattatttttccctcatcagatcatcaaagttgaagtccttaaattacctatactagtaaagttttgtttatcgtttttcaaataggtgattgtagggctaaatagctaaatgctgaaactaacattaaacctctaccaaactaaaaaaatgaaaaagataactgcaaacgagcgtcttgctagtcgagttaattcattctgtaattctaactgaatcttcgcacatctcccgaatggcaaatggcattacattgctaagagtcttttcgcacttattcatgcttcaaagcaggcagtttctgggacttgtctggccaacaacccgttcccaaaggctcggggaaggaggttgcgggtgggtggcgcggacctcgggtccccagccatcggcgctctcccggggccctctgacctcgctccttaaaggaggagggtccgtggcaacggtcctcctcggccaggcgctctcgggacgcgggggtgaggagtgagcgccgtggcccaccctactctccgagcggggacggagtgggcgacaccgcgcgcccggctgcacgcaggctctgcgcggctcgaggcggccctacagggggcgaggaggaaccccggagactcggcggagagagcagagacggagctcaccaaggggcttgccgccgcagagcgcgggagccggcactcggtggggccgagggcccggggacgctggggctgcctgacctgagcggcggccgctgaccgttgagggtctctgtggccgcagcgcccagacccggggagaagggcggcctccaagggccgggagcccctcgagggcgcggccagcgaggagggacagagggcggcgcccccggctgcccgggcgcgtagaacaagcagctgccgccagggccgacaaagttgctccccgaggggctgagatccaactttcgcttcccgatttagccaggggagcgcgaggccgcacacaacccggcgcggggggaaagccggctgcagctgcgcctcccatccttacccggctggtccctggcggggagcctgggcagcgccgaccaaagttcggagcggcagcttcggggcgcgggacgcggggcacacgggctcagctgctcgacgggagcccgacgcgcgctcctcggcgggtcggcgggtccggaagctccgctgcccgggccgggtccccaagcccgcagccgctttgactaaaataggcatcgcgacggcggcggcaggcggcggcagccagggctggggccgcaccgcgcacgcgcatgcgcccgccgccccgcgccccccggcgggcggagcccggcgccgcggccaggatttcccacctcgctcccgcgactccgctgcgggtctgcacacccgaggactcggtttgaaacgcccgcttatttattttcttgtcgcctcgctacaagattctatccttgtttgggcatgagtggggggcggcagtctcgtgggaccggcggcattcgtcgttcctccttacggggataattcgagaagtgcggtccgggtagggagagaaatcaggagagaaaatgagaaagagaatcctcgtttcccctcaaagttggacgacccactcgtatatctcctttttgggagattcgcccataactcagcacaaacagggaatagcccggaaagcgcgcgagttcccgtccgattgtggcgggggaggctgaacgtttggtccacacgggtgcaggacgcgggggtcaggcctcctgctgcggaggaagagggggaagaggccgcgcgggagggacttctgacacgcgccactgtttttgttttcaaacaggggtacttaaccgaaactagcaatcccaggcggtacaaggccctccatcgtaggcaaagcactacctgaatgtagatttgggccatacgttggaaaataagacatgagagtatgctccgatcaacttttactgttcactggacaactattttgggtaagaaaagcaaggaaacttaataaagaattggcgttgttgggagttgtcttgtaggacaatagaggaaggttagatgggtacccagtttccaccaaaagtgtcccattattggttaaaattggcatcagttattagattatgagatcgttcatgcatgtgaaatgtgatctcaatataaaaaataccaccaccgattgtgtgaaggtacattataaagagtacctggaggtgcacactggacaagtctctggttgaagagatggtgcagcctagtaagaaagagcatgggccttgatgtcacacaagccgggtttgaatactccctctcctaccagtttactgtgtgaccttggagaagttacctagcccttctgtgcctcagtttcctttttggaacatggggataatgatgatgatgatgatgatgatgatgataattatgataattgtacctgcacttcatagtatagttttgaggactaaatggtgtaattatatataagggtcttaaaatggtgtttgggacataagttctatgtatatatattgtatttataaaactccttttctaatacgtctgaactttcctataaccataaaagattactttttgagattacttctttagagtctgtttctttctagatgctctgccagccttttttttttgaggcagagtttcactcttgttgcccaagctggagtgcaatggcgcgatctgggcgcactgcaacctccgcccc

SEQ ID NO: 584878 - DNA, 4001 bp, Homo sapiens
atttaaagaatatacattttacacatgcttatataaaaccatttcctatgttacctgtcttcggtctccggtccttaaaaaacactctattattaattgcacaaatttggtccttgccaaacactatgtaggtttacagattatatgaattattctgtttcagcaaaattccaaatggggaccctaaatacatttaaatttagaaatatgtatttctttcaaaataaggtcatgcaattaatcttactcttctactgcttgttcttaacatactaaaggttttaggtagtagaataattaattggtacaaaatgggtattttgaaaggatgttaacagacaaatgtgaaagaattccacagcttaaagatgataaaaaacaagcacaccaatttacaaattgtgaatgaaatgatcaagtcaactgaagatctttttacataattctgaaatagctcataaatattaatagtaatagttgacttagatattgatttgctacaaaaaggaaagaaacaaaaattcacctattttccaaatgtctgaaatcagcaaatatataagcctatcaggatggcgggggggaagatcattattttaataactccatttatacaaaatttgcttttcaaggccaaacgagaatgaatctcgtaacttctgcaggacagagaatgatatgaggtatcctctatcactcataacccaacatcacctaccctagcattacataggttaataataactatcatttcgacagcactgtagaatgtacctacactcccattgtcctgtttgtcctctaggaggcagggacaatgtttattcatctatgtacttccaaggcctagcctctgtagagaaggccactgagacagggatgaaagccactctgaaggaacgtcaacctgataaacactttcagaaatcactgttccgtctccccagatctcagtaataaagccagaggagtgcctagccttcctgaggttgagtgaggttctacaccacaagccaccagggtgctacataagccagggaaagccacttctgctcctcgggtctgtttcttccttggaatagggaaaactttaatagcctatggttctataatacacatttacataatcaatcaatcaatacatgttgcccctcgagttcacccaatttcacctgtattgcctattaatccactataattcaatatcaggcttttacaagttcttaaagtgacactaaaagtaccaatttctggtccaagaaaaatgacaggaaaactactattatgacccaagaaccagaaaatattattagcagtttttagaaggtacggtcatcctaaacatgttttgacgcacgacaccttattaaagagagagagagatatatatagatatatgtatctatatatctatataattgtctattgtgaaatgccagttacctattgtcgaaaatattgatcagatcagtttactttgattaccacttaatcgttaagtggcttacacttaacaattcttatacagagaataggtggaaagagaaaggttagactgctaaattggtaaacttttcagattaattttgactaaatcaagagaaattatttttccctcatcagatcatcaaagttgaagtccttaaattacctatactagtaaagttttgtttatcgtttttcaaataggtgattgtagggctaaatagctaaatgctgaaactaacattaaacctctaccaaactaaaaaaatgaaaaagataactgcaaacgagcgtcttgctagtcgagttaattcattctgtaattctaactgaatcttcgcacatctcccgaatggcaaatggcattacattgctaagagtcttttcgcacttattcatgcttcaaagcaggcagtttctgggacttgtctggccaacaacccgttcccaaaggctcggggaaggaggttgcgggtgggtggcgcggacctcgggtccccagccatcggcgctctcccggggccctctgacctcgctccttaaaggaggagggtccgtggcaacggtcctcctcggccaggcgctctcgggacgcgggggtgaggagtgagcgccgtggcccaccctactctccgagcggggacggagtgggcgacaccgcgcgcccggctgcacgcaggctctgcgcggctcgaggcggccctacagggggcgaggaggaaccccggagactcggcggagagagcagagacggagctcaccaaggggcttgccgccgcagagcgcgggagccggcactcggtggggccgagggcccggggacgctggggctgcctgacctgagcggcggccgctgaccgttgagggtctctgtggccgcagcgcccagacccggggagaagggcggcctccaagggccgggagcccctcgagggcgcggccagcgaggagggacagagggcggcgcccccggctgcccgggcgcgtagaacaagcagctgccgccagggccgacaaagttgctccccgaggggctgagatccaactttcgcttcccgatttagccaggggagcgcgaggccgcacacaacccggcgcggggggaaagccggctgcagctgcgcctcccatccttacccggctggtccctggcggggagcctgggcagcgccgaccaaagttcggagcggcagcttcggggcgcgggacgcggggcacacgggctcagctgctcgacgggagcccgacgcgcgctcctcggcgggtcggcgggtccggaagctccgctgcccgggccgggtccccaagcccgcagccgctttgactaaaataggcatcgcgacggcggcggcaggcggcggcagccagggctggggccgcaccgcgcacgcgcatgcgcccgccgccccgcgccccccggcgggcggagcccggcgccgcggccaggatttcccacctcgctcccgcgactccgctgcgggtctgcacacccgaggactcggtttgaaacgcccgcttatttattttcttgtcgcctcgctacaagattctatccttgtttgggcatgagtggggggcggcagtctcgtgggaccggcggcattcgtcgttcctccttacggggataattcgagaagtgcggtccgggtagggagagaaatcaggagagaaaatgagaaagagaatcctcgtttcccctcaaagttggacgacccactcgtatatctcctttttgggagattcgcccataactcagcacaaacagggaatagcccggaaagcgcgcgagttcccgtccgattgtggcgggggaggctgaacgtttggtccacacgggtgcaggacgcgggggtcaggcctcctgctgcggaggaagagggggaagaggccgcgcgggagggacttctgacacgcgccactgtttttgttttcaaacaggggtacttaaccgaaactagcaatcccaggcggtacaaggccctccatcgtaggcaaagcactacctgaatgtagatttgggccatacgttggaaaataagacatgagagtatgctccgatcaacttttactgttcactggacaactattttgggtaagaaaagcaaggaaacttaataaagaattggcgttgttgggagttgtcttgtaggacaatagaggaaggttagatgggtacccagtttccaccaaaagtgtcccattattggttaaaattggcatcagttattagattatgagatcgttcatgcatgtgaaatgtgatctcaatataaaaaataccaccaccgattgtgtgaaggtacattataaagagtacctggaggtgcacactggacaagtctctggttgaagagatggtgcagcctagtaagaaagagcatgggccttgatgtcacacaagccgggtttgaatactccctctcctaccagtttactgtgtgaccttggagaagttacctagcccttctgtgcctcagtttcctttttggaacatggggataatgatgatgatgatg

SEQ ID NO: 584879 - DNA, 4001 bp, Homo sapiens
tgaggctgcagttagctatgattgtgccaccgcactctatcctgggtgacagagagagagagagactctgtctcaaaaaaaaaagaaaaaaagaaaaaacggagaatatgagatactaacgaggaggctactgtgataatccaggtgagagactgtggtggctacgacaggatggtgttccaaagcggtgaaaagtggtctcattttggatacactttgaaggcaaagtcatcagaatttccttacagatcagatgtggggagggagagacagagagaggagatggtgggggcagggagagagaggagtctaaagtttatctcgagcaaatgaaagaatatgctactaactgagacagggaaggcaatggtgagagaagcaggtttggagggaaggtcaggatttctgttttgtacatgttaaatttgagctgtctgttagatttcaaattggagatgccaaataggcagttgaatataagaatctggatttcatggaagagatcagggctagactataaagttaggagtagtcactcaaggatggtatttaaaccatgaaacttgccagcaccagagaatatttgaagaggtcagaggactgaggagaagaggttgcaataagagtcagccaaggatactgagaagtgaggtggcagtaaaacaggagtgttgatgtcttagaacccaagtaaggatactgtggccagaaggccactattcaattgtgtcaaatattgctttagatgagatctgagaaacggatgaagcacctcagaggtcaacactccctccctagtgagaaaacatcagacgtctttcaattcatctctctcgctctttggctgctaaacaatgtgttttctgctcataacacttcccattcgtttttcagttctcagcttaaaggtcctgctgcaatcggagaagcttctcaagaccaatgctattgttaccagggaaacgatactttatcatggaaatatattattctaagagtctacttaattgcctctctgctgggcttgactgtaaggtccttaagttagacgtgcctgtgttgtttacttctgtacccaaacattcgatagaattccgagcatagcgcaaagctcgtagtgggtatcccataaatatttacaaaaccaatggatacatgctaggagcacttagtggcgcgatcgattactgttggcctaacttcgggggtgtctagaagggagtgcctaaaactaggagtggacgcggagggctctagacagggttcagtctcctttgcaagtgtaatacggacccctttgttgactcgaagcaattcccctgccagacactttttagctgcccaccccgccccactactggccactgtcttcctcggacctcatcccagacactcacccagccgcgtggtgcgttcccgcggcgccgcgggcttgtccccagtcccatgctcggcctcgagttcctcctgttgctgccgtgcttgctgcaaaatccgtcggctcagccggggccccacatactcttcctccgcttctcctgtcccgcgaccccgccgcttctcccggacccccgcccgcaccgcattcccagccaggatctgatcggccaggggcgcatgtttttcctgaccccccaccccacgggccgccttgaatttgggcatttttctcgaaaaagttgccgggaaggatcgcacgtggggactgaagaaaggccaggatgcgcttgcgcggtggactcccagcgcccaagaggccgcccggcgatcacagcgccccctagcattcggaggccagaagcgccatcagcgccgcccctcccactaaaagagctcccgggttccggagctggactcccgaatatattcactgcctttaacgttagcttctctcaatagtgcagtctttgagtgtcgctctcctagcttcatggatgtaggcctagagtgctcagccaaacgggaatgtctggatttagaaacctcggggcgggaatccgcagatgatgtcagtggaggcgtcaccgaggggtgccgagacacgccccattccttggggaaggcgtggacccggcgctctgtttttacgtatttccggagtcccttctgagacagaaggttgtgttggggaactgaaggagtttctgtgggcggacagggaaccctgcgtttctactgtgtgattctgccaccttcctggcccgacgccatgggagtgacttggtaggactgcagggggttttgtggggcggggcttggagttgtgaaaggccggaaagaggaccttgaccatggtccgccgtcctctgggagctgagggagatgtcctcgggttgtgtagatgagaggatgccgtccgggctgcgggttccccgggcttgtttcctcagagatgcgccccttcctcttggaaggcgggaaagcaaaggttttttttttgttttgttttgttttttttaagacggggtctcgctctgtcgccagactggagtgcagtggagcgatcttggctcactgcaacactccgcctcttgggttcaagcgattctcctgtagtcccgagtagctgggactacaggcgcccgccaccacgcccggttactttttgtatttttagtagaaatggggtttcaccatattggccacgctggtgtcgacaaagcaaactttttatcccaggaacctatcaatggttgtatacctcattctcttctggatacatcttccttcccgtgaggccatagtactgcctgcagtgggacctcagggttggaaatagggtctttggactatgacccacctgcagacagggttggagggagtgggccataagcaatcaggagatagtattttttaagattttcgcctgctcttccctcagccatcaaatacagttagacccgcttgtgtctgtttctaatttgctcattttaagatcttgggtctagaggaaaaaagggtattgataataaggagatcatggttccaggcactttatctctttaggacccgtttcccactatgtttaattccatggttggtctagtttcaatggagtttttatctttcatatgttttaagtctcagttgaaagaagatgaggtggcagggaaaggtatgggtccagtgctcgtggaggcgttagttgtaaggtgccaggtcccagaacatttttttcttatctcagtagatgtgagcatttttcccgtgggagaaatccggaggccaggatatttgaagccagtggatataggcttctcatacaaaagcatgtgtaggggaaatacttttcctcctggtagcccaggttcttgcaggtttctcagtgattgcactcttgcttcctacgattgacacgatcctcctgtgttccttaatggaagcaagatatgtgaggaatggaaatggaaaggatgcagcgtagaaccctggaacccttgctctttcttttttttaaagaaatagaaatggggtcttgctgttttgtacatgcaggtcttgaattcctgaactcaagcgagcctcctgctttggtctcccaaagtattggcattatagacatgagccaccgtgcccagccacccctgctctttaaatggagaaggcagctccagggaaagggctctctgttggcccccttatcaacgttttcagaatcctaggacttctgtcacttgtagcgtcagtttagggattcttttgtatttcaaaataaggcacattagcaacatcgtttatcagtgtttttttctgatagagtagtgacaatttttagcaacagaaggactctaccttaatagattcatttagttgatcataaagcaatgtcatctatgactgttttcttgatttctatatagctaagtactgcttgtactattgtttattaattttttaatcgattttccttaatgttttaacaggcactacatccttatacaggcagtctagttagtggttaagagcatggacatcaagccaggttgctgggctttgagtct

SEQ ID NO: 584880 - DNA, 4001 bp, Homo sapiens
aagtgctgggattacaggcgtgagccaccgcactccagggctgttgtatatgcttactaatgtcaactcatttaatccagatggcaatctcaggtcagcactcactatccttgtcttacagatgggaaaactgagggctagaaaggttaaatagccttcccaaagtctgtcaaagtcagagtagggcttggaacccaaacctggctttaaaggcaaggcattaaagcacagtacttgactctctcccagcatatcttccctacaacaatctgtggggcctgaatatgaagtcttgctttgaggcacttagaaaagccaggcagagtgtgtggaggctttatgctacatctgaagcttagcaccagctgcctggggcctggcccttgcagacttgtgatgtgtgacctgtagacctcaatttaccaaaatccaggaatattattatggcacactgaacaacagactcctatccccacagaggcttcctggatgcacattgggccccagggttccccaggagaccccagccccctgtgtagcccatcagccagagaactcacccccattatcacacacagctgtttctccatcccacatgccgttggggcgacactgacgcacaggcgagccccgcaatatgaagccatcctcacactcgaagctcacattgccacccacgggataggaccccagccgtggggtataaatgccattctcaaaggagacaggggctggacagcgcacagctggagagagaggaagtgggtggggaatataggactggatggataacacctgggctggggattaagcaggtgattttatgctggaatgcatgggaatggtcaactggctgtcaaaacactgaaatattaggttgcaacatgtgaaattgctgtttttggcaactgattgaatattgccaatttcacagagtctaagcgaactgattgataaatagccacttccctcagtctcctgagggccgtggcctccccagacactccccttgggatcctcagatgtctagaggactccaggaccattcagcatctgttctgaatggtcactactaggcagtcaattgtacataaaaagtcatccctggctttagtaccccacagtctccatcaagacctgttcccaattccttgctactggcaattgacattttctggatattttgaaaagccctctgcaaaagcaactttgccatctagtcaggttaagtcccaccctgagcaactcctaaacaaaagttctggggtggcccctggtgtagcaccctgagcaaagcccacagggagcctcacgtttgcagaccgccttagacagagaccgggtggctcctggggtctgccactgtccgctgctcttgcacagccgtgatgctggggatgggtacaggccctgggggcaggagtaggtgagaaggctcccaggagcccagccatggctgagggtgaaggtgccacccgagatattcacgttctgagggcaggagggagccgagtctgccagacctagagccgtgggaacaaggagacagcaatggagaaagaaggaagacacagatgagaaaaggaaagcaaaagagactgtttcacacatgggaattcaagctgggagcaccaacctcacacacaggaccctgacgttcccccttccctgcctcctacctgggtacaggaacagcaggcaaaaaagaaccatcagtgggcccatggtgtcctccctaggggcggcgagaggtagagagccgcgggagggaaaaggtcatctgacttcccgaaaactagagctgggtcagcagctgcttcattgctgccagagaagaaaaaccagggagtggcaagggggatggtcttctgttagggaaataataagcagggattggggactgaactgaagggtgaaacctttgccctgtctccctgatgctaatatatctatagggtcaatagatctcccccacaggctttgtgtactgcccccacgctccacccacccatgcgtgcacatgtgcaccatacacgcatgctcacaaacacgcaggcaaacacatatttgggctcgtgtgtgcacacatgcaccttgctcttgtgtgaatagtcaatagtctaaagcacacaaacccacaaaccatccaagatattgcaaaatatttcatttaagtaaagttttagtgttcttttgggttgtaccaagtgggttttacttcctgagagcctagaacagttctgtcttcttgaagataaacttccgaggggggtgaaactaatttttttagaacttcttgataaataggaagattgacaatacttttttattccctacaatccttccctagagataatctaggtggaaaaaatgaaatcaacacttagttttggagacaggaaaaatgtttacaacatttttacggaaagtctagtagatgaaattcccaactggcaaagtaaatacatttggggttggttactcaaaggaataaaacttttgcgggggctgggatatgcctttaaatcataacctacacttgtatgaaatgcaggaagcaaagaaacttgaagctagtgtgttagtctccctgacccacagaagtcttttcaatacctttttgaacaatgtagggtaaaaataaataagaccaataaaaaaatgaacatgaaacctctctgaagtgatcatttaggttcgtaaaaacccttttgatttataagtgagtccttagagaactgattgaacctagaagatggaggttgcagtgagccaagattgtgccactgcactccagcctgggcaacagagtaagactacatctcaaaaagaaaaaaaaaaaataagaccgggcacagtgactcacgcctgtaatcccagcattttgggaggctgaggcgggtggatcatgaggtcaggaatttgagaccagcccggccaacatggtgaaaccccgtctctactaaaattacaaaaaattagccgggtgtggtggcaggggcctgtaatcccagctactcgggaggctgaggcaggagaatcacttgaacccgggaggcagaggttgcagtgagccaagatcatgccactgcattccagcctgggtgacaagagcaagactctgtctcaaaaaaaaaaaaaagagtacacaaattgagactccccttggacagggctaagtgcatgaaaatcaggacatcctggtgttagggactccaaagtggctgctgtggcagagctgctagtgcctcccctgcccctcaagtatcttttctccctccttccacagtaagagatggttaggggaacacacagtcacccagctaaagaccatatttcctagcttcccttgcagctaggtagccaggtgacttggttctggctaatgggatgttagtagaacttatgtatgtcatttccaagttatgtccctaaaataaaaaggcagtgtgccttttcttttcatgggctggaatataaacctagcggagatccgtcttccaccaggaggatgagggcaacatgctggggatgacagagcaaacagacagaggagcctgggtgtctgacacagtgttgatgtcataccagccctgcacagccacttagattgttacaagagagaaataaactatcgtaaaggtggggggtatttaaggatgttcacaaatactgtagccttgtcttctttcaatcacatggtaggataggatttccccagccacttgttttagccaataagatgtgagtacaagtgatatgtatcacttcctgatggaagctcaatgtagtcttcaccctgctcttcccctctgtatggtaacgtctgagatggtggctgctccaccagccaagatccctgggtgatatcgaaagcacagtaccagccgggcacagtggctcacacctgtaatcccagcactttgggaggccgaggcagggggatcacctgagttcaggagttagagaccagcctgaccaacatggtgaaaccccatctc

SEQ ID NO: 584881 - DNA, 4001 bp, Homo sapiens
gtgttgaagggaagttttgtttagagctggaccttgtcagtctggaggagaggtgaggaataagggggacggagcggtggaagattagagtagaatcatactaacataataaatcacatcattaaaattagtcctagggttaattatatactaaaggtgaaatgggcaaggtcatcgatagcacaagcggagggcgactgccttggcaagaagttgggatcaatcctgagaatggaggggagggcgggtgtgattttaaaggactgacatggagtggaggaaagttgagggcactggatcgtctggctttgtggaaagtgaaatcatatttcaggcctgaagggctgaggcggttactagctttacaagagttggaaaagcctgggaatgtgtctggagcaactgtgagcacactcagcagaggaggcaggcgtgggtaatagctaccaacagctctgttagccacggggcggatggggccctgagaggtgccacggatgcacccagggcagcgctcggcacagctggaccggagacgcaccacccctgggagcaggtggcagcgcccgcagccgagagaacgggtgcgcgcgcgcgctgcgggatgcggcgcgggcggggcgcggggacgcggagcgagtagcgccatgggcagccgggattggggggcgggcccgagtgagcgggcctccgcgcggcacttggcacgcacgcgcaaactggccgcggggcttggaggtacagaggagggggagcgagaaagaggggggtgtggaacgtatttccgctctggcggacaaataatcccggccaaagaggaggcaaggccgtccggccctttaaccgcgtgggggtgctggtgaagaaaggggggtcgggaaggggggatcctgctcctttaattccctcccctcttcctcctccccgagtcctagccgacgccgccgccgccgcgcgcgcggggcctggaacacacggcacgagccgcccccgcccctccccccttacgcccacgcggagccggccccgcgcgcgcgcgcgtcccgtgcatccccgcgcctgcgcgctgcccaggccctgcccgtgtgtgggggtcgctgccggccccgggggggggtggggaaaataagggattaaaaaaacagcgcgcggaaccgggccaggtgagaggagcgtgcactcagggtcgtggggctgggggggcgtgccacggagctctgagcgtgggggcagggcgtgcacggtgcgtgctggcggcgggggggaggacgtgaaaagcgcgtgcaaacgtgtaaggggggggcggaggaatgaggcagccggtaaagggggcggggtgagaagagcctgcaaccggggccaccttggagtccagagccccaggcctctggcccccctttttctccgtccttccaccgtgggcgcgcgggctcgccccatcctagcgggctgctgggctggggggtgtggacgccgctgccccgcccccgagaaccacgcctccctcctctcagagggacagcacctccccagggttggggaaactgaggaagaaatctgaagaccgggagatcggatgccggggggctgggcaagaatgggggcgagggtcctggagccttggcttcggagagccagagacctttgtctctgaccggtttccttcccaaccagggttgcccacccccgccacaatggcctctggggtggaagtcctgcgcttccagctgcccggccacgaggccgcaacgctacggaacatgaaccagctccgggcagaggagcggttctgcgacgtgaccattgtggccgacagcctcaagtttcgaggccacaaggtcatcttggccgcctgctcacccttcctgcgggaccagttcctgctgaaccccagctcggagctgcaggtctccctgatgcacagtgcacgcatcgtggccgacttgctcctctcctgctacacgggcgccttggaattcgctgttagggacatcgtcaactaccttacagccgcctcctacctgcagatggagcacgtggtggagaaatgccggaatgccctcagccagttcattgagcccaaaataggcctcaaagaggatggggtcagtgaggctagccttgtgagcagcatcagcgccaccaagtccctcctccctccagccaggaccccaaagccagccccgaagcccccacccccacctcctctaccccctccactcctgcggccagtgaagctggagttcccactggatgaagacttggagctgaaagccgaggaagaggatgaggatgaggatgaggacgtgtctgacatctgcatcgtcaaggtggagtcggccctggaggtggcacaccggctcaaaccccctggaggcctgggagggggtctgggcattggaggctccgtgggtggccaccttggggagctggcccagagcagcgttccccccagcactgtagccccaccgcagggtgtggtgaaggcctgctatagcctgtcggaagatgcagaaggggagggcctgctgttgattcccggaggccgggccagcgtgggggccacctcgggcctggtggaagcagcagcggtggccatggctgcccggggggcggggggcagcctgggggcggggggcagccggggacccctgcctgggggcttctcaggtggaaaccccttaaagaacatcaagtgcaccaagtgcccggaagtgttccagggcgtggagaagctggtcttccacatgcgggcgcagcacttcatcttcatgtgccctcgctgtggcaagcagttcaaccacagcagcaacctcaaccgccacatgaacgtgcatcgtggtgtcaagtcacactcgtgcggcatctgcggcaagtgcttcacacagaagtccacccttcacgaccacctcaacctgcactcgggagcgcggccctaccgctgctcctactgcgacgtgcgcttcgcccacaagcctgccattaggcggcacctcaaggagcaacacggcaagaccacggccgagaacgtgctggaggccagtgtggccgagattaacgtcctcatccgctagccgcgcaggcgtggaggccaggaggctggggcccctgggctgcgtggaaaaagggctctttggcccaggagaattggggggtggggggtctggggcagaaaggtaagagtgggaggctgagcagatgcacacatcctgagagagggaagatgattccttggagagacttgctcttgagagtgcaagaatctggagctgggaaaagggttcttggaggccaggggaatacggggtcccagagaaagatttccttctcttagaagtgcatgtatatgtggagggagggaaaagggtcctatagaatgagggaagacaaaaatgttttattcctggctaaggctgcccaggggaaggttctgacatttctcgagataagaagggttggggggtgggtgggaacagggagggaatttggcaggaggacatgctcctgcttagaatagacctggggtgagggagtggtaaggggaaaagattactgagtcccagaaaaggaagtgggagacagttcttgcatgctggggaaatgagactgcgagtatgaggcttgctgaaatttgagggagaacaaagtaagacgccaggtaagagaacgtggggtgcgcatcctgggtagatattgggaagtgggggtacaatagcaagaaacaatggatagtcatgggggtgggggggatagggcacttagaaaagaaagaacacaagaagggctgttgggagggagggagaggagtagagacatacagtattttttaagaaaaaacatattttttaggattttttctggagtttggggttttagtttttctgcttttgttttccacaaaataaaaaacaaaaaaaaacttttttttttcctttacactctggcaactgcgtgtacatgactatcctgccctagacagcctctccctgtgatgctgcgtt

SEQ ID NO: 584882 - DNA, 4001 bp, Homo sapiens
agagggaagatgattccttggagagacttgctcttgagagtgcaagaatctggagctgggaaaagggttcttggaggccaggggaatacggggtcccagagaaagatttccttctcttagaagtgcatgtatatgtggagggagggaaaagggtcctatagaatgagggaagacaaaaatgttttattcctggctaaggctgcccaggggaaggttctgacatttctcgagataagaagggttggggggtgggtgggaacagggagggaatttggcaggaggacatgctcctgcttagaatagacctggggtgagggagtggtaaggggaaaagattactgagtcccagaaaaggaagtgggagacagttcttgcatgctggggaaatgagactgcgagtatgaggcttgctgaaatttgagggagaacaaagtaagacgccaggtaagagaacgtggggtgcgcatcctgggtagatattgggaagtgggggtacaatagcaagaaacaatggatagtcatgggggtgggggggatagggcacttagaaaagaaagaacacaagaagggctgttgggagggagggagaggagtagagacatacagtattttttaagaaaaaacatattttttaggattttttctggagtttggggttttagtttttctgcttttgttttccacaaaataaaaaacaaaaaaaaacttttttttttcctttacactctggcaactgcgtgtacatgactatcctgccctagacagcctctccctgtgatgctgcgttcttaatacctagaggtcacaactctgcatatcccttgcctgaaggagcccagccctaaacatgggagaggagtgtgacaagtgagctcctctggtcagggactcccccaagtccccacccccagccctccaccagttctgcaatctcaacacttagccaggtacctcacagtacaagtgattggcagtcgtggggatgcacatgaactctatttgagggacttaggatcagtgctagggatgagctacaggtggccaacctgcccacggaaattgtaagcaggagtctgtttggtcatattttgtctggggtaaataggtcatgtcttcaggaaagctaaaaaaaaaaaaaaaaagctaagtttggattaaggtgcagggaaaactacaattcccagaaagctctggaatagttaaccaaagagaactacagttcccagaaggcctttaattggcctcaggtgccccacctgcctgtgtcaaatactgcgtgtgaaatcatacagatcttttccaaactcgaccaaaacgtaatacctaaagggatggtaccctaaatacagctatcgagattgtctatcttggtgtatatcatttatacttaaattgtccgctgggctatgacccacggagtacctgactgtgcttatgaagtgttcggcaaaaaaggtttacttactgcagtgtcaccagtcagtaatgacgttcgggccgctgggcttacctggatccctagtgcgtgtgaaggtgtaacacgcctgatataaacagaagagacatttagccacaggttttcagaagggcacgctgctccaggggacatgaagcagcatgctagaaccagccaagaataaaggtgtcctccgcgtccctatcgccccttcgtgctcgttagaaagagcaaaaaggcgaggccaaaactgaggccaagccttctatctggtaacccaaaaactagaaaggcagaaaagcaaccagaggcgggaaaagcccaaccaggccagaggaaatacagccgctgccgagagccgagaagttcagaagctccgcttgttacctaaaaccagatggggacagagacgccacacctgggcccaggcgtgtctcgccctcggtccctgcagaactgaggccaggaatgacaggaattctcccttgcagctcccagcttaggacagtcacagccatctccgaggccgctctcaggggaaaatggccaaaaagcatgtagcggctcctttaaggctcctcctcgccctccctccctcgcccacgtgacccggggcggccgcgcgccggctcggcccccagcgcaagcggcgatggcggcggcggcgggagctgcagcggcggcggccgccgaggtgcggaaggggagggggagaggcgggtgcatgcccgcgcgcgcgcccgggggaagcgcgcgcccgtgcaatgctccgggggtgcaacggggccggggggcccgggcgggacttgcagcaatccagggggccagcaccgggggcggatgaggggaccagggtgtgggaggtggggggagtgggcacggaggcgcgcgtgcagccgccggctgcccctgagtgggcgacgggcgccggggccccaggagcacgcgtgaggggcacgaggggccgtccaccgggctggggggcagcgggtgctggaggggttggtgcccggggtccccgcggcctgggggacaaagggggagcggcgcgtgcagccgggaggagggggcggggccggggcgcggaggccccgccccctccccctcctcttctctcggccccagagatgcggggtctaccgagagggagggggttgatgcgggcccgggggaggggtcgtgcggcccctccgggcagccgaggccgcggaaggggggggccccacagaggaagaggtaggccccggagcctactctctcttcccagggcccaggcatcctggaccccccaactctctactgggctgaccagccctcctgtcccttgtctcccctcccagggggaggcccccgctgagatgggggcgctgctgctggagaaggaaaccagaggagccaccgagagaggtgagtgcagctaaaacgggccccaattggaccgtcaccttccctaaacacaggatctcctgagcccttagctctgaactttttctcttcctctacagttcatggctctttgggggacacccctcgtagtgaagaaaccctgcccaaggccacccccgactccctggagcctgctggcccctcatctccagcctctgtcactgtcactgttggtgatgagggggctgacacccctgtaggggctacaccactcattggggatgaatctgagaatcttgagggagatggggacctccgtgggggccggatcctgctgggtgagaggctgggtagcctggggggttggtgggaaatttctgactcttgccttctttcttatcttgccttttgcttgcctgttttctaggccatgccacaaagtcattcccctcttcccccagcaaggggggttcctgtcctagccgggccaagatgtcaatgacaggggcgggaaaatcacctccatctgtccagagtttggctatgaggctactgagtatgccaggagcccagggagctgcagcagcagggtctgaaccccctccagccaccacgagcccagagggacagcccaaggtccaccgagcccgcaaaaccatgtccaaaccaggaaatggacaggtgagtgggatgggagagatgggataatcaaccataaacctttggtgagctcttttacagtttcacttaaggcttctactccatttactcattcacatatttaagcaaggggctgctgtgtgtcaaatattaggctgtgcttgatctgtgaaccaacagacaggttcctctcttcctgcagtttacattcttgggtggtgaaagtttgatgttaaagagtcaattatatagttaatgtcttaattactcttatgataatgacaaggtaagggaatttcaaaccactcttcctttctacctcaaagcaagcccttggggaactcatctgtcactgctctatttgtaaagtttttcctgggaatcccagtgggaaaggagatgagggccacagaaataatagaggagggaagtgacaagggcaccagaagctttatgaccaagttctagggttcttgggtcatacctattgttgacctaa

SEQ ID NO: 584883 - DNA, 4001 bp, Homo sapiens
gaagagggtgggccaagggctggggggaataatggcccgagggcagggaagcaggagcccattcatactgagtagggagcaggacccggtgctggtgggcagaggtggggagggaggtattacctggcctggatgtctaactgcatttcatcaagatggcctggcaccgtcaggatgtagggctttccaggggtgatcttcacctcaaagttgggaaggactgacccagggtgaagggataggcaggtcagactccagctcaaagactcccctctgctcagggctgtggcacccatatctccctgccctgagctgctcccagtacctctccttccacccttatttccttcaggaaagcagctgcctgtccctccagtttccagctctcaccatatttcttcacctcaaactgggtgctgctgttggattccaggccatctgagaatcgggctgagatcttccaggtccctggcctgagaatggacaaggaaggggctcagcccatctgtacagtggggcacggagagccagcagcctgcttccctgggaagaggactgtgggggttaaccagaggctcaggaggctgagggtcagggcatctggggacgtgcctctgtgtgggaggtggagagcctaacaggaattggggtggtgtagcttgggggcagcccccacattgggagcgctcactctgagatgtctgggatcacaaagtcatcctggaagatggacgagggcatgtacacctccttcttccgcacgcggaggccgtgagagttctgcaaggggagaagtgctcacaggcaggaggtcacatcagtggccaggatcaggaaggccagaggtcggggactcacctccaccatgactgtgatggtgtcagtgctcgggcgcatcttctgatccagagcaaagacccggtaccgaactgggagtggaggaggagagaggtgagcaggggtccatgtgcaaggggagggtgggtcaaactccacagagggagcaggggacaaatgtttcctaagcaccccttctgtgtggcactttctttcaggttatctcacttagggggcaccaaactcatcctgagagggctcggagggggttaaaggttgaggccctggggctgagactcaccccgctggccagggttgtaaatgggctggtccgtctgcaaaaagaggtgcccccggcgagaggagaagagcaggttgataccctggatgtttgtcgttctggacagagagtcctttagccatggcgaatgggccaccagctggacctcagggcctctgaggagttgatggaggccacagctcttcgcatctttcaagggcacctgtcaggagagggagagggagagggagcgggtcacagagcaagagacagctgaccaaaaaggacagagaccaagggagaaacgtggaaggagaatgccagggtgggaagacaggaggggaggaggccagtgggaagatgatgacacttacaagacagatgggaacagggcaggaggcccccacaagcagcaggagggcatggggtctggttacctggagactgaggagtgcgaagtctctttctgagctaagggtgaagtccacctttggggagcaggggacattattacgagatgggtttctcaggaacactgatcctttcactacctgtcctcggggcacatcctggagctgcacccccaccgatagggggacccccagatgaaccacagaaggagagaacaagagcaacctggggagaacagacaggatcagcagtcagacttcgctctgacacctccacccctgctctccctcactcctgaatcgggtcccgatgccagccctgccccaatccaagcacccagcatcccgcctccaggacctgggcttctgcagagataaggtgaagaagctggatgcccagatcagcccccagagcagcctcatggctggaggatccaagagaggttagatccgtctgtctgtctgctaccttctggccaagctaggcctcggggcagagttgactctggaccttgctcctcccccagcccagctaagctgggaaaccacgtgacagccaagaagtgcaactggcctcaggcccagagttgtgggggcaccccggacacctgggtgtccatgggaaactctgaatcttggcccagaaataaccctgtccttccccgttaactcctctcattccagtgcctgagcacctccccctaccaggtatatctgtatcagggtataggtgcacacaagctcatgtatacctgggcgtacaagggcccaacatggcccacgagtacaggatatttaaaggccctcacaaaacaatgacaggcttctaagacacttgtctcttactttcattccaacacaaattgaactatactaggcttttgcttttttaggccctaacagaaattccgtggtttaggagattaggtacaccctcaccactccacagggagaatggcctgaacgtcagagtgaacccctgacccctttcctctctgaatgaggcaaagctcagacttcacctctacccctaaacaaggcacccaaacacacgtcacagtaaataaaggacatccagaaaatatcacaggcagaggtactttatttggcaattttaacatgacacgtagagaaaagaaccctgccctccttcaccagcctccccagaaatcccaccttcctatttcaagacagagtaataacagcaccattttacacgaaagggaacagccacagccttggcaccatttctggttccactttccatggaagggcagagaagcattgctcaaaccccaccactgggtcagaaaccaggcaaacagcagcagtcacatctgaccttttgcacacacgagagcccgacactcatcctggctcccaagccttcccaaggtgaccctgtctcagccaccatcatgcagctcttctagtcccctcccggcccactctgaggagctgagcaatgatgagcagaatcttcatgtctctggcaggcggaggagggttcctgaagtggtagagatgctgtgcaggagaaagacaaggctggagccagacgcctaggctcaagctgtgaggagaacttagaacttgggaaggggtgctcccgggttccagagaagaatgagagccactggccttcactaggaaactaagcatgagctgggaggaaatcccactttgggtcattgctccataatctgccagaggccagggaaagactcaccagtccactagctgggccccaatgaggtcgtgcacatggtaggtgaggccaagccgcaccacgacaggcgcccgccggcccaggagctctgataggagcagttcccggtactttgccttccggaccatgctaaggacagcctggcgccctagaggagaagtggcacaggaaaggggaaaggtgaataaggcctagaggcctgaggagccaccaaaaggtgaggggctgcaggcttgagctgcagatgggatacctttaacaaagtacttgatgaatctcccagctccaggcacagctagccaccagctcccagcatctcggacggtgaggactccagcattcaccagatgcctgagggcagtgggaagccagcagagatgagggctgggctctgagaaccatctctcctcctcatccattaatgtttacacaagtctccagaaacacgggcaaccatgcaagagagactggataacaaaatcccagcctggggtggttctgtgctcgcaccaactgcctctgttggtgcagttgcttgttccaggccccctacctggactgccctccctccactttttcttttcctgctactattactggttcagttaaatagcttctcttccctgaccacatgtcctgacacacattcggtcttaggaccgaggagaggaatcagagtcttctgcgctcctgccactgcctaggcagactgcgccatggctcccaccacatctctctgagagtg

SEQ ID NO: 584884 - DNA, 4001 bp, Homo sapiens; identical to SEQ ID NO: 584883

SEQ ID NO: 584885 - DNA, 4001 bp, Homo sapiens
gaagagggtgggccaagggctggggggaataatggcccgagggcagggaagcaggagcccattcatactgagtagggagcaggacccggtgctggtgggcagaggtggggagggaggtattacctggcctggatgtctaactgcatttcatcaagatggcctggcaccgtcaggatgtagggctttccaggggtgatcttcacctcaaagttgggaaggactgacccagggtgaagggataggcaggtcagactccagctcaaagactcccctctgctcagggctgtggcacccatatctccctgccctgagctgctcccagtacctctccttccacccttatttccttcaggaaagcagctgcctgtccctccagtttccagctctcaccatatttcttcacctcaaactgggtgctgctgttggattccaggccatctgagaatcgggctgagatcttccaggtccctggcctgagaatggacaaggaaggggctcagcccatctgtacagtggggcacggagagccagcagcctgcttccctgggaagaggactgtgggggttaaccagaggctcaggaggctgagggtcagggcatctggggacgtgcctctgtgtgggaggtggagagcctaacaggaattggggtggtgtagcttgggggcagcccccacattgggagcgctcactctgagatgtctgggatcacaaagtcatcctggaagatggacgagggcatgtacacctccttcttccgcacgcggaggccgtgagagttctgcaaggggagaagtgctcacaggcaggaggtcacatcagtggccaggatcaggaaggccagaggtcggggactcacctccaccatgactgtgatggtgtcagtgctcgggcgcatcttctgatccagagcaaagacccggtaccgaactgggagtggaggaggagagaggtgagcaggggtccatgtgcaaggggagggtgggtcaaactccacagagggagcaggggacaaatgtttcctaagcaccccttctgtgtggcactttctttcaggttatctcacttagggggcaccaaactcatcctgagagggctcggagggggttaaaggttgaggccctggggctgagactcaccccgctggccagggttgtaaatgggctggtccgtctgcaaaaagaggtgcccccggcgagaggagaagagcaggttgataccctggatgtttgtcgttctggacagagagtcctttagccatggcgaatgggccaccagctggacctcagggcctctgaggagttgatggaggccacagctcttcgcatctttcaagggcacctgtcaggagagggagagggagagggagcgggtcacagagcaagagacagctgaccaaaaaggacagagaccaagggagaaacgtggaaggagaatgccagggtgggaagacaggaggggaggaggccagtgggaagatgatgacacttacaagacagatgggaacagggcaggaggcccccacaagcagcaggagggcatggggtctggttacctggagactgaggagtgcgaagtctctttctgagctaagggtgaagtccacctttggggagcaggggacattattacgagatgggtttctcaggaacactgatcctttcactacctgtcctcggggcacatcctggagctgcacccccaccgatagggggacccccagatgaaccacagaaggagagaacaagagcaacctggggagaacagacaggatcagcagtcagacttcgctctgacacctccacccctgctctccctcactcctgaatcgggtcccgatgccagccctgccccaatccaagcacccagcatcccgcctccaggacctgggcttctgcagagataaggtgaagaagctggatgcccagatcagcccccagagcagcctcatggctggaggatccaagagaggttagatccgtctgtctgtctgctaccttctggccaagctaggcctcggggcagagttgactctggaccttgctcctcccccagcccagctaagctgggaaaccacgtgacagccaagaagtgcaactggcctcaggcccagagttgtgggggcaccccggacacctgggtgtccatgggaaactctgaatcttggcccagaaataaccctgtccttccccgttaactcctctcattccagtgcctgagcacctccccctaccaggtatatctgtatcagggtataggtgcacacaagctcatgtatacctgggcgtacaagggcccaacatggcccacgagtacaggatatttaaaggccctcacaaaacaatgacaggcttctaagacacttgtctcttactttcattccaacacaaattgaactatactaggcttttgcttttttaggccctaacagaaattccgtggtttaggagattaggtacaccctcaccactccacagggagaatggcctgaacgtcagagtgaacccctgacccctttcctctctgaatgaggcaaagctcagacttcacctctacccctaaacaaggcacccaaacacacgtcacagtaaataaaggacatccagaaaatatcacaggcagaggtactttatttggcaattttaacatgacacgtagagaaaagaaccctgccctccttcaccagcctccccagaaatcccaccttcctatttcaagacagagtaataacagcaccattttacacgaaagggaacagccacagccttggcaccatttctggttccactttccatggaagggcagagaagcattgctcaaaccccaccactgggtcagaaaccaggcaaacagcagcagtcacatctgaccttttgcacacacgagagcccgacactcatcctggctcccaagccttcccaaggtgaccctgtctcagccaccatcatgcagctcttctagtcccctcccggcccactctgaggagctgagcaatgatgagcagaatcttcatgtctctggcaggcggaggagggttcctgaagtggtagagatgctgtgcaggagaaagacaaggctggagccagacgcctaggctcaagctgtgaggagaacttagaacttgggaaggggtgctcccgggttccagagaagaatgagagccactggccttcactaggaaactaagcatgagctgggaggaaatcccactttgggtcattgctccataatctgccagaggccagggaaagactcaccagtccactagctgggccccaatgaggtcgtgcacatggtaggtgaggccaagccgcaccacgacaggcacccgccggcccaggagctctgataggagcagctcccggtactttgccttccggaccatgccaaggacagcctggcgccctagaggagaagtggcacaggaaaggggaaaggtgaataaggcctagaggcctgaggagccaccaaaaggtgaggggctgcaggcttgagctgcagatgggatacctttaacaaagtacttgtgcatttggtctgaagacaaagatgactgcaggagtgggcaggccggagtggggtgacctggcctgtgcccaggaaggaggaggagtctgcagccctgtgggcttcaacatccatcaaggagtccagagcaggagccaggccaggcgggagggaaaggccctgggaggggctctctaatctcccagccccgactctgccccgtcactgccgctgctcctcattactcgctggggctgctgtcgcctccccgaagggtggccttgtccagatagtggcaaacctccctgccgtggatgagtcaggagcattttcttaagaggaacatcactggaaaacaaaatgagcggggacacagaaaccaacagcagtggctgcatttgtggtacaggctcctcttccagagctcgctgatgcccacctcagacaggcctgaccacggcacggctggtgggatttgccagtcacctcaaccag

SEQ ID NO: 584886 - DNA, 4001 bp, Homo sapiens; identical to SEQ ID NO: 584883

SEQ ID NO: 584887 - DNA, 4001 bp, Homo sapiens; identical to SEQ ID NO: 584885

SEQ ID NO: 584888 - DNA, 4001 bp, Homo sapiens
agctgtacatggggagcaggtgatggcgcagccggtccaccctggggagcaggggaggggactcagctaggaggtccccccaaccctcatcaaacacctggctgcctcgtctcctccctttcccaggcaggggcaattccagtgggtgccttttgggacacactatacctccaagaatacaaccctgattctacaaaggggctttccccagtgagtaacctgaggctggggcagggaaaacaaatttcaggcttgtatcaggatggctgagggacatcttacagaaaagtcagagcctatgagcaggaatttcagaacgggtgtggggttagggcgggtgggggacagggacactcaccgctttttcttctgtacatacattacctgcaacagagacacagcactgtgggggctgctgagcccaggaaggcccacaggcagagagaggcccacctccacacccttcactcccttaacaggacagtggggactctgtgcagactggaccaggcccacccagcccctgccttagcaaagctgtgggtgtctgtgtgtatatgagggctccttaccacagccaccaccaccccgaccagggtgatgaggaagaagggccccaacacatagcccaccatggagtcgctgttggcctggggggcattgggcacagtggtgttactcatgacatcagcagccggagggctgggtggtcagcatgggcagtggcgcttcgggagggcgcctccactgggctccctgggaaggaggaagggaggttatcagttgcacccaggtgacatccagactctggatccctcccccagagctgaagatctatgaaaactggtcccaggtcaaatcctgggaggagggatcctccaggtagatgtactgggtgtgaccctccagtgagtcttggcaaatcctggcaggaaaggggatcaagggaaggcctggatccagggctgagtcttgcccaactcctatccctaaatcagggtggggcccagctcagatgctggccaaacatttacaagtctcagcttctggggaaagattaagtgcaggtttcaggtgcctgccccagcccttttggggcattgggctgccagcacctgtccagtggagcaaaatggataaatgaggtctaaaggaaggacctgcactgcagccaggggtgagatgggagcatctgaaggagcccgcttccatcctggtccaatcccacttcaagcgatgggctccatgcctgagttctatgcccttgtccctggtgtcacctcagacatacagcccaaacaccctctcccccatctgtctcgtgtgccagggtggacacgagtgggtaaagctggattgtatcttcaagatgatgtcaccttcctcttgtctccacccggggctccgcccaggtccctcccctcctggcctgagctgacaggcagaggtggagagggtcagtccccatcgacagaagcaaagagatcgtcctggggcagtttgcacgctgatggcccaaggtccgcgacccaggttcgcttgagtctctatcagagggcaaggtatgagcgacctacccccgtgtccgtagggcacggggcatcgagcttgcccttacccagtcgtatgctcatcgtcccaggtcaagggggcatgccagggtggggagggcgtcaggccgctgctaggatgcgggccagcaacagcggacaggaggtggttcccacggcgctgggaggctcaggccggaggtgggggtgttgggggatgcggatgggccgccccgcgcccgaacatcctggaagcccgtcacccgaggcgtggacccgtgccggcgctctgcagcccagccggcctggccatgccttacctcccgccgctgcagccccgacaggaacgccctcggttggctcccgggccccggaaaagccgtcaggcgcgtgatcaaaggacccggggaaatgggccgggcctcagcacccggacgcagccaatccggtagcggaaagccggtggcctggagatttctggagccgccaatccggaggcgggggtgggcggtgcgaaggcggggacagcggggcttgcagggtccgcccggcggcggcagggggcagccgagggctgcgcagtgggggaggagaacgcgacgcggggccggacggggtagggcggggcgcgcgcagttttccggcggcccctggcccgcccgcgtctggagctccgattctgggaggtccccggcgcccacttcattcacccctctcgttgcagccagaatagggtcgcgccacgctctaacgttgagcccaggcccttcgcggcaagaccctgctccgggcccactcggcctccgtctgtgtttgttccctggccttcgggctgtgctcggctggtagagtacggcaggtctgggctaccgagggccctggcacgcccaccctctctgcgcctgtcttaacgtctgtaaaacaagctgtgtgaggattattattattactttttttttgagatggagtctgtctctgtcgtccaggctggagtgcagtggcacgatctcagctcactgcaatctctgcctccctggttcaagctattctcttgcctcagcctcccgagtagctgggactacaggtgtgcaccaccatgcctggctaatttttgtatttttagtagagagggggtttcaacatgttcgccaggatggtctcttaacacctgacctcaggtgatccacctgtctcagcctcctaaagtgctgggattagaggcgtgagccactgggcctggccggattttactttcttttctcctaagagagaacacccttgtgagctaggcagggcaagtggagcaatcgcaatttgcagatgagttaattgatgctcaagcaatgagatgacttctcagggcccttggcctgatcattaagggcagggtgggatgagatgacaggtgggcctctcttcttggacagctctctgctgacagcggccccagagctacatttgaggcctggtgtcttgctgtgttcaggcttcatatctgatgagagtacctccaagtatagccgggaaaactgcagctctgccttccctcttcatgcagctaccgtttcaggaagcgggaggctagggtggggttgaggctacattgtgctaccatgctcgagttttgactgcctcctgatccatgctgctgtggttagtgcctggacttgtctgcccacttcagctaatgcctcactcatcctcgtgtcctccagctctggatccactgaacaaaccataaaagcaagacctgaaaggattgaactattttcagttaacttttagaatgaagctcaagaagatttataggaaggcaaaaatatccagtttttataatatctgacatccactaaaaaatggaacctggtggccaggtgcggtggctcatgcctgtaatcctagcactttgggaggccgaggtggtggatcacctgatgtcaggagttcgagaccagcctggccaaagaggtgaaaccccatctctactaaaaatacaaaaattagctgggcgtggtggcaggagcttgtaattccagctactcaggagactgaggcaggagaatcacttgaacccaggaggcagaggttgcagtgagccgagatcatgccattgcactccagtctggtgacaagagtgaaactctgtctcaaaaattaaaaaaaaaggaccctggctgggtgctgtggctcacacttgtaatcccagcacttaagacaaggaatgtatgaaaatatcccagtgatcttctagagatgaaaactacaatatcagattaaaaaaatcatactggacaggattaatcacactggacaggattaatggcaggttagatattacagaagaaaagacaagtgaacttgagggcatagcaatagaaactacccaaaataaaacccaaagataaaaaaatccaaaaaaaaaaaaaaagaaaaatgaaaaaaggatcagtg

SEQ ID NO: 584889 - DNA, 4001 bp, Homo sapiens
tgcccatcttgttaacaaaatagccaggatggcaagtcccagtagagtcaggatgacagccaaagttatttctgaaaacaaaaactcacctgtaaacatgcttatttagaccaggaaattaccagaaacaacttctgatcacctcttactatccaccagatagactttttttctttcccctttctgctacttcaactcctttattcttttatttgccgcatattactgtcctcacattcccgcccctgcccatttttagctcttacattggttctttggtcgtatactaagaacctcagatgctgtgtacccttggtttagagttggaaatctgacagatttcctcctcagttgaaccctttactccccaggcaggaagaatgttaaagggaatcagtggtctacgaagctatccactggggtatggggaaaatattagaacttctattttctgtgtaattttaactcatacctttaaagttgcaagattttctgtatatatatatatatatatatatatatatatatatatggctataaataagatttataaatatacttttataggcaatgcatactcaaaacatttttatgagtgagtgatcaaaaaactttcagcaccttgactgaagggtgctgactgaaggtggttttattaatgaaagccacagcaaaggacagaaatttcttgtcacagaaaaacctttcagccatcacttgccaacctcctgatgataagatggatatttgcgaggtttgttattgtggttagtaggataaaatatgctgggattgcttaacttgtgtttgtttatgtgtcattgatctgcattcaattgatgtaagatagagtcttgcagtcataggagagaaaaatcttagacaatatcatatggttataaagggcagtggctatgaaggatcgggggagaaaaaaaagaaaagagagagagagagaaaggaaagaagaaaaaaacaaccataaaactgcctgtgaaagtaaaaactctgaagaatattgagctctgaaagactaggaaagtagattacacccacattaagactacttcaaacgaacaataggtgaatccatctcaagatataataacacacctccaaccagggcagattaggcatttgtctactgagtcttctaggtgtttggtcctgtgagaaaattctcctgccaaatcaacttttggagattttctactaatgtacctctaaaatgaacagcaagtagtcaatatgccctctattatgtgaattttttttttctagtgttaaataactcatcggggaggaaaggataactagatggtgtactcagtactactgtatattccttttcttcctttagtgtctgaaatgccctgtctatagggcagttagaagatggtccaccctattaatagggaaaatgagaggaaatcattatttctgagttgaggcagattatatagagtgaccatgctacaggaagtgagataatgggctaaggaatttttcctagtgctacggaggatggttattttctttgttcagtttaaactctagaaaccaaaggagaaaccagcactatcagcctagagcttagttaactgtgggttgtttcccccaggcttccagaggaatcaataagagtgaaagaaaaaatactgaatttgaaaaggaagcaggcaaggaagataaagcagttgtgttaaagtccctaagtccctaagaggagactcctgaactactagagttgaggaagcctcaaagagggagttagtccatacccaagactgtcattttccatgtattgtcttcatcaggtctcgcatcatctggatttctttgtcagagagagatcaaggtaaaacgaaaaactcaagttcactgtttctgagcaatatgaacttgggtgtcagggaggcccttgtaggcagagatgcagaggatcactgagaaattgtgtggagcagattgatcagacctaagcaaatgatgggagtgtggcctgtgaaggttctagaatctgtgtcataacagagacttagaacattagtgaggcaggagaaaaggcagaggatcaaaaggctaggaagatttaataatgctttggaggaccttgaacttgtataggatactggaagggaactcactctttctgggctttagaattatttctagtttttcagagatttttaaggccagagattgtacatcattaatctttgtaactcttttttttaattttttttgaagatagagtttcactcttgttgcccaggctggagagcagtggcaccatttcggctcactgcaacctccacttcctgggtttaagcaattctcctgcctcagcctcccaagtagctgggattacaggcatgcgccaccacacccagctaattttgtatttttagtagagatggggtttctccatgtcggtcaggctggtgtcaaactccctacctcaggtgatccacccgccttggcctcccagagtgctgggattacaggcgtgagccaccgtgcccagcctaatgtttgtaactcttgaggcagagaaccttccacagaataagcattttataaatgtttgataattaaaaatgagaaaaatgactatatttaaaaagaggcagactggataaagaaaatgtggtaaatatacaccgtggaatactacacaaccataaaaaataatgagatgatgtcctttgcagcaacatggatggaggtggagaccactattctaagcaaactaaagcaggaacagaaaaccaaataccatatgttctcacttataagtgggagctaaacaacaagaacacatggacactaagaggggaacaacagacactggggcctacttaagggtggaggctaggaggagggagacagcatatctcttgggttttatgcttattacccaggtgactaaagaatctgtacaccaaacccccacaacacacagtttacccatataacaaacaattacatacatgtacccttaaaactaaaagttaaaaaaagaagagccttgaaacaaatgaaggtgaacaaaggaagtcaagttgttggagttagatagcaagaagaaatccagtccagaggtctatggtgctaggaagagtgagccagtaaatgggatctcataagccactgtggagaacaaggaagagtaataacaccttttattgagtgtctattgactacaaagttctatagtgggtaccttataagcacaaacttgtttaatccctaataaactgtacgatgaaattctttgagatggagagagacactagaagttacccagccaacaaatggcagagtttctgactccaaagcccacactgtattcacaaagccacattttgtttcagtcttctatgcatcctgtggtggtgatttctaagttaagaagtcagtcacttgaagaggaaggtgatgacttctagttttaggatgctccacctgccaaaaataatctcaaaattgttgagattatttttccataagtgttttatgcatacttatggaacaccatcaaacatacaaatatatgaattatggaagtaccaaaagaagaaaaagaggaaggggcagtaagcttaatcaatggaatattatctgaaaattttccaaatcttgagagggatatgaacatccggattgaagacgatcaaagcatcccaagcaagttcaattcaaaaaagacatactccaagatatattataatcaaattgtcaaaggtcaaacacaaagagagaattctgaaagaaacatcatgtgtaagagatctcccataagtccattaccagacttctcaacggaaaccttgcaagtcagtatttttaacctgcagaattgctatttatttctataatttctccttctgatattctcaaattgctgagacatcattcttatactttattttttagacatgtcttattctgctaattacaatgtctgggcttcttcagaaacagtttctttttattat

SEQ ID NO: 584890 - DNA, 4001 bp, Homo sapiens
cagcctgaccaatatggtgaaaccccacctctactaaaaatacaaaaaaaattagccgggcgaggtggtgtgcacctgtagtcccagctgctggggaggttgagacaggagaattgcttgaacctgggaggcagaggttgcagtgaaccgaggttgcgtcactgcactccagcctgagcgacagagcgagactccgtctcaaaaaaaaaaaaaaaaaaaaatttacacattacctttggtgcagccacggctacaacactcctactaatagatgagcatcatccagggtagaactaggtaggagtgggataaaaagtaggcttacagcctcttttccagcgttgcttgaggcattcagtggataaggaataaaagagaggttggttgtgcaagtgatgccaagagaaacaagattccacatgtcaggagactgaatgcccaacagagcaaagggcactgaaccttttgccttttgcccaaagaaatattagttgcttcacctgaaatcctttcaaagaaagtctaatcgtctccactgcaactctgcctctgagtgaatccaacaacctctattcagagtacaaggggaagcgttgcttaacaacgacagcaagtgctacttccaaagccaagaaacactcctttacgtcgggtagtcttctgtcccaattcagccttctacaaggtgaagccaaaaatacttggctcccagcctaagttctccattttcccaaacatctgtcaacttagctttctttcagataagcccctctccattcccagcattctggtgaccccagatgaaccctctgccaggagtcctgtcccttcagaaagttccttcccccaagatcatctcatttcccccacttttcctaaggtggttcccaggccctgtcccaagtctaacactccgggtcctccatgtgtcgatttactagtagatcctactcctccctggcataactctcaagaaagtcatctccctcaccatacccccttgtcttcccccataatatcacccccttttccctatctatcctcagatggaaagagacagacacataaattaatctgttctcagctcctaactcccaagctctccagtgctcaggttgttccacagcacctaatccttccctatagtttccgcccaatcctggcatcctcagcccctcactccaaaccccaacctttttccccactccccaaatccagatctcctgtgctttttactctcagccaacaccataacccttttcctcccaagtctacccactatgcctggatgcccaagtcttttcccctcatcccacgtcccttggcccctaatcctcgaaaaaccttaggagctcgcccccaccatctcccttccgcccctcctgcctccgtggtccctaactctcctttagccctgctcagcccccaaatactccctatgcccacggggctccccgactcgtcctccccgtcccgggaaggggtggccctcagtacccgcctggctcgccctgccgccaagctcaagtgtcccttcccttcccctcggggcccccgaggccgctgccagcgctggcactgcggggccggctcaccagttggtcatgtccaggaagaaggcgcaaccggcaggattgagctggaagccgagcagcctctggaactcggagatgagcacgtccttgtcggtggtgcccaggcagctgaacttctgcatcagctccgggtccaggtctacgtccatgccctccatggcggggaccggacacccgcttccccgcctcttcacaaccaagccgccgccgcgccgccgggcccggggacctggaggggggccgctgctagctagcttcgcgaccccgctcctttgaggtaggccccgggcctctcacagtctcataggggtaaactcactctgccactcactcactctcccccccctcccaccccccccagctccgccgcctccgccgcctctcgcctctcgccactccgccgcctccgcctcctcccgcgccgcgcccactgcgcaagcgtcgcccgcccaggccccgccccttcctctcccggacgcccgcctcttagtgtcgtcacaaactcgtgacgtccccgcgtgacctcaccgctgcggggcgatggagcgaaaagtaggaaggaggaaagagatggtccagccgtggggggcgggggaggcttctggccagaccattactccgccccgtccccaccctcaaggagagccgttaaagcctggggctgcgggagaagttgagggattttcgtttataacaactctaccattttgcaggtgaggaaactgaagtcccgggagagacagtggcaaggtcaagtagcaaagtgcactcagccctcccagcaaggagtctgccactcgcgcttgaaggacgtgtttgaagagctgctttcccagtgggatgctgccttaaagtcttgattccctggcactctttcctattactacattttatcggtgctgtttgtgttatgcaacggtagcatcgtgtctccggaagataaaaaaggtctcgatacaaacatccataaccttccacccactccgtcaggaacaacccaatcaaaataaagtcatgagaatttagcatgccttgttctgtgtttaaaatagaagacaaagtatttctgtatatatcgtacaccttcccggtcaaggtctgtcaaagaatgagaaaggaagcatagagactatcttgtctaccctcttctgttaggaaatgtttttgaaatatcgcgaattgcccagcactgctagatccaaggcggggaggggtggggggggatgagtgagaaatggtcttctgccttcaagtagccccctattttgcaaataagggaagtaagcttacgtgcgttgtccaaaaaatacagagccccaaaactagaacccaggtttctggttccttatgaagtgtgttttccacaatttcaataacagctggaataagtagtaatgtgtcgggggccaggatgttttggaaagggaacgcattctacctcctctgtcccactaccaagagagtaaactacagtggcttaaaaagcctaggttctggagtcatgcacatttgggactgagaggtgaacatgttttgtcccaatcttttggataatgcaatagagacagaaagattataaaaatctcaatgtaataactgaaaggaactgagactgtcgagtccaacctccccattctacagatgaagacattgaaatggagagagcggaaatgactcactcaagattacacagctggaaagtgggttccaaactcccagtttagcactccattcactataccctgctacattccctttctacattaagttcaattggggccttacacaaaaattaaaaatttgacccaagaactaatttgatgttaggaccatagacttctagaaagtgttttaacttgcagtatccatggatgaaaattgtgttgaccaaggatccaaaaaaagatattattggaacctggtgactccatcagaatgctgattcagggaaaaattcaaaactctctgtcaatcccgtacagtactaaggtcttagcccacacctaaacgctctacataattcaatttttttttttttgagacaagatcttgttctgttgcccatgctggagtgcaatggtaggatcacggctcactgcagccttgaactcctgggatcaagcaatcctcccacctcagccccccaggaaggcggaactgcaggtgggcgccaccatgcccggctaatgttttttttttcaactttctttagagacagggtctcactgtgttgcccgggctgatctcaaacttctgggcttgagagatactcctgccttagcctcccaaagtgttgggattacaggcatgagccactatgccctaacatttttatgtaataaataaaaagctattaaggtcaatgaggaggtgggaggatagcttgagcccaggaattcgagacca

SEQ ID NO: 584891 - DNA, 4001 bp, Homo sapiens
atggaaattctccttggtctcattctagaacattcatattccctctgcgtttctgccctctgccttctctgctcctaccctaaagtcagtgcacatcctaagaaatgtacttctggaaagacttccaagaacagagcagcaggcccagacccacaggctctctgctggaggagagcgggagcctcaggacaggcctggccagtgggggtctgtcctcgagtcctgggctcccctcacagaactcgttgcagaactcacaaagagcgtccatcactcccctgtgtccatcctaccagccggagaatcttttcagactccactgagattgcaatctggcctttcctgaacccacggataaacatctgttgccccacgctgcactgtgtgcttcaggggtgggatgaatgtgagcccccaggaacctggaaatcccacagggagtgagatgcagacccagggccacaggggacctgagcccaagggagaagcacatgcctcacatggactctgtctcagggtgaaatgtggaagcagaatgatgggacccagagctggccaccctgacgccagaggtcagggaaaggggactttaccagctgaattcaggtgatgggccttaaaataaagtgattagtctggatggtcagggctctaatctaatcacgtgagcccctaaaagcagagaagtttctctggcaagagtcagaagggagaggtggaagaaagggggtcagggaagttgcaaggaaaggaagcttccagactcgctggatcccaggtggaagccacaggccagacaggaggcgacttcctagggccagggcccctgctgacaacccacaattcccccaccacaagcgacagggtcatgccaacaagtccactgggcctggaaggggttcttccccagatcccctagaaagcagcaaaactgaccttaccctcgagtccagcctggtgacagcctgaagctctttgtatacaaagaagagaaaagacaactccccaaggactgaaagacccctttttaaaatgactcccactgtctattccacagccggtgtgcggcatgctgattcaatccccacaacagcccaggaggtaggcgccgtcccatcctcctttacaggaggggaaactgaggttcaggtggtcagatggtcagctgcctccaagaccacgctctcaacctgcccactcacctgtacatgaagagcactaaatgcattctgatatcacacaataaaatttcttttaaatcattttcttgttgagactgctttgctcagtctaacaagttttctctctgcccaaatttcgtctgaatcagtcggtagtcctgtttcagtcccagcacatggcgggtggtgggaaaaagcgaaggcttcgaagtcaaaagacctgggcttacctccccacagactcccatgcgtaaaatcacattaatagcaccagccttcagggtcacagagacaaaataaaggacttctgacttgatgaatgtggacgcgctgagctttgtggtcatttataggagcgcggaaaggcagcatgccagggaatgctctgaagtgcggctttttaaaatcaccctctgaacagcctgcaacctgccgcttcgtccctcctcctcctcctcctcttcaggcttccggagactccaacacacggcgcgtccgtccgcgcaggtccacactcgctggctcccacgcccacatggcgcgcaccccccacctctgtgctttgcgcgctggtttcagattctctgaggaggcagcacaaccccaatccagtcctcagccctagtgaccctggagccggcgtgcagccaccagaaaaagattttcacatttcaaatcagtcttcagaagcccatccctccacaattgaacatcaagcaaatctcacaagccagcaagagccgctccaggccacttacattcaggctcccgctcctccgccatcgcttccttccctccagctgcctgggctgggctgtcgccgtggaaaccacaaacattctaagccctccttggcttccttcactgctgagcaaccaggcacagcccctgctgcggaacctccccccaactcctcccctcttctgtgccttctggaacagagagtattggtgattgcttgcttgttttactttttttttttttggttaataatttttttaattttaatacagccggtgctctttgtctgggttccacatccacagattcaacgaagcacagatttaaaatatttggaaaaaagttttaaattaaaaataacaatacagcaataaaaatacaaataaaactatagtataacaattacttagatagcgtttacgttgtcttaagtattacaagtaatctagagatgatgtaaggcatatggaaggatgcgtataggttatatggaaatactgcatcattttatataagggactacagtatctttgggtctgagcatccgtggtggtcctggaaccagtcccatcccccatacaatactgtaaataaaacatttgtttttaaaggtacatcagctttatgaaataagtgaaacactttccgtgatctgaaaaatatcaaagtatcctcgcattccctaatcctttccaaagcccagggggcaaaagataactggtcttcaggcatctgctatagaaatgtgcaggttggacagtgcgtaacccacccaactgcacctggaggtccagcacagagtaggtgccagtcacgaagtgatcatttagtcactttttattattatctatgtattttctaatggggaactgagatcctgtggggtaatttgcccaaggtcagttagcagacagtggaatttacagatgtgtaagtgcgcacctgtatgactgcaaagtccatcctctctcctcaggcgatcccatgtgccaagggagggaaaagctaaaacctctatctttgaaaactgtaattctgtttatatgtcttgcagccagaaagagagtactggaagggcgattctgctggttcttagaagtaactttgacgccaacccttactacttacagctctgaaatgagaaagacggtgatgtaggcgttactggttgtgaggatggaattacacggtactgtgaatgaggggggcacacagtgttttttgtttctttgtttctgttgatgctgcctgttagttcaaactgcaccattttgtaatcccagccccatttcgcagaccctggtcaaagtgaaatattccacgggggtcggaccacgagaaatgtcctgcccaaccacctgactttcttgttatcccctgcccggcaaagccccagctgaaggaacatcctcatcatatcctctgctgggcaaagatccaaggaacattctatcacatgccccccaaaacaggaacattctatcacatccccccaaaaacagggccaaaccaccttgtcatggaacatcttatcaacatcttctgggaagcaggctataccccctagtcccctcccgcccaggcctataattgccccagcctataagcggcggtcagcactggcattaacctggtcccccatctctgcaggtcttaggctggacatagaacccgaatcgctggagagctgccagttatctctctttaacccttgccttcccttccaaacataacactggacagatacttgaaacgtgaacattctggaaaccaagaagctgccaggaccttcacctgctcaggtggcttcatcaccaggtgcattggaattccacctgtgaaaaggttaccggagtgtttactgcttgtctctctggaacgtgcatggtagttaggcatcttaactatgacagaaaggtcgacatgaagatgcccaagctgcgtaaggatgtctaggtatgggcaccagagaggaaatgctgtgtgcccctcgcctgcagttcgttataaagtaggctcacatgggcagcggagaggaaacactgtgtgcccctcacctgcagctcattatgaagtagg

SEQ ID NO: 584892 - DNA, 4001 bp, Homo sapiens
agagtttagatgggcttaaaattcagtcctgtaaagataatttttcattctatattaacaatttttttcctaggtcgctggatttgtgactgttgtcagcgggcccccccaacacccaggaaagtgggcagaagggggaaaaacagcaaagagggataaaatagtttttgactctaatactgtatatgcatttaagtggaatatttggtgccatttacaacattattttcatgccaataaaagattttttttgcaaattatgagcttaaaatctgcagttatttctgttaaaagctacgcttactctcgaaactaactccaggtagagaattcatcttccaaagtattttatagtaaccttggctcactccaaaaattcagtggaaatgtttagtaacttaagatacttaactgtttctccatagccccaaaagttaattttcatgaaacttcctaatctacattgtttccggcctaccataggtagcactgacaaagttatttaataactgaagaattttcataggtatgacaaatggcccactaagatttggtgcagctggatttagagttgtcattattggactggtacaggaacaaactttgtaaatacctgcctgccaggaaatcctttttgtatagaaaagtaccatcacctacttggggtacaggcatgaggctttagtccaggctcagggaagtgtacgtaaatcatttccaacttgattttagtaactcttgaaaacttacaccaacttcggttagaatctccagagtaaaattacaaagttatcaaccttttgatttgtgtcacagcatgaaaggttgctctattttatataaacctgttactgcaatcatttttagtcaacctgcctaatgaaaatggagtctaaacactttgtgcacagtccttttataggaattatgatctttaaaatactgtgcttgctgcttttcctatttttggggtaactgaggtaacaaaactgcgtatggctttatttttccatcccttgactaaaggtacctagaacttcaaccaagtacaagtagcaaggttcacagcaaactgcaatcagcttcacagatggagggttttatatcccagagtgtggtcaacgactcaaaagagaatttcaagtaccagtttcaaaatgctaattaatatcgtccagagaacagattcctcctcttgcgaggcgtcttccggggcaccagcgtgcttctggccggcatctgcgccgtcggcggggtaggcggcctcgccgaacgggtgctgctcgaccgtgccgtcgtagtacaccttcatctcgaactcgctctccaggtgggaggggtgtccatagacgccgatgcccactgggcgccggaagtgcgcggggatggacacggcgtccgggccgcaggtggccgattgcagctcgtagtcgtcgaagctggggtgcaggctgctggcggagacgtacagatccgcatctcccttgaggctgcgcatcctgaggactatcttgccctcgtggttcagccgcaggtagctgtagttcccggcgcctatctggccctggacgacgtgcaggagcacccactcctcggggacctcctcctcgtccgcgcagcttcccggagacaggacctgcgaggctaggagcagcagcagggccgtcgtccagggcgcggccctcccgcggggagcggccatggctggcggctcagctccggggcctgcaagtgggtcagtgctgctggggacaccggaggcgctcagcaccggagcctgtccccgccgtccgcacgcgggtccacggcgcgtccaggcgcctggtctgtcgctgggactgtcccttcccacccgcgtgaggccccggggaggaggggtgggttaacccctcccccgtagcgcggcgcccactcagggcaggggcaggggcaggggcagggccgctgtggcaccctcggactcaccaccactccccgcagggggccgcgctttatacatccggacccgaggccggagcctcgccggaggcggaagtgacgctaggtccgtaagtgagccggccggaagcgaggcttctccagctgtcgcgagatagcgaaaggggcgtgggcgcgaggggcggcgggctagtaaccatagcggctcgcgtgggtcggctggcaagtaaccatagcggcgagcgtggggcggagtgtggctcggtagtcctctgcgtgccctcctgggagctgggtgctgtgagtcctcccctagcgggctggtctcggcgcggagtcggcgccgaacccgagctgctgctctggggcgtgtgcctagggcgcagggctggagcgcgggggctgcgcggttgctcgcggctccgctgaggtctctaggaaagggggcgatttgagggttccgccgtgaccgcttccaacggcggacacgcgcgctctggaccagagccgttgcccgctgtctcgtcacccgaagcctcctcctgacgccgtgctagtgcgagggtctccaggggaattcggggcacaagtcgggccggagcatccgggcggccgcttgagatcggcgctttgagaactgagcgcatgtggagttcggaggaaaagggctcaggtggttattttaattaaagcagctgtgtataaggagcactcagatctctttaaaagattcagtagtttaggaacgaaccagggctgtagaaatgcccggcctcctgcacctcccgtcggttctgagctccgagggcgggagcgtggaccctgagggctcgttaattatgccccactggcctttcaacctgcgtggtaactaccaggctaggttttcctaactcgagccaaacagcaagtttctgacttgattatcactaaaagagaaaaatttcgatcttttctaatcagaagggagtaattttctctttttaaaaatattcgtatgtacattaaaaaaacggaaatgcacaggattttatcagtggtactcctcgagtagtagagttttcatctttttatgtatttctaaattttctacaatttacacacactgctctgtaccagtaaaggagtattaactctacagcttccagtttatctgggattactatcttgtgtttactgacttaactttaagactatggtatctttagcaatcacttgtcactgccttttcctgaagtgcttacctagtgttaggtgcactagaatctcactaaaataataaatttagtttattttccctgacttgttctgtgcatgtatgtacatggatattcctggggatatcctgtgacattgattatcccctagggttggcacagcagggagaggaggtagggataaaaaactttattatttctgcattgtttaaatgttttgtattgtattgcttttgtaattcaaaaaaatgttaaacaatttatattagtggaggtaggttaagtgctgtagcaattcaccccaatagaacagttgcatgtttcttgctcacacagtcctgtgtagcggtttctagtcagacgattcctttgggcagctctctgcaagctgcagcctaaaattcttccatgttgtggtttttttccttaggccctctgaattctccgcatttagccagtgggtggggaaagaagagaggcagtgcaggaggaatttatgggccaggcactcaacgactacatggctgcacttaattgcaagggaagctagggagtgtagtttagttctgtgtctagaaggaaagggaagtggcttagtggaaaaggaacagcacttaccgtagtctctcttctggtgaccagatctctgctccactcttgatcccacatggagaacacactctccccaccccaagggggacactttgtcaaggtgcctagtgcaacacagaacatttctcaggattgcacagttctctccatcaggcctggctgtggttcctcgtggtccagagccctatggactaagaagacaaactagttgctctccccactaaaatgcagtgg

SEQ ID NO: 584893 - DNA, 4001 bp, Homo sapiens
ttgttttgccaggaatgccctctcctgtcagctcgaatgctagttccactcagaggtcatctctcttctttgcttttatgcttaataatcatttacagcaaaggctcagaaagggctaaatggcatatggttagttctgttcaccccctgatctgatatctttgtgccaggaagaggcgacactttgtccgtcctgctcctatccatggtgccttgtgtcctggctgtggcaacctgcatgctgaactgagtccaacagcaggcaccaaggctatgacatccactgtgggtcccagcacagtggctataaagatcagtgaagataatatggtgagaatgaaggcaggcaagctaaagcagtgatgggtgaccttccttgggcccagaagccccctgcccccccaacctgggcgttccagagccacatgtcatacacaagaaatggatttctgtctccagccgctggcttcccctagttatagagaatacaaattgcaaaacgatgcaatgataagatgacccacagccagagcctggggatgagccaaggcggtgcttttagaggcctgcagagacacaccagtctgattccagggtcagcggcagctggcagtcagggagagggttccttggcctccactgtcccatttctggctcctcggtcttagcccagagacagcccaggtcccaggttgaactggcaggagcctgtggccccaataagtgacttggtgtcacaaacaggctggtaacctggtagcagctgcgcctgttgttttttcctgggcctcacctagccagagccaagtttgtgagcacccagatagcaggcccctctctgccacgtgggcttgggaaacagggagtgcaaagggtgagggaggagttcttagccccttagcccccagttcttcaggaacacttttgcttcagccagaatgggggtgtagcggtgggggtcgggggagatatcgcaaacctccggaagcctttccgctaacagtaacacaagcataggattcgccaagagggggaattaaacacctccgaataaggcctggggtcagaggtgggggcggcaaagttctcccacctccccgtggtggtggggggggtcccctcgttccccacacctctctcaccgcacagcccttcccagacacccctgtgcggtgcctcctcccctgcccggcggctgctctcggccagtccgcaggttccaacgtgtccctcccctccgcgcctccaggagacagcaccgccggccctgccccagcgccctccgtccccgccccagcgccctccgtccccggagtactcaccgaagcccccggtcccctcctccggggcctcctgggtgaagatccagggcggattggtggcgtagagggaggtgctgggggtcgtggtgtgcttcttcccgaagagtttgctgaaggtgccctgcaccgtctgcttctttttcatgctgccgcagcccgcgcgggcgccagggaaggaccttccctccctcgccctgccctgccccggactgaactcagcacggtctccccaggggactctaccaggccatgtcccccgccgtcctccccgcccgcgcaccgggcaacaggtgctgcgggcgccgccgcttgccgggaaatgcgagctacctggccaggtaaaaggcagccgcttggccgggccccgccccgccgccgcccagctccccaggccgcattccttcccgcctccttctacaacaggccattgttggcacggcccggtgggctggggacctcgcccggcccacgcccagcctgggagacgggccaccccctcccccaggttcctccctgcacgcctccttcaccccacttccccctagtccgggaaaggaggcgggtgagtttccagcctctcaaggcgattcgtgaccaggtcagtatgggtacatcggggacagctctagtgtccaacacgagggacatggatggccaaagcgagcacgccacggcatcctatagcccctcaaatatgtggggcgtgaggcttcggggaacatcaggaagtgcctgtaagagaaaagtaagctgggaaaagcaagaaaatgacaaactagtataccaatctgatgacgagggtggaaaaacatcctcattgacagggctccgaagagaatgtgggatgacgaaatcttggcattctgtgtctgtacatcacattgtttttctttttcttttcttttcttttcttttttttttcctttggacggagtctcgctctgttgcccaggctggagtgcagtggcgccatctcggctcaccgaaacctcccggtctcggattcaagcgattctcctgcctcagcctcccgagtagctgggattacaggcacgcaccaccacgcccggctaatttttgtatttttagtagagacaggttttcaccatgttagccaggctggtctggaactcctgacctcgtgatctgccggcttcggcctcccaaagtgctgggattacaggcgtcggccaccgcgcctggcccacattcttttttttctgtgaagttaagtgaatataatttttgaaaacctaaagtgggtagagcccacttagggttgggttcactctccagggagacaaacagtggtactttaaggcacttagggtaacatcctagccaagccaggggtggctatccacgggggaaatttcctccgatgaggagggggagagcctgcgtgaagatgctgagagcagaggtgcaggccaagtgggtggagtttgatgttttctgggcagcagggggcataggctggtgcaagttgccatttctgctgagcttccgggggacagggcccactgccacatttcccctcagtttcccccagatcttacaccaaaggcgttttccctcaacttttcactctgaaacatttcaaaccttcagagaacttacaagaattgtacaatgaccacctgtgtacccttctccctggattcaccaattgttaactcattgctaaattcatccctctctctctctgtctctctctctcccggattcttttccttttcattttgctgaagcttggaagttgtagataccgtggcccatttcttagcctcccccagtacttcagcatcgatgtctaagagtaggaacattctcctacatggccacaatacaactgtcacactcaggagatctaacattgccaggcacggtggctcacgcctgtaatcctagcacgttgggaggccaaggcaggtggatcacttgaggtcaagagtttgagaccagcctggccaacatggtgaaactccgtctctaccaaaaatatttaaaaaatcagctgggcgtggaagtgtgtgcctgtaatcccagctactagggaggctgaggcagaagaatcacttgaacccgggaggcagaggttgcagtgaaccaagatcatgccattgcactccagcctgggcaacaagagtgaaactccgtctcaaaaaaattaaaaaacaggccaggtgcggtggctcacgcctgtaatcccagcactttgggaggccgaggcaggtggatcatgaggtcaggagatcgagaccatcctggctaacacggtgaaaccccgtctctactaaaaatacaaaaaaaaaattagccaggcgtggtggcgggcacctgcagtcccagctactcaggaggctgaggcaggagaatggtgtgaacctgggaggcggagcttgcagtgagccgagatcgtgccactacactccagcctgggcgacagagcaagactccgtctcaaaaaaataaaaaaaaaaaaaataaataataataaaaaaaacaaacaaacaaaaaaagaatttcacaattatcccctcaaatgtcattttagtttttttgttcctttttttttttttttcgagacagagtcttgctctgtcgccgaggctggagtgctgtgatgcaatcttggctcactgccacctccgcctcccgggctctaacgattctcct

SEQ ID NO: 584894 - DNA, 4001 bp, Homo sapiens
acctagcagacattttacttttttttctttttttgagacgaagtctcaccgtcgcccaggctggagtgcattggcgcgaactcgggtcactgcaaccgccgcctcctgggttcaagccattctcctgcctcagcctcccgagtagctgggattacaggcacccttcaccacgcccggctaatttttgtatttttagttacagatggggtttcaccatgttggccaggctgttctcgaactcctgacctcaggtaatccgcccacctcggcctcccaaagtgctgggattacaggcgtgagccaccgtgcccggcccagtgttggaatcttaaagaaatgtggccgggcgcggtggctcacgcctgtaatcccagcactttgggaagccgaggcgggcggatcacgaggtctaggagttcgagaccagcctggccaatatggtgacaccccatctctactaaagatacaaaacaattagccgggtgtggtggcgggagcctgtagtcccagctactcgggaggctgaggaaggagaattgcttgaacccaggagacggagattgcagtgagccgagatggtgccaatgcacttcagcctgggtgacggagcaagactccatttcaaaaaaaaaaaaaaaaagattccaacactgggggcagtttcacctctcttatcgcaagaatcatgtaatacatacttgatgagttaacgaataacaggttttattgtactgtggattaaatgctgtggcctgtacatctccatgattaagtgtgcgaggcaaatgtacagagaaaaaagaatatccagctgaagctaggaatctgaattctatcatgtaactttaggcattctcattccctatgcctccgcttcctacaaatgtcctataaatgagaacaataaagcctcactgggttatgaggcctatatgaaataatgaatgtaaacaaaacgtagcgacctagaaagcagtacataaatggaagctattatcatttcgggcccctctaatgacagacacaacctcaggagacagttaaaggctggccttcactctcctgggtttaccgacgttgaaactgcaaggggaggtcacccaaagttaggcctcacccgagtccctccgctcccaaggaaccccccaggggatcgtctcactgcagggaaggcgggcggaccgctcgggtacctcggtccccgatggtgtcctagaggcgccgtctctgctgggggcgtggccatcttgccagcccgggcgcaggggcccgaaccgggtgcacactggccggccttcctgccaggaccgctctccgagtgcaagacgggcgggctgctgagggcgccccgcgggtctggtctgggccggggaactccgggacggcgccgcagcagggctacgaatctctcggcccctgcccttcaaatcacctctaggcacaggtaaccgcggagagtcgggcgcaacgcagacgcgccccgctgcctggccttgaccccgcctgaccgccctcaaacctgggaggaccgacgtccttgcgcgacaggcccggcagcgcctccctcccgctcccgcgacccctagcctgtccacgcgctgcagggcacaggtgggaaggggcggcgggtgtctctgcgcctgcgcggaacccagcgcgcgctccgccccacgcaccggctttgaggagggtctctccccgccccctctcctccctccctcttctcctccgctcacctggggtcgagcctggtaggcgcgcaggcaagggccgagacgccgggccgcaccccggctgggctggtacatgatcttccgggagtggagaaggagcctcctgagtccgacctccggcctcctcacaggggtgagcgcgccccagagccggcttcgtgaaggggaaaggaggccggggcgggggggtagggggggaaggggctgagggagggaaacggagatgtcccgcgcttgcgcactgcaggctcgagggaagcggctgaagcgctctgtcggctgtaagcgcgcctgcgcccgcgggctcggagactgcctgagtgcgcttgcgcaagttacagcctcccccgcccccccaagcgctgtattcacagctgaggcctttgagcaaaaagctgagcaaaaacagggctgaaggctgaatgggtgcaacgacagtgaggggtgaggcggctgaaataatgagtcaaatttttcaacagctcttgtgataaaaataaatacttttattggtctggttaaaagatacaaatgacttgaatctgataagcctgctgaatgaatgaatgaatgaatgtatccatctattatgagggttgggctttggctctttcctgtagtgagggagaaataatactttgaagatgtttgacggggctgcggtcaccaaggcctggtgctgcgacgttcctgcaggtttcgaatgaacctggcgttgagtatgtccccacccactgtccaggactgggctggcggggccggggcctgtggaggagctgtgtgcatgggcttctccccagacccatcctgtgacaaggcctgctcctcactggcagacctggtaggtggggagatggagagtgggttataggaatactaaagaggaaattaagattacagactcttcaaggtctcgggccaggttttaatgtaggacacatgatgggtatgaagctggaaccattagtgctatgtccaaatttaaaacctctcagagaatccgtattccaaagggaagtaccagagttgaacctgtgggggaaaggggcttgcaggatgtaaggtagaaggaattgtgggaggagctggtgtccagttcatacaataagatttaagagtaggaagtgactgagaatgatgttaggaagggagtcagatggtggtgggaggctgttaggggaggggtttagacctcacctattctttgtttcctgttctccctgcttggagtcttggttgcctgtggaaatatcaggcatgtgaatgggaaggcaggagtagacagtgaatgtggcctacttgatttgagggtagggaggagtgaatacttacctgtattgggggatgaggaattcacccccccatggcggctgtagcagcagctttgggctaccagacctgggggagtccccctgtagaagaaatgggagatgatggggaggaggctactggatgaaagatgggtgggtatggaggaatcagaggagaggagtaaaaggaatagcacaggaacaaagagaagggggtaattatcattcctaacaggttttaatcaaagctgtgccccagaaaagggcgggggaagttcattttatacccaagattttctggagtgcttctgatttattgctctattctttctagttgaggtaatgtgttaaatctatggctaggtgtgatccaaatcatgtcagaagaacagactcacatgtggtcaaaaatgtgttggatcgggtactctggtgtttggtttggaaaacagggttaccttaactataagattccttagaccaggctgggcgcggtggctcaggcttgtaatcccagcactttgggaggccaagacgggcagatcacgtgatcaggagatcgagaccaacctggccaacatggtgaaaccctgtctctactaaaaatacacaaactagctgggcacggtggtgcacttctgtaatcccagctacttgggaggctaaggcaggagaatcgcttgaacccaggaggcggaggttgcagtgagctgagattgtgccactgcactccagcctggcgacagagcaagactccatctcaaaaaaaaaaaaaaagattccttagaccagagggaaataggaagtgacaaggctgaattttgaatttaggaggaaaaggaagggggcctctgtaaatagggtgacagactgtgttgcactctcaatggaggtaagggtttgtcttgagagagatccagcggtttagtggagcagacgtcaggtaatcagagtggga

SEQ ID NO: 584895 - DNA, 4001 bp, Homo sapiens
tgtttcagtattaccagaggagatttttttgaactacacaaggagaatggtatcttcaatctattcttgactacaagtctcattaatgaagaactatggaaaagaataagacatgcattcattttatggcaaactacatattgctatctacctttagttcagaacatttacatgcagtatttttaatattaaaattaaaatgtatgataaatgcatgtttacaggactaaattagctattgtttgcagtaaagcctttgtaaatggaatttcacgttgaaatcttagtcttctgtccccaactccttctttccctagctcctctcgttttctttctaacactgaaatgtgggggagaaaaatgaaaagtgcacatcagaagagagtcacttgctgctttggttttactttcccatttctttttactttctgtttttggcttttaaaacaagcctcttctccacccactcccaccctctttgcagagagcagacttcaaacttcacttctgtttctaggtcctaaagagaaacaagaggggggcggggaacagaaaagagatcaattgagagttattccaaaatgcaaattaacaacaggttttctcatttcaaaactcccacattctgccaatctgaaaatatcttttctccacctcttctgaatgacttaggtccccagacagcgaaggaattcaagccacaaaggaggtattatgctgcttacagttcttaatctgcctccccgaagcgctgcaccagcctctcaaaaggttccttctgtaggttaattgcaggttggagctcccagaatagcattttcttttaaggatgatcgctcatccaccatcccggaacatttctcgagctactcattagagtttaatttcctcgagccaagtccctggagacggtgaaaccctcctccccgcggcgtggacgcgggatgcccctgttcgtgcctggagagcccgggattcagcagggccccagcgttccccaggctgtccctctctactgctgcgaaaagtgagcgcggtcacgaagtgctcctcagtcctcgtggtcatgcgacccttggcccaggaggtctgcaacacttcttgtgttacctgataatcctccacccgcacaagcacgtatttgggtgggtctgctgcgtcccgcggcggggctacacgcctgccagaaattcgcttttgtcgttgaaagacagaagggtagttgggctcctcgccgtggtcctctccacccgcatgaggaaggtcctctgcaccggccacctcttcccgtgcagggtcccctcgagtccctaaccacctctctgggtgcaggagaaagagcactttctctctgacccaggactcacggtccaattcctccccggcccgaggtccgagggcccgatctgccgttctgtcctcgtggccgccgccctggcttcggctcgcccctgccgtcgcgggattccgggcgcccggagctagcggagccccgcgccctacctcccgcggaaaaggcccgaggtcccccaggctgcgggaggagtccatgggattcgcagctccctgaggcccccgggtctccatcctggcaaaagggtcattcattcgttccttctttgaccggttcaagcagcaagcgcctgctgagctccggaaagcgcgggaccaccaagccctgggtgtggcctctgctgcagctccggactcccagccggtgaaagctgaagactagatcagccccaggctaaccgcgtgcggaacccgcctcttcaccctccgcctctcccacctggcggctgtctagccattcagaagaagcttgacacaagccccagtcactcctcttcttcctcctacccctgtccggagccctgctccctttgtcattcgctgattcagtcccctcttacttttcacctctatcctagtttcccacccacctttcgtttttctccggagctgaggcgcaaaggacaccctcgcactgcgcccccactgaaatgccccgaagtatgtttgctttccaaggacgctccttgaggtgaaggaacaaagaagtttgtgtgcattttaattagctgatctaattctgaaaagggtttttgtccattccgaatccactcccaccatgctgccaaaataatggaatgtagatcaaatggtcagactgaaaagctgaagccttggagaaactggttttggtttctttgtccttcttcctttagaatgccagaatctgtagctctggaggacaatggtcacacctgtgtcctcctcctcctcttcctcctccttcttttttcccgctctctttctctctccctctccccgctcccccttcctcttaccccacccccccacattagatatggtctcgctctgtagctcaggatagagtgcagtggcgcagcctcgactttccaggctcccacctcagcccgtcaagtagccgggactacaggcgcgcacccccatgcccggcttttatttatttatttatttatttatttatttatttatttatttatatttttctaagagatggtaggggtggggctctcctatattgcccaggctggtctggaactcctgggcttacgagatacccaggatcccccaccctacccacacacccacctgggcctcccaaaattctgggattacaggcttgagccacggccctggccagtcttcattttgtgtgtaatcaacgcttgtctcaggaaggtgtagtctttgatttaaaacaagctataaaacagaagcaaaacaaacatccaaatgaattttttcaggacttaaaattgtttgtgtttgtgtcgtttataaaattccctctgcacccacccgtcctctttaaccacaggggttaaaaaaagttaagtgtctctggcgaggcttttagaatttacccataggcaggcccgctgaccactactctttgcctaaggttaaccggggaggctaggtcatagaaaaagagctcagtttgtggtttccagttcatccttagctgtttgttttattaaaaaacccactgatggctgggtgtggtggttcacacctgtagccccatcattttggaagtctgaggccggtggatcacttgatgccaggagtttgagaccagcctggtcagcatggtgaaacccagtctctacaaaaagtacaaaaattagtcaggcatggtggtacacacatgtaagtaatcccagctacttgggatgctgaggcaccaaatcgcttgaacgggagagggggaggttgcagtgagccaagatcataccactgctctctagtgtgggtgttagagcaagaatctgtcaaaaaaaaaaagaaaaagaaaaaaaaagaaaggaaagaaagagaaatctaaatcctgcctgatttagaaaaatgagtgcaatggtgaaaaattctgcccatatgtaaaaaacaaagtagtatagtgagatatttggaaagggaggacttttgatatctgccaaatcatataaagaaataaagtgatagaggaggagtgagaaaatctgggtcagacctgggtgattagaagcctgaccttagtgggcacagcggcgcctactggtaatcccagctgcttgggagattgaggtgggagggtgtcttgagcctaggagttggaatctggcctgcaccatatggtgagacctctgtctcttcaacaacaaaaacaaccaaaaaatatacatgcctgaccttgggctggtttctcctcaatcacaatgagctcaaatttttgagtgtcttagccaagaattgttctaagcactctatatatttaaacacatttattcttcacaataaactgtgaaagtagtagtatttctttggtctccttgaaatctttgaagcacaaagaggttaagtgtgtgcccaaggtcaaacaccaataaacagtggagccaagattctaacttatttaaatgcttgctccaaaatgacttctaaattaccttcatattttaagcctgtga

SEQ ID NO: 584896 - DNA, 4001 bp, Homo sapiens
agagacaatactgtgaccaaaggctgagactgtgtcatcacttgggaatgaaagcatcaaatgccaccccaggtgggattgttggcttcaaggtttttttctccctttcctttctcccttttctcttttcctttatcgaggtctgctatttactcagcaactcttcaaagtctgtggttctgtgggacacaatgtgctaaatgatgcctgtaagggaggaggtcgatgtacctccacttccaagaagcttgactttccggggaagaaaagacaagtgaagcgtagacattgcgacttttggcttcctgtttctgtgagttgcaaggaatcctgtccacctggccctggagccgccttctgggacctcatccttgccccctgctgcaggtgccatctcaattagtcctgctgtccctcctccccctttcagattccagcacaattctggaacagctctcccacctggccggggtgagactgaggctccaccctcaagcacttgggcactgatcctttgtgaaggatggggatagcaagacagcgtctgcaggggcccctagagggccgtggggatggctagaaaacaggaatgaacagactcacttcagcttatgcccagactcacttcagcttatgcccagaaacaaagaaaccaaggagaagcaaattccataagtgcttttattttattggagatgagcaggggaggcactgaaaagtggggatagtgctggaaacatgctgacagggcctggattgagcccacacagcaaggggcgggagcaggactctaactcccaatgttgggtttccctctatcgtgctctagccccactgcaacctagggcttggaggattagggaagccagctgggatgttccaagaagagccaggagggcggaggactccaggaggaaatgggttattgatacctgggtatagatgaatattcccccagctgcctcctggataccgattaatattcccccagctgcctcctggataccgattaatatttccccagctgcctcctggataccgattaatatttccccagctggtacctgggggttgattattgataccccagattccctcagggtgtggcatgggcctcgttccccaaccagtcccagggcctccacctccccaggacacactgggattcagggtaccccaggggtgatcaggcagaaccctgtggatgagagaccagggagggcgttgggaaaggatttttcccccggctcccagtgaattagaacggggcagtcgtctggactccgagtcctggtggaggagtgaagccttgggtgagaggcctgtggcatcgggagaagactccccaggcaaagggccactgcccggagcgagggccgcagcactggagaggtaagagagttcttcaggcagcgcttcccccaggcggtcctcagccgcagcagccatcatctgccaaggatcctcagggggccaggaatccatggcaggcagcccccacgatggaggccacctctgcactgcagaacctcctgcaggtgggaagccatctgatgcaggcacgctgagcttcagaggaacccttgccaagtcattagacctagggtccagagcgggctgcggatgttcagagttagaggggccagtggaggaaggttgtccgagctgaggcaagttggtccccaagttttgggaaactttctcctccacaacaccgatgctccgggcaaagaggcctgagggaaagggaagataaagcaaccagtggtctccagtccccgagtccccagttccctttgcttcccctatgcctattcttccttttccctcagggacctaaatgtgtaccctcctgcctttacccctttccttaattcctgtttcctgggggacctccagtccctcctgcccaagggcatcacggcctccatacctgggagatgaagacagaccaggagcaggcccagaggagcgcagctccctgccacgcggccctgcatcctgctcagcacccgatctccctcagccccaagacagccagccctttatcctggtagtggggtgggggacagcagaaacaggctgggctagtggttgtgaagacaataaacctccacattccaccctcattcctaatgtggtctgtggcaacaggtgtcacttgaatgaatgtcccagaggaagctgggtgtctcccgccctggctcctttccttgacctccctgccccttcttggcccaggtgtcctggctcacagctcatccctggttgccagcctccccagccctgcttctctatacacaaggacctccaccctggggtcccactctcttaattgcctctctcagcaacagaaacacttgtttctttttgggagctggattgtttcctcccagcacccctttctcatgcatcctcatatctccttcaccttggccccaacctgcaggaggttctggggtgcagaagtggccccatctgaggagctgctcctacatgagaccctggatctagctagggaaatggacctggatgccatccttatgagatactgactaattcctgctgctgcagtgacaaattaccatgaaccgaatggcttacaacaacatggatttattactttacagttttggagatcagaagtctaaaacaggtctcagtggattaaaataaaggtgtcagcagggctgtgattctttctgggggcctcaggggaaaatccctttccctgctttttcaccttctagaggcatcctgtgttctttggctcatggtccccttcctccatctccaaagccaaaatcagccatttcttacactgtatcactcagacttcctcttctgcctcccatgtccacattaagggacctggtgactacactggacccacctgaataatccatgataatctctgtgaagtcagccgaatagcaaccttaatcccatctggaaccttaatttccctttgccatgtaacctaattcctacgttccagggattaggatgtggacatctttgatggtgttggggttgaagacatcattctgcctgctactggtggtcagatgtgccatagagtataagaaaccttgggagaaagtggctatttccaagtaacagtagaggagagcctttaaatgctgctgtcaaatggccaggacttgatccttgttgaagctgggcgatgagaatgtagagattcattaacagtttgttggcttttaaatatgtttgcaaattttattataaaaatgcaatggctttgttctctccatggcttccgggaggccccaggagtaggcttccctggctgcccaaggtctaaacatgagctgttggctgattctactgctgtgtcctccccacctgcccctgctggcttaaccactggaggagtgaagagctcctctccagaactggcagtggatggagcccagaggcctttttggatgacatgcatgagttttacacaagcttttaatttggagcacagcaggagactcgaggaaacaccacatcagagagccttctctccctgcaattcccattcatgaagcatctgaggacctcgattcctgccattggctgcagatcaggggccagatgctggaccaagggtgattcaatccctttctggtcaatgtaatacatttttgctgattccagacttggagtttcaacagttctaaattcaggaccagacagcaccaccctgataggagggaatgggttaagtgctacagtaggggtgaattcctttgcagccaagcagaggctctgagaggtggcctggggtggggggtggggctcctacagggacaagcacaatccactctgccctccttgggatgcgggaacttcgtccgcctcagcctctccctgcctgtctcaggacttaagtcgcatggaccccaccacacactccactttctctctcttctccagtggaagcgactcctctttcccactggggcactctgccttctcagccctcacct

SEQ ID NO: 584897 - DNA, 4001 bp, Homo sapiens
gtgagtcttaaactatcttgaaataaaaaaggttatttaaacgtgaaggaaaaaatacacatgcttagtcctgaccgtagaggtcctaatttagtggctctgtgttagattagtattaaatccagtgggtctgtgtttggatatctgtattaatattttttttcaaagttctatatagtgcactgccaggattgagaactatcgtcctatgaaatactcactagctcttctacggacatttcaaaatgcttataaagaacagacaatttcaactttctttcttttttaacttaaaacagttcaatgacaaaggtcactgaatagaaaagattaatttctaacaatagatttaacttatccacttaaggtttgggttagatattccataaggcataaggaatcaatcattaaggtatatctaagaatggagatacactgtcctgggtatgaaaagtcactttagagatcataatgaatcattcatactaagcacttactaaatgctaagaaacaattttggaattgatgtttttagaagatgattccaatttgatctccccctacattttagtttttttttccaaacacctctgctctccagcttcttatattttcaaatatcaggagtgaaatgaaatcacccttagtttaccattttaaaggaagagaggatcagagaagtattgtgagagttcttaggaaaatacctacaaggctcaaggtcagactgaaaactcttacggggataaaagagagatggaaacctatagtacaatttgatttgcttattatatatacatacgtatgtacagtaaacgtcctcatgttatctatatgtatctacttttatgctaccagctactatttaaaggttatatagtttcttttacccatttattagggtactttaaaattttttttttttttttttttttttgaggcagagtctcgctctgtcacccaggctagagtgcagtagcacgatctcagctcactgcaacctccacctcctgggttcaagcaattttcttacctcagcctcccgagtagctgggattacaggcgcatgccaccatgcctgcttaaatttttttagtagagacggggtttcgccatgttggccaggctggtcttgaactcttggcctcaagtgatctgcccacctcgaccacccaaagtgctgggattacaggtgtgagccactgtgcccatccaattagggtgttatttagagataatatttcctctcctacacatactgaaaggtgctcaagtatggccaagggcaaaatgaactcacatttactattatgtgccaggatttataatagatacaaatacttcattaaagtctcataacaacctgtaagataggtattagtatatttatttccacataaggaaacagattgagaggctaaataccctgcccaatacatacaactgtaagtggagaagctgtattccaacccatattctcctcaaatatccctgtagggacaagcaactctgaagagaaaaaagctgataaaagtctatgtaacagaaagaatgacacataaggctatgaagcattagaacaaaggaaaacgataaagtcacttacctagtatgtctttgtgagtgtaaaagcgtgtcttaagtggcttgtattcatggatccgtttgaaggtttttccaaaaggggctggtggaattattttattacaaacagcacagcaaacaaagtttttgtaatctgaatttctgatcatagttaaatttcagatgtcttctcctacttacagttaaaataatcttagaatcagaaaaagtcgtttcaagaaaagctgaaagtttaagaaagctggaagaggttcagggttttaggataatgctagaggctggtaaggattaaatggttcaagtgattaggctgtggttatgtgtctaacgttaaagaatggtgctaaaagcccctgccatagaaggtatgggcaccagatttgggaagatttaagtagttgctccttcccagactctagcattaagttgttaacttacttggcaactgttgctaggtaagacaagctttgctcataaaagcaacttcaaataatgacaaaagggagcatgatacagccattcattttcctgatactttctatattagtttcctattgctgctgtcttactctgttttctgttgcttataatagaatacctgaaactggatagcttataaagaaaatgaaattatttcttacagtttatggaggctgagaagtccaaggtggaggagttgcatcaggtaagaatcttcttggtggtgggaactcactgaagattcctgaggtggtatagggtatgacatggccaggggctgagctcacatgctagctcaggcctctcttcctcttcttataaaaccaccagttctcctcccatgataatccatcaatcccttaacccatgaatgaattcactcaccccttaaaggccccacttctcaatactaccacgttggggattaaagttcaacatgagttttgcaggggacaaatattcaaaccatagcaccactgtgacaaactacacaaacttcatagtttaaatgtaacacaaatttatcctcttgcatttctggagatcagaagtctaaaatgagtcttaggggctaaaatcaagttgttagaagggctggttccttctgcaggcttcagaggagaatgtgtttgcttgccttttccagcttctaaaggccatccatattccttggggtcatggccttgcatcatatagccttttcccccagtgcttccatagtgacattgtctcttcctctgatcttctgccgtgctttaaagaccttggtgattataccagccccatctagataatccaggataatctccccatctcaaaatcctaaacttacccatatccgtaaagtcccatatttacaggttccagagattaggatctggacatttttgcagggaaggagagcattagtcagcctaccacactttgttttaaattagtttttaaagaattaatttcttttaaggccagcaatggaggtagcttaatttcttttaggtttttaataaacatgatgtgttggtgccatggtaataaaactgggaaatatcatggtatcttgaagaagaaattactttcattaaggcagcattcaaaattactaagcctggttttaaaaatcacatggttaactaatttgttcctataattttagataaacagccatagaaattccacctatcgcaaaaatctgtgcaactgattgtaccaagtaactgaatttataaaattgcctgacaatgtcatatgctgcatctacttggcaggactattttataataagtgagtgccatcagtgaaattaatttcaacaacaggactcccatagggccctgagctaagtgtaccacaagttactctataatttatattaacacatacggcctgataactggctgaagaccttaagtaactatcaaattgtgccagatttgacttcaagaaaagggttaactgggacttggagaggaattaaaaacaaagagatgaattagtatgaagaatgaggattactgcatccacacagttaattatctggattgagaactgaggctacttgtgccaataactttcctatctgttactagaaattcttgcccagatggaaggataactaactggccttgatttgcctgggactgtccctgttttaaaactgaaagtcctgaacttccttagtgtctggcaaattggaagagttgggcctcctatggaagataaggctgtaaaaccaataaatactttcagtgtttgccttaggaaatccttgaaaaacaatttatcaattggacagcttgctgatctaggcaaacagctcttccatcagaagattagactactcccctgggcaaagagttcacttaacatttattgaacaatagtttactaatcaagacttgcttcaagatctaatctgt

SEQ ID NO: 584898 - DNA, 4001 bp, Homo sapiens
taatcacaaaaatatttcttcttaccataaaagcaatcagagtttcagaaacaatctctccatgggctgcacattcttgtcctatttctcgtataatactccttataacactttcggcctgagttggaggcattctggctaaataaaacaacaattttttttaaaaaaaccgtggttttatgcaaatttatttttttcctcttttgatttctgcaatattgtatttgtaaacagtcataatatcatctattagcttattagcatttttattagtatctaggcctctcctgtttttcattatttttaaaaatgaaggactttattgaagacagacaacgattgggatttcaaataattgaaacatttgataaataacattttcaattatttaaattatggtcactaaacatatattcctatcatgatattcttaattaaaaaaaaaaaaaaaggctaagcaggctgggcgcgatggctcacgcctgtaatcccagcactttgggaggccaaggcaggcagatcacctgaggtcgggagttcgagaccagcctgaccaactcagagaaaccccgtctctactaaaaatacaaaattagccgggagtggtggcacacgcctgtaatcccagctacttgggaggctgaggcaggagaatcgtttgaacccgggaggcggaggttgcggtgccattgcactccagcctgggcaacaagagcgaaactgtgtctcaggaaaaaaaaaaaaaggctaagcagtatttgtaggggagggaggtaaaattaatgagaaacccaagagtacagctttaaaaggagaaatgcttattccaccacattcattaaatgacccttcagaactgtactagaatcttggaaaacaattcttgctcagatcattaaaatgatcttttccgcacatctaaaatagagttcagactctcgataaaaaaaagcatttactataaggaaaaagtggtaggttttgatcgagttttctgattttcctgaatatcagtaactaagcacaatggaagttggcatgtagagtataacaaaggcaatatcaggtagataaagccaactcctcagcattattagctttccaatggatgagtacgaagcactaggcattttgtccagtgaaaccagattgcctggattccatggtgacccgaccactgtccagctgtgagaccttgggcacttgcttcacttctttccagaggtgtgaggactaaattagtcctgtttttagtggttacaacagtgcgcggcttaagggaatcgcttaaaacagcttataatcagtactccaagatcacaggcagcgcatgcgcaagtgccagtcagtgggagagtccgtcgcgctccggatctgtgtgcgcgctccggatctgtgtgcgcgctccggatctgtgtgcgcgctccggatctgtgtgcgcgctccggatctgtgtgcgcgctccggatctgtgtgcgcgctccggatctgtgtgcgcgctccggatctgtgtgcgcatgcgcgccgctgccgggtcgctagggacgcggctcagcaccttccctgcacccaccctccaattactaagtctcccgaggtccggcttctggggtagccagtggagcgaaacagaagcgggaggcctcaggcacccgcgcaaaggctagagggcagccctgcagccctggggtggcgcctccggcaggaatggaccgctgttccagctctgcggcggcgcagcctaaaggatcgagactgagagctaagtctcgacgaggcaggacgcggtcctccagccgcccgagctccgccagccgccccaagctcgccgcctggcggggtacgcctccgggtcaagggcgcggagccccgagtaggctgacctggatcggaatcgacagcaggagccgtgtctgtctgcttctgtcctggggccctcaccgcgacggtcggagcagttgggcgctcgcagccaccgccgcgtaaccatggagatggaaggctccggaccagagggggcggggccaggtgggggtggggcggggtcccactttgagggtctttcccccaaaagatgggctggaaaaactttaaaaacaaaggaatttcaggcagagacatcttaacctccgtggttaagactgtgaaacacaagttctcgtaaataaggatattaacttgctagcgtgggaatgatgaggcggctttgaaagcggggtgggggagagggaggagccagttggagaggctgggaaaacggaagggctgtatcctgggcaaatagagttcttgtaaaagtatctagttttaaaaaacaaaagtaaaaagtatcgaggttttatttcatgtcccgttgttcaaaggaagtctgtaacagaacgctccaagatgcccgaagagaaaactgctcattcaagaagcacatgataagaacacattagtgtccgagtcaaaataatgaggttttatcccttaacgataatatcgttaggcccaccttcagacgtgaaagtgtgaaaaaggattaaatactcattagaaggagagcatcaaacaacaaggttttatttttaaacagtaatttttctcaaactgcaaacaaatatgcagaatatgctttgcttaaggacattccctgattactaggaaatgaatcaacacaaaaactcaagaatatacatcataatataacacaattttatttccgccttctagaaaatgttcccggaatgtggaagaagcttgtgtaaaaatagatgttcagagtaacaagatttataatagcacagccttagaaatctaaacacgttatttaagtaaaatatcaggcaggtatttaaaattatgttaacaaaaaccttgtgtttgtcttatatttgttaaaagccaaatgcgaaatttttatataatatgacttaaactatattgacatacatataatgcacaaaaagtgtaggtcagtttttcaaaatcacagcaagcaattagatctaaggatggaattataggtaaattacttttatttctttatacttttctgttttttctagatttttccataatgagtatatattgtcttatgatctataaaacaaaatttaaaaatacaagggagatgagactggctatttgtagagaatgaacccaatttagatatacaaatatactgtaagtatacaaggtaaagcaaccaaaggacggtgagatagcaaaattttaacagtggttgtaactttgtaatggcttatggctgatttgtcttctttatactttaagatagctaccaaaatgtcttccatgagcatatattatatattagaatattaaatatcttttaagatggtaagaataataccatcatattaagtatagttttaaactaatgggcaaatcctggcacaaatactccctgaagtatgtttgatactgttaattcctacttaatgtcaatgttttcttctctttctgttactaatttaaccctgtgttgggaatgacagtgttctcttttaaaaaaaaaaatctctcaacctctttctcagtgagagtggcctgtgacatggtctagccaatgagatgtaagtgtaatcactggatgaggtgtcagggaaagcacttccattttatgtctattgcctttccttttctttctacttgaaatgagaatatgctggctgaagctccagcagccttgctgtgaacataaacatgagggtcacatcttaaggatggtggaacaaaaatgaaaaaggaacctgagttcctggtaacgtcatggaacagccctatcagcttcttgactggctatctccagactttgcatgagagaagataaactcctattttattaagctactattatttgggttttttgctacattcagccaaactgaatccctgactgctacaatgggtatgactttggaagtattatttagcgttttgtgctacattgaattattctccctaatccttcatgcctcttagcatccacacctttg

SEQ ID NO: 584899 - DNA, 4001 bp, Homo sapiens
tcttggagacttttcccagggcttgcaattttgtagcagagagagattttctatctaaagcaaaatgctggtcttgtttaaataaataataagataaaagaatcaggcactgtaggggtatttggcccacagccatcctgtctcagcagggtccttttcattgagggaagcatttttcatatccataatttgcccctttctctaacccagggtgcacgctgccgtggcccttggtgacaatgtcccctgtggccttcctccaaagcttgctccagcaagctctgacatggtgtcctccctccccttctgggctgcggcttctccaacctcccccagctcctgcagacagaggagaaacagcaagtcacaagataagacaaagaccctctaggccaggccactcctcgctgccactctgggacagcaaggcaaaacgcagacggccccagctctggacgcctctcctcctctggaccctaaccctaaccctaagccactggaacactcacgggagaaagctggacctgctttgaggctcacctccctgcatgcacatccatccggcttctctcaagaagcaacctggtgtctgagagccgttgagtcttcatcccagctctggtatttctctcatgtggccacataaccttgaatgtctgaccttcaatttcttcatctgtacagtggtgaagatgatccccactttgctaggttgttgtgagcattacctaaaagaaaataggtgctatggcggcatgtttgttgagctaggaggactcggaacaaaattagcttctgcaccggctgtgctggagccaggcaggccgctccggtgtggccctgtttttcctggtttgtgtcccaggaacctgccaaccctcattgtcccggattttccctttgactccaaaagccgtgtctttcttatcaagcctctttatttttgttattatcccgtcaacatactcccctctgattcgcccccactaatgactcgcgccctttccaaagtcccagcacaccgcgcttataatctctttcagctgtccttaaaaaggttctatttgtcccctccgccccgctcaggggcgcccggactctggggcccggccttcgcgggctcccgggttcctcccatcgcttccctcacagtcctggccgcagggcagcgggtttcgcacgggagggaaggtttggatggctaacgcccagggttggtcttccctgtgtcttttatgggaacacgttcctgcctgcgccccacgggacagagccgttttcccgccccgccacgccgcgcccgcaggccccgctgcccgcagcctcttcccgacgccccaggccgtgcgcccccccgaaccgggcccaccgcgtgctgtgcggggcttccgcgcctgcgcacgaacgcttctgcgagctttctcggaagcagctggggggcggggaatctgctgaggaacggcgctttataaatcaaaagataataataacagagcttacggtgagcaccggaggctggaaacggggtggcatccgctcggggcggggcggcgtcgccagcgaatgacaacactgccccctggtggccgatgcggccaggcccgagagagcgcaggccgggtgcgagccaggcttcctcaccacgcggcttccccactcatcccatagaaaccgtaactgagcaaatgacggtaagtccccaggaagcgttaaggccaggaagcagcacaggagaaaaacccgaatcccatttttttagagtagggatttatttgttgtccccagatagcaagctgaatttctgaatagttcagagctcacaaaagaagccaagacctttcagggcattttataatgttgctttttataaacaaaatattgaaaccactactatcactgtcactgggggattactgttgagcagaaatgcttgtgaaactcccaaaagaaagggtcgtttgtgcttctttggcattaagtaaaaatgtcctgtttggtgtgtacacgttttcatatttaattattcacactgtgcactttatatataaactcagcacttaggttctctgtgagccagaaacctggcttctgtgctcatccatagacccagtgagagtgtagaagccaagcctggtggagcctgtgtctaccagggcattgcagtaaagcttctaccactcactgtaaatacctcccatcgaggctgaggaaaagttgtagcatacttggaaattggggtggagtattgtcatccaaaaaggcatatttcttttggtgttttccatacccggctgtgtcattgtgaagcctcagctctcccaatctccccataaactggaggaatcctagtgtttcctgtcctgccacattatgtgtggggaagatttttttttttttttttgagacagagtttcactcttgttacccaggctggagtgcaatggcgcgaccttggctcactgcaacctctgcttcctgggttcaagcgattcttctgcctcagcctctggagtacggagctgggattacaggcacccgccaccatgcccgactattttttgtattttttagtagagaccgggtttcaccatgttggccaggctggtctcaaactcctgacctcaggtgatccacccgcctcggcctcccaaaatgcagaaagagtcttaagatggatttttagtaagtacttcaagcggctttatgaaagctaccgtcagtaaagtagaaaactatatatgcacatatttagatatggagctcccacggaggaagtgctctgacaggtcaaatctgcccccaaaataagttgatagaacttcaaggaagcatgaaagcggccttgctgtgcatttcattttatggagcgtaagtgcctaataaatgaatgtgtgggtctgaagaaagtgatattttctaatgaagttataagtgtcgcagtccggaaaagtagaacccaaacaaacacaaaaaggagcgtgcaaggcccacgccgcgctgcacagactctccccacctggtgaatgctgacctggggccaggccacaggcagggagagaaaggtcgccggcatgaacaccaggtgaccccgtgaagtgtgtgcttctgagagcaggggtcccccaagtgaagtgggcgatggcctccaccaccttgagagctcgtcatccactgtttttaacactgccttctgttttgctttagttctgctaagatacacctaacataaaatggaccctcttaaccttttttaagtgtgcagttcaatggcattaagtacattcacattactatgcaaccatcaccgtcatccatctccgggactttctcctcttcctagatggaaactctggccccactacacaccaactccccatcttctctcccccgttccagttgctgtctttgtgaatttgaccactaggaacctcacacaacgtttatcctttttatcacaggattactacacttagcaggatgtcccccaggctcatgcacgttgtagcgtgtcagggtttccctccctgttaaggtgagtcgcgttccatcatacgcacccatcacgtcttgcttatccattgatctgtccatggatccatggacgcttgggttgtttccaccttctgcctaatgtgaataacacttctgtgaacacgggtgtacacgtaactccttgagaccctgctttcgattcctttggatatatacccggaagaggattgctggataacgtggtgattccgtttaatttttggaggagccactgtacagatttccgcgcggccgcacagcttttccgtcccacccgcggttccgaagggcccactttctccacgtcctccccaacgttgttgtttctggatttttgacagaggccatcctgatgagtacgaggtggtagagctgcctgctttttgattaatgtgacgatcacaccctctgcctgggagttttacagactggtgatgactttttgtggcatctcaggaaagaacataact

SEQ ID NO: 584900 - DNA, 4001 bp, Homo sapiens
actatgcctggcatatagtcaccacaccatacatttcagaaaatactatttttgcaataattaaatcaattgaaacatttattgagtgccttacctactacagtacatgccaggcactctgttagatagaatatgggcagatatcaccttcaaggtgttgaaaagaaagtgattgagacgttgtaaatgaataattacaatgtaactgagtaaggggctgtaattaaatcattataacgaagcaaggatcttggaggagacagcaacttttgttttctctcctttttttttttttgtattttttctagtaattacacttcctgaacaatcaggaaaaatgacttgtgagttagaagtgtaatgactagaatttaggcaggttaaaaaagaaaaggagataaaaaggaggtactattacaggaagagtaacaatgatgtatgccctggaggagagtgtttaggaaaattgtaaaatgtccgatgtgcttgacatgtagtgggcgctgggaaggtgatgagcagatacctaagggatggctgcagaattagggtttcctccttccggcattaggaggcagttgagcaggtctgtattttagagcagcagtatggaaaacagccgaaggaagagagggccctagaagggaaacctccaaggaggctgcaaggaatgaggcctgcacaaatcttgttcgttcacttacatcgattgtgcttctaccactgtgcttctactatgtgcccagcacagttttaaagggttggggatacagaaatgaactagacagacaaggccccggcccacatggagtttgatattctactggggagagacagacaatacaaaaacaaacaagtaaacagcaagattatgaggagtacaaagaagtaaataacaacggggtgtcatgaaatagagtaaggtaggtggaaggtgggaagagcttctttaaagggaaggtctttctgaggagaaaatggaaatgcagaggaaagagtcaggagtcagggatcaaagaacctgagaaacccctgacattgttttcaacatgtggtatataagtgcatttttatggggagattctcagagggacatggccgtgatctcatccccccaaatgtttagtattcatttgctgtacctaaatatataattaattttgttttaaatttttctctatatcaaaaggtgggggtgatgatagctatgcagatatatctaactagatagagagagattcttcccccacccctccacttatttcatgaagctgtaataggagatatgcatttcggggtacaaaattgggctgtgtgatttacatgtatcctctacatgaaaaaagaaaaaaaatcatcttttgtttttcctattgaaaggccgacgacggacctgaaactgaccggatgagcttggtgtcaacaaggatgcctcttcttctatgttaatatattgtacaagcatagatataacttcacatgtatcaatgcgtatatattgtagcttagtctggaggactacgtaccgggcggtgctcctggcttgatgtgagcaggcggtgggaatggagggtggaggcgggtgggccgggccccgggtcccagaggcccactggccatgtcgcggagagctcagcctggagaggcccagggaagggcctggaggcctcggggaaggcctggggagggtcaaggaagcccgaggaggcccaggaaggccgaagaaggtccaggacgcctgggggaaagtccgagaaggcccgagaaggcccgggaggctcaggctttcccgcgaggccgggggcggccccttcaggccaggatggccgagtgggctgcgcagccccgcgggggaggccgggcggggcgcagggacagggcctgaggcttgttgtcctcccctggcggccccgtgcgtcccgcgggcccggcggccgggtgacccccgagaggctccgcgcctgggcggccggcggcgaccccgcggcccgcgaatacgcgtggaccttgtggaacgccgggcctccccgggcgcccccgctctctggtagttgccgggagacccggccggtggggaagcccgcggagccgcagccccggccccggaaggtctctctgggccccgggcccgactcccacccctgcgccggcccgcgggcttcgcaggccctgcactgccgaccgggctgcgctcaaggccgccagccgcccgccgccctctttgtccccccgctgcaggaaggccgcggcagagggggcgccctccaagccgtcagccacgcacgcggaggcgctcgggcctcggggcggcgcaccgggagagcacgccggggaggacacgtgggccttcgcgcggtgggttgagagccccggccccggggaatcccgcagccccctcctgctacccctggaactgggctccccacccagtccggccacagctcaggaggaaaaggggattcctcttcacgggggccttgcggctcccttgagacacgcgccttcaagcactctggcccctaaagctcctgtcccccaactcgcagtccccaaggcgtcctttgtccccagggccgtccttcaggtgcggtggccttttccaggagctggatgccctccttcttgacacacacccggtggccccaggcagcgccacctgctcagcaaccgccttcctcctgcattcagacctagtgtctggcatgcacacactcgtggaccaataaccggtgttggctgaaaacctacctaaactaaatctcctatttcttcatacacttttctgtaggagacaatcaattgtaaacgattagcagatagaccgattactgcggtggctttaatttgtgattcttggccgggtgcagtggatcacgcctgtaatcccagcactttgggagactgaggcaggtggatcacgaggtcaggagttcaagaccagcctggccaacatggtgaaaccccatctctactaaaaatataaaaattagctgggcgtagtggtgctcgcctgtaatcccagctgctcgggaggctgaggcaggagaatcgcttgaacccgggaggcggaggttgcagtgaaccgagatcgcgccactgcactccagtctgggcaacagagcgagactctgtctcaaaaaaaaaaaaaaaaaaaaaagtgattctttccagatagccataccttaatccagtgactgttttgcttgttaccttagagttctctaattcttttaccttaaacggcagtgggttaaaaccctttaggtaccttgattgattggtgcggaaaatattgtttggtcctgggggcattttgttgtctccgaaatatgcacggggtgcttgcctggcctagttgtaagggttcaaccctgctttcaaatggagcaattgttttgaatgaataaaaggagactttgtgcccctgttttctaagttccagataattcaccatagtttgttccaatgtgtatttcatcttcttagctgatatttgctttctcacctctgatctcaatttcctaatcttctgttctgagatctgccagtttgctgttgtctgtgctccttttgagtcaggcttgccccttgcttctggttggtttcgtactgtcacccccaccctgctctcctagcccctctcttctgctttctaagcattctcttacctcctttagatgggaaatcaaaactcacactttcttttttataaatgttgacccttacccataaatgtgcctatcccgcaatctgtgtaggattttaaggaaacagagcaacagctacaacaaaatggggagaagaaatgagaactgtgctaacagcctacgtgtgtcaaacatctctcaggaggtatggcaggcgctgttgaacttgagtgtttgggcagcggctcctgttgctaacacgtaactcccatggagttttcttgtagtgatgcccttgctgcgtttgcatcgtgggcagtttatcctgtgttttccttttggcacatttggaac

SEQ ID NO: 584901 - DNA, 4001 bp, Homo sapiens
ccaatttgactcttgcaaattcagcttcagcaacactggcatcctccccttaattaagcacttaccatgtgccaagcactaatctgggcactaggaattcagcagaggaaaaaaatacgaagattcctattcttgtagagtttatagtctagtaggggaaacaggtagacaaaaaaaaaaacaccctgtaaattatatgatagctggtggttaatgcactgggggaagaaagtggagcagggtaagggggattgagagggcaagatgaggtcaggcaggtggctcacgcctataatcccagcactttgggaggccaaggcaggagactcgcttgtgtccaagagtttgagatcagcctgggcaacacagtgagatctaaaataaaaatagtatgggcgcggtggctcatgcctgtaattccagtacttggggaggctgaggcgggcggatcacttgaggccaggagttcaagaccagcctggtcaacatggtgaaacctcgtctctactaaaaatacaaaaattagccaagcgtggtggtgcacacctgtagtcacagctatttgggaggctgaggctgaagaatcgcttgaacctgggagggggaggctgcagtgagccgagttcacaccagtgcattctagcctcggcgacagagcgagtgtcaaaaaaaaaaacaacaaaacaggccgggcgcggtggctcacgcctgtaatcccagcactgtcggaggcttaggcgtgcggatcaggaagtcaggaaatcgagaccatcctggctaacacggtgaaaccccgtctctactaaaaatacaaaaaattagccgggcgtggtggcaggcgcctgtagtcccagctactcgggaggctgaggcgggagaatggcgtgaacccgggaggcggagcttgcagtgagcagagatcgcgccactgcactccagcctgggcgacagagcgagactgcgtctcaaaaaaaaaaaaaatagccgggtgtggcggtgtgcgcctgtagtcccagctgctggggaggctgaggcaggagaatggcgtgaacctgggaggcggagcttgcagtgagccgagatcccgccattgcactccagcctgggcgacagagcaagactccgtctcaaaaaaacaaaacaaaacaaaacaaaacaacaccctgtggaataaaaattgatcaggaggacgggtgcattcgaatgaatcaggaaaagaacacgcaatgatggaccctgggaagtgacctgatggaagttcattttaaaagatctctttggcgttggtgtgggatgagtggagagatgatcacggcagaatcccataggaggttttgggtgacatcttcaggagaggtatacaatctgaactaaccgaagactgtaagaaaagcagtgtctgtaaaaaaagcagcgctgactttgacctgcttgacgccaggaaacgctccacattcctgagcccgttcaccgctccgtaagatggagaaactggtctaaacgctttgaagtctaatgcagctaaagatccttccctttacttggagacctcggaggctgtgggctgagacagggtcggattcctctcgctccctccccacccccgcgggcagtgcaccttcctgggtccccaaggtcaaaggaaatggacaactgcgtccccgggttcgcagtctgcattcggagccagcaggagcgacaggaggcaggaacggaaggcttcgccgcgctcaattaccacagtccctgcgcagccctgagctcgcggggcgtcccgaggctggcaggacacgggacactcacggggagacccggcgggagcgtgggcggggcggagaggcgaagtgacagggggcgcgggcagggggcccggcgcggcgcgccagcagaggcgcactcacctgtacgtcaggccctctcgtccctccccgcggccgcgcggactgcaggcctccaggctacccctatctgcgccccgccccttccgccggcgccggcgcagtgagagcgggtcgggcggggcgcgaggccagggcggcagcgaagcagcgacccctgctggaggccgcgtcttggaggactgcgcgggaagtaggctcggggcacaccattctcccgggttcacgccattctcctgcctcagcctcctgagtagctgggactacaggcgcccaccaccacgcccggctaatttttttgtgtttttagcagagacagggtttcaccgttttagccaggatggtctcgatctcccgccctcgtgatccgctctcctcggcctcccaaagtgctgggattacaggcgtgagccaccgcgcccggccatcttaattcttttttcttttttttttttttttgaaaccgagtctcactcttgcccaggctggagtgcagcggcgtaatctcagctcactgcgacctccgcctcccgggttcaagcgattgtcgttcctcagtctcctaagtagctgggactacaggcgtgagccaccatgaccggctaatcatcttaattattaatgaagtgatcctttctctgggaccactaacccctttgaacatttttttttttgacagggtctcactctgttgcccggagtgcaatggtgcgatctcggctcactgcaacctctgctacccaggctcaagctgttctccccacctcagcctccccagtacctgggactccaggtgtgtgccaccacggcctgctaatttttgttttgttttgttttgtttgtagagatggggtttcgccatattgcccaggctgggactcaagagaagcgatcttccagcctcagcctcttaaagtgctgggattacaggtgtaagccaccgagcccgccctctttgaacatctccaagagatataggcgttgtttccagaaaaatgtgcaaatacgtcagactcgcagtttaaggaaacatcttttcaagaccaacgcaatttacacgtgagccaattcccctttccctcccaaccaactatccatccattcgtccatccatccatccatccatccatccatccctctctcattaggtctgtctgtggagaactctgactcatacaccaaacaagatgtcaccctgcaacattctaacaaaacttctagtcaaagtcacagatgacctctgcaatgtaaatccaaaggtctggtctcattcctcaacttacttgagttataggataccccattggtttcacctacctcacttgccacttaatcttcttccctgttttttcttttgttttgttttgtttttttgtttttgagaatgaggcctgctctggcccccaggctggtgtgcaatggcatgatctctgctcactgcaaccttcactctcgggttcaagcgattctcctgcctcagcctccttagtagttgggactacaggtacgcaccaccatgcccggctaatttttgtagttttaatagagacagggtttcaccaatattggccaggcttgtctcaaactcctgacctcaagtgatccacctgccttggcatctcaaagtgctgggattacaggcatgagccaccactcccagccagctgttttttcattacatccttagaatgccaaagagtaagtgccccatacttagacctctaatctttttcctttttatctatcctagttccccagtcgatctccaacaatttcgtggctttaaatattatctatatatggacgatcctcaaatttgtattgcgagccgagatcattctcttgcattcaagactacaactgcctacttaacatcttcacttggaaatctaacggaaatctcaaacttgataggaccaaaacccagatccgggtctcaatgcgttcctcccacagcattccttatttcagttaatgagtcttccacccttcctgttacttaggtcagatatcttagagatacactcaatttctccctttctgtctcacctgggattagaggcgtgcaccaccacacctagctaatttttgtatttttagtag

SEQ ID NO: 584902 - DNA, 4001 bp, Homo sapiens
actcgcttagcaaagtgataggatagggaatggattagcttagaaatcaaacaggctcttgtcccaggtctactatctgctaagtcacctgcttagaaagatgaatgaagcaatgcatctaaaaccacctaaagggtctaatgtgcttgaacaacataaagaattaaaggtacttttaagcctgtttctctccattctgtctattttctaagtcaattttaattattttcaaaaattttccccttctctgccttctctatctgcacaatggactccttccatcctattctgcccctaagcaaatgaaggcgtgctactgtctcttcccactcaaaaaatcagagattttatagaagtgttcaagaatgaagcaagctggagatgaagaaaaacttatacctgcattaaaaaattaaagatattcttgattttattcatacaaaacccaagatttacagattatcattttatatcattctaaggaaatacatgatacaggtagaaaaaaagctttatttggtggagaaattctgtgcagttttaaatatagagcacagagcttagctgactagtgtttttatctccagatcacaggagacaattgttaaattactagattgtaacttgggtatttcttcaaaaggtttcctcaaatgatagctatagaactttaagaaaaaaactgcacacactttccgactctgtggtgctttcagtaccacccaaaacagtgattaggttttaatgcgcataataactacgttgatcagaatttaatttttaaaaatcattaataaaagaaatcactaatacctcagagggtgagcaggaacattaaatcaactgtcacttgaattttcccaggcagtaggtatagtaagtccttttttgagattttactttaattggaaagtattactgttttcctaactactacatttcctgcacctctggaacaaagtctctggccaggactggagtgaggccagaagccctagggcgcaaaattgaaggagatactctctatacttgcatgacctgaaacagtgactgcctcaatttggggccattggcgccactttgttggcctcaacctactttctgcccaggtttattttcttcaaagtgttctcgtcttttgcaatattttgaagtaaggacaaatttcaaatataaatttggccattcgatttatgcaaatggatgttatttgcacggtcacccacaactttacccaagaatcagtagcgtgacgactataaagcaaaaaactagacagttcttactgtgagattacgatttgatcaacaacagggagaaacccgtttcttaatagcgctgagatccccaactcttacgcagaattttaacgcccccaaagcgcgtctattaaagtgaataaataaaaagtgaccgccaggaacagaccgcgaagctgacccctgtcctgatccttacgagcagccgccgcgggcaggctccctccccggggccgcctcccttcgcctccgagccagtccgcgaaacccgcaaaggcgccccggaaagccgcgcccggcggcgggactcgaacgcagcccaccggggagcgggcgccctccgcttagtccccacaggctcccggcgaggcccggctttccgcaaaagtggggaggagaaaagctagactaaccccacgtcctgtcctgagagagacgccgggacgacagccatcactttccgcgatcccggccgcaaagctcggctgttcaatcgccgcagaaacagaggcggtaccgccgcgaaggaggagctgagaatgggggtggtgtggctttaaaaaaaaagtgcttttgaataaagaaactttatttggtgcccgatcaaacggcaaacagtggctcgccagaagacccaatcttccggggacgaaggcggggccagcggagggcgactagaggagcggatatggaagcgagcgaaagccggaagcaggcaagggaccgggaggtcccagggcctagggagcggaagaggtcgcggcgacgcggctcacgtggtcagacagtcacgtggcccgagtttctcccgctaagtgggaccagagttcagtgcggctgcgcagtagcgggggtgggcgggagcgcccttccaggagatgggttggctgcagtagtgagaggctgggggtgcggctctttccctgcagtcctgccgaggaagcgtgcgtccctggcgcttccttcttctcttccggcggagaggttagtgtattgccttttctttagcagctcgagtggtccggcttggaggtctgcgccctggctcctggccgcccggaacgtgtacagttacgggttacgccagtgcggctgtgaccctttgcctcttaccgtgatctttggtcagcttagctgggagtaaaaagcactcaattaatgaaccctttttttgagccagtgcaccgcggtaactgtagaaatcgataaaataattttgagtttgaggaattgaacggcatactcccaaagatgagcgccacttagctctcgaatcgtagcctagctgtaatcgattttcttaattggtgtaattgttctctaaaagttgaaatgtgcccgggaactgagtaactgccttgtatttcattttaaaaattcgatcgaatgcctactatgtgctgggcgctattgtcaggagatataataggaaaaaacacaaatccgtatcctcagggagcttccattctggaaggaagacacaaaaatctgccctttcctcttatttttttcctttagctttgtgtctcacgtattttactgatttacctcgttttgtctgtcactcccaatgcaaggttcaaaagattcaaaagataggatttttgtctattttattttcagctgtattgtcagcaactaggacaatacctggcacatgataagaactgagttcgtttgcagtatgaattaataaactaaaaattaaaggtgtgcaagtgatgttaaacaatggagaaatgcaaagtggaggaagataagagaatggatgctggttgtgtttttttttttttttttttttattgatcattcttgggtgtttctcgcagagggggatttggcagggtcataggacaatagtggagggaaggtcagcagataaacaagtgcacaaaggtctctggttttcctaggcagaggaccctgcggccttccgcagtgtttgtgtccctgggtacttgagattagggagtggtgatgactcttaaccagcacgctgccttcaagcatctgtttaacaaagcacatcttgcaccgcccttaatccattcaactctgagtggacacagcacatgtttcagagagcacagggttgggggtaaggtcaccgattagcaggatcccaaggcagaagaatttttcttagtatggaacaaaatgaaaagtctcccatgtctacttctttctacacagacacggcaaccatccgatttctcaatcttttccccccctttcccccctttctattacacaaaaccgccattgtcatcccgtcccgttctcaatgagctgttgagtacacctcccagacggggtggtggccgggcagaggggctcctcacatcccagtaggggcggccgggcagaggcgcccctcacctcccggacggggcggctggccgggcggggggctgacccccccacctccctcccggacggggcggctggccgggcggggggctgaccccccacctccctcccggacggggcggctggccgggcggggggctgacaccccaccttcctcccggacgggggctggcccccccacctccctcccagacggggtggctggccgggcggggggctgacccccacctccctcccggatggggtggctggcctggcgggggctgacccccacctccctcccggatggggtggctgccgggcggagggtctcctcacttctcagatggggcggccgggcagaggcgctcctcacatcccagacggggcggc

SEQ ID NO: 584903 - DNA, 4001 bp, Homo sapiens
actgtgctccagaccaggaatcctaagtgagcagcgtggtctcactatgcggaaacccagctgatcttgtaaacttgttattgccttggccgaaagtggatgtcagagcaaagtccaaatcagctcagaaatacccaagtgatctgcacatcacaagactgcttctgataagatgtgacatttaccggtgacatgtccagcaacagcaacaaagaaccagagaaggctcacaaagctgaccctggaacgggaagtttgcttgccttccccaagcttgctgctgtgtgttgtttactttctaagttgcacggtgacctcatctctatgctgttctctaatttgttcacctggccgcgttactctctaactgctctggtgcctttcatggagataacttcgcggctccccttctccaccccatgattcacacaatagaaacttcacagagagccaacctgctgcacacccacagcagcaccctgagggacagagtgtgtggcacacacacgtggacccacagtcaacaccacagacatccacgtgtcaccagaacacacttgtgcacaccacagaccaacatggactcaagacgccctgtatttctcctgtcccaagtgtaagggaataattatgtgaccaagctcaccgcttgccatcggtcctaactctaaattccatgagaggggacctgagcctgggaggctctcagtgtttgtgaaacaaacaaatgatacacaggcatgtgcaaacccaaaccagctcaccttcatgcagccacacggcgtccagagagccgtttcattgacatgatctcatttcatctttgccaggagcagtgaatcagatgggctaacagtggggcactgaggctccggaccattaagagacacgcccaaggtcacatagccgggaagcagagagctgagactctcccacttctcccgattcaaatcctacattctctattctacaccaaatggcctcatgtaagcatagatacacatgcacgcacttacacatggacttaggggagaaacctgctatttcacactgatggaggtaatcacagtcacatacacacctaccatgacctatgcacatggagtcacacaatcacgtgtgcctaggtatagacacccatgccctccccaccccattctgtcctctatccaagaccacgggcaatgcaacactgtgtgaggagtcggtcaggactgtgggttataatccacctcccagcctctacattcccatccaagagagcagtagaccatgagttattttaataagatttccccattcttggactaacttccaaaaaccttaaaactcatagaaccttaatttaaccataggtcataataacacctctcatttatcagggggttccctcatgtaccttcacataaagtctataacttgacctctaccacatcctgagggaaactagcaggtgagctatgtaatgctgccccatcctacagacaagaaaactgaggcccaaggaagtgaagttccttgctcagggtggcggctaataagcaggattgggacttgaatacagagttttaagtccgagtgagcccagagccctttgagaaacaccccgttgagataatgtcattgaaccttgctccctctttttagagataagaaaactgatcccccacctccacccccattgcctctctgggagggcccagcatgctggaagcagcattgggactggactcttggtttgacacccaggactaaactcttctccggaccccaagatacatacccactgctcccgcccccaaaggagagggtattgttcaaccaaccttggaccacagaaatcgcttctgtcctgaacaccctgggctgggatcttcagacaagaggtctctgtgttaggctctgctccctgtcagctggaagttgtgtccagtgagaagtcagacccagctctcccagggagaagatgccactactttggtgctggcaattttctgagtgtctcagaagatgctttggccgtccatatatacagtatctcccaggaactgagctcatggcagccaatccagagagccatgggctggctcaccttcctccacctgttaccacccatcccaggactgctccccgctcctccaatgataagaggcttagctcagctaccctggaaaaaacagtttcacttgtcaacttccttattgcacccaaaccccagtaagaaaccaaagctcagaaaataacctaaggtctggctggggaaaaccccacctgtagagttgaaaacaagacttaatgggaaatgcaggttagggggagaaagtcgaggtggctttattgcctttacaacatccctcagttatctttgaagattagtggggagggaggtacctagaaagaaaggtcagcgatgggatacatacatcccttgacctggagacaacccagaaggaagagcccacaagagccacgtgttccagatctgctatgcccgggaagggttgccatggatcttgagagaacattctaagaagtcttaaaaagtcagatttccactttctgtaatgccttattttaaaaaatagagtgtaaatacatgtttataatcagaaaagaaaaacatgttttattaaaatgaaagcaaaggccgggcacggtggctcacacctgtaatcccagcaatttgggaggctgaggcaggcggatcacctgaggtcaggagttcgagaccagcctggccaacatggcgaaactccatctctactaaaaatacaaaaattagccaggtatggtggcagacacttgtaatcccagctacttggaaggctgaggcaggaaaatcacttgaacccaggaggcagaagttgtagtgagctgagatcgtgccactgcactccagcctgggtgacagagtgagactctgtctcaaaaaaaaaaaaaaaaaaaaaaagaaaaaaaaagaaaaaaatattaagaaattctgttttggttcattaacacagggaggcatcacaaaatatatatggaagcaccaaactttggagtcagccccatctggagacacctgccagctgtgtaaccacagcaggggacatgatgtcactgagcttgtgctcacttataaaacaagtagtcatctcagagggtagttgggccaaatgcgataatgcttacaaagaaaagaagaaggccaggcatggtggctcacatctgtaatcccagcactgtgggagaccaaggtaggaggattgcttgagcccagaagttcaagaccagcctggacaacatagtgagatcttatctctactaaaaattttaaaaattagccaggcatggtggcacatgcctgtagtctcagctactcaggaggctgaggcaggaggattgcttgagcccaggaggtcaaggctgcagtgagccatgatcgtgctactgcactccagcctaggcaacagagtgagatcctgtctcaaaggaaaaaagaagaaaggaaggaaaggaaggaaaaaaagaaggaaagaaaggaagaaagggagggagggagggaggaaggaaggaaggaaggaaggaaggaaggaaggaaaaagaaagaaagaaagaaacaaagaaagagaaggaaaggaaggaagaaagagaaggaaaggaaggaaggaaatgtatggagtgccagacatctttctttctgtgtattaacagtgcctggtacttgtaagggctcaataaagggccaatgttttattacgggcaacagagttattaatgcttcattcattctgtcaacaggttttggatccagctatgtgacagacactgtctcagcactaaatttagaatttattagtccaagaagtcactcagccttcaaacaaatgttaaataatattacatatttttcatttatttaatgaaactattgtgtcaaccacttcttccaggccctgtgtgtattgtatgtgttctttcttattccaaggtgaatatgcccagcctggcccagccct

SEQ ID NO: 584904 - DNA, 4001 bp, Homo sapiens
acagacctagggcagccataagaaaaaacgtcagctacatctcgagggagtggggtggagtgcgggcgcttgctctagtcgagccctgacatcgattctgcgggggcggggaggagtcggcgcggggctggggctgggaggggagtttatttattagccagattagccagcattaatgggggagcggtggcggccggcggcagcagggacatagctggcatagctggcatagcggcggggcctcctgcggcgcggggctccgcggcttcaaaggggcttaaagaggcccttggtggcactgccacggccccgcgggggagggcgtgggcgcgggcggcgggggagaaggcggccattgtgcaccgagggattagggctctggcctggaaggaattttaaactgccgcgagccggagccccaggactctcctcctgccccacccctgccctccggagcacgctgaggtgtttacctgctttcctatgtctggggtggagggggtgtcctctctcctccctcaaactggaggcacctagggttaccagatctggcaaataaaaacacaagacttccagttaaactggatactttaaatagtgtaagtctgtcccaaatattgtatgggacagacttatgctaaaatattattcgttgtttatctgatattcaatttaattggacgtcttgtattttttttcctggcagcccttgaggcattgaaatctctaatccatgtctggaaacagattgatggttcccgaaagtccagtgggtatgcctcatttgagagatccctaagggcagggtcgtgtctctccccttacactgggagtttcctgaagcccagatactgagtttcaccctaaagaaggcagctctgagagcactatatgtgtcccccgtcagactgggagcttcctgaggacaggggctaaatttcacccatgagagtaacgcttcaaggtcagtgtctgtgacctgtgacactggggtttcctgaggcatggtctgtccgcttcctagagggcaagtctctctcctccctcacgtctcactctcccacccccaccccaccccaggctgctggaggctcctcctccattagtgttgcttcctgcccatagggggtgctaggggcccagcggactggcctacggatggatgggacctgtttattgggactcggggcttcagtccttcggggttgatgcacttgagaataatgagggtggggtccccaacctgtgaggcttgctgaggcagttgagggccaggtctactggggccagaggcggtggccagcatgtgggagaagctctgggtgctgggtacccactgtttcttccaggaagggacagtgtggcccttggtacagaacatcctgcccacctcctctcataaccattgaagccaagccccagtcctccaccagcctctccagaccccactgcctaacctttgcttgtgctgttctttctgccagaaacactctgtcttcctgctttgaggacagctgaagtcttgccacttcttctggatgctctgaccatcagtaaggtgggctgcttgtgcctgggggtcttctggtgaaaagagccctccatctactccctccttcctcaacaactttggccacaggggccaaagagggggccaaggtgggggaggggagagacaggaacattgggggagcataggcagaaggggagtaagaataggaacctccttccccccaacccatccccctgaagccccttcacaagtcccttcatcccctcagggcctctgaactctttctccttgaagctgagggaagccctggagaagcgctttcccacggtcacagcctcaacaaacccctgcccccttctcctttgactgcagccacctcagtctcaccctccgcagaatgcaggcccactccgttgctgaagggcctcctccttgggccagggcgcctgcttctgccagtggcatcatcaccccactcctcagccgccagtcatcaggttggcaattagctacttcctctcagctgcatgaggccaccaaacgtcacagcccctcccctggcctgccgcggcgggagtgctgggggctgcccctaccctttgtagtcagtgccaagtcctggctcagtcccccttccctacaacctactgagtgctagggtaatgagcctcccatctagggagctgaaagcctcgctgccttctccccgcttcaaacctcctcccccatgtcaccctatcccattgggtgaggacactcccgctgcctgggtggggtgatgcctgctcaagggcactagcagcctgggtggggcttaagactcaggtgtctctgtccccagtcacaggcggttttcaccagccccttacctggggcccaggagtctgaactgaagatggtggcagttatttgggaaggggagagaaatggggactcattctacagacccccaaacatgcagggggcaggcccttcatgaacacccacatgggctcatttgcctgtgtctaggcacacacacggttacaatctaggcaatgtatgctccactgcactgtacccacatgtgccccaggtgggcaagtaagcccacttgcccagatacctctcatgcccacacatccctcctccaggtgtgtgcatgcaaactcactgacatacagtactcaaaaaggcagtgagcttgctgccacaccaaaaacaaaaccgggaccctacagaggaatctagaagcatgggagggaaggagagaccaccccaacactcgctaccccacagaccagggaatcttcctggggaaggatgggaggaagtctgcacttcagggatatgtgtggggtacgcaggtgggccgtggtggaagcagttgtgttggagtctgggttgggggtggaggatgtggatttccagagagaattgaaaaattccaacacatataaacaaaggcatgtgatcttaggcagatcacttaacttcttgggggccccagtgactgcatctgtaaaatgggaataatgagaacaccatttaaacttggttgtcaaatttattttatttttatttatttatttatttttagagacacggtctgactttgttaccccggctggagtgcagtggtgcaatcatggctcactgcagccttaacctcctgggctcaagtgatcctctcgccaaggctaggataagtagctaggactacagatgcgccccatcacgcccagctaattttacaacttctgtagagatggagtgttgctgggttgcccaggctggtcttgaattcctgggctcaagcgatcctcctgtgtccggaattggtgggttcttggtctcactgacttcaagaatgaagccgcggaccctcgcggtgagtgttacagttcttaaagacagcgtgtccagagtttgttccttctgatgttcagatgtgttcagagtttcttccttctggtgggttcgtggtctcgctggcttaggggtgaagctgcagaccttcgcggtgagtgttacagttcttagggcggcgcgtctggagttgtctgttcctcccggtgggctcgtagtctcgctggcttcaggagtgaagctgcagaccttcgcggtgagtgttacagctcataaaggcagcgtggacctacagagtgagcagtagcaagatttattgcaaagagcaaaagaacaaagcttccacagcgtggaaagggatcccagcgggttgccactgcgggctggggcagcctgcttttattctcttatctggccccacccacatcctgctgattggtagagcccagtggtctgttttgacagggtgctgattggtgcgtttacaatccgagctagacacaaaggttcaccatgtccccactagattagctagatacagagtgttgacacaaaggttctccaagtccccaccagagtagctagatacagtgtcgattggtgcattcacagtgctgattggtgtgtttacaaaccttga

SEQ ID NO: 584905 - DNA, 4001 bp, Homo sapiens
cagaagcattgccttttgtcctactggtagtgacatagaccaataacagggcatctggggattttaatcctgaaaacagtgagtctgatactgcttgtgtttttcatcagtgtccaccccaagtgggtcttcctgctattctcttcacttagttgcccctcacttgccatctgagcaattggcaaggatgtgccaggcctaggttaaacttggaaacatgcttgaccattctattccctggtcctttaagatcagtttggctgcaattttggctccttggaccctcaagcatagctggtaaatcaagttagagatgtaactgccttaaaacatgccagcttaggctgggcacggtggctcacacctgtaatctcaacacttcaggaggctgaggcaggcagatcacttgaggtcaggagttcgagaccagcctgaccaacatggagaaattctgtccctactgaaaatacaaaattagccggatgtggtggtgcatgcctgtaatcccagctacttgggaggctgaggcaagagaattgcttgaacccagggaggcagaggttgcagtgagccgagatcacaccattgcactccaccttgggcaacaaaagcaaaactctgtctcaaaaaaaaaaaaaaaaaaagtgccagcgtatgaggtaattagattggttctctccagaggtaacctgccaagaagagatgctatagatgttactcctatactgtaaaacattgtgaaatcagattactttaaaatgatgtattacaaagttatgcaaaaaagcagttgtgactatggaagcccaaggcttatatcccagctctgtcttacactaaatatgggtacagtgtttccactctgtccataaaatgggagctaatattctccaacctgtgtgcctgacatgatggttaaagggattaaacaaaacaatagtttgtaatttattctgtcagagcaaactgctggtaaataaaagggactaagttgacgaaaaataaattttaaaaaacctaataaaacaagtttgtaatttataattgtatacaaataaaagatgttacaaaaattgcgcacttatatgtatgtaccatgacataactaattcgttgaacaagttgtgagacaatcctttctgagaaaaggtagacctgttacatcgtctgtgggttagggtcatgtcagcacgtaccaggtacattctagcttttgtagagaaagtaaaatctagtgttgagtatgtaggcactgagccaggtggcctgcttaacataaaaggactgatttcagggtggctgtgggagcctttctaatgctctaattctctagccccttgcctgatccagctgattccaagagccaagattttagtctttcttggttggcttttttaaatgctttgggctttcctttaatgtatcttcaaaatcattctggggccaagttacatcataaaacattttattacatataaggactgaaacaggatttttcttaactgtaacatggtccacaaatgtaaatgcaaaacccccatggtggttgcaggagcaagtctagttgagacaggtcaggacgaaagcataaaagatgagtaactgaatggcatcccgggtcctgtagccacgccctccagatcgccgccgcaaaggacctggaacctcaggggcccactgtatgccatgaagaaggcgcagtcgctgcctcaaccaagccaggctccgccggggccgttcctatcctgagggtcggagggggaagggactcagccaaagccgcggcctcccagggcttgggcctccgcggcagccgggacgctgtgggttcgccgtggatcgccgcgatgtggcgtttctccaggcccgggagttcctggccctgctggaccagctgcaggagctgcgccagggtaaccgaagctgaggcagaggccggggccgagcattggggactgcggggacgctccatgtcgggtcgcgaatcctgaccggcgtgtaatgcagagaagcgagcacttccgggccgaatgggtgcaaccaccatgggggaggtggggaaaggaaagggaggctgtagaccgtaccaagccggcccagaactgggggagcacttgacaactctgaccagctccctgcagaaacgctttagaagcgtccacgatttagccaaacccagagtgcccaacggacgcgccaaagaagaaaaacggacggacgtgccaaaacttgaaggctagcacaggacagaacaagcctgcggacgcgccgctgcgggcaaaaagacccatacatacataagcaccgcgcacatgcccattttcatgcacacccccgggcgcgcgtacaaggattcagatacaacgcatggcgggggataatccccatactaggctccgcagcacgggacaaagcataactgtagagttgttcccagaggcctcaggagtgacaccgccaccaagccacgctactctcttagttgttattattgttttgtgttgttttagacggagtctcactctgttgcccaggccggagtgcagcgatgcgatctcagcgcactgcaacctccgcctcctggttcaagcgatccacagggtccctagtgcctcagcctccctagtagctggtgtatgccaccaagcccagctaatttttgtatttttagtagaaacagggtttcaccatgttggctaggctagtctcgaactcctgaccttaagtgatgcacccgcctcagctttccaaagtgcggggattacaggtgtgagccaccgcacccagccagagcctcaccactttcttcacacttcctgccatccttcaattcttggtggtcccagagaagatcgaaggtgaaagcaggtcagatgtgctacagctgctctgactgctcggaaagtcaggtttttaaattatcaaaagtggccgggcacggtggctcacacttgtaatcccagcactttgggaggtggaggcaggtggatctcaaggtcaggagtttgagaccagcctgaccaacatggggcaacccccgtctctactaaaaatacaaaaattagctgggtgtggtggcatgcacctgtaatcccagctactcaggaggctgaggcaggagaatcgcttgaacctgggaggcagaagttgcagtgagctgagattgcagcactgcactctaccctcggtgacacagcaaaactctgtctcaaaaaaaaaaaaaaaaagtatcaaaagctagactgatctggtgaacatcaccttaatcaaagaatcaaagcttaatggccaggcgtggtggctcacacctgtaatcccagcactttgggaggctgaggtgggcaggtcacctgagatcaggagtttgagaccagcctggccaacatggcgaaaccccatctctactaaaaatacaaaaaaattagccaggcatagtggtgcgcacctgtaatcccacctacttgggaggctgaggcagaagaattgcttgaacctaggaggcagggaggttgcagtgagatgagatcacaccactgcactccagcctgggcaacagagtgagactcagtctcaaaaaaaaaaaaaaaaaaaaagcttaataggacaaactggccttgtgtgccttctgatgtgatgcactgggaaggacacacacacggggagtacatttctgtagtagtcctccccaaaatgcccaaaaaatgttcactcaccacctagtcttgaggaaatagagatcaaagtgagagagattctgcaaaatgattggtctggacactttacagatgtcgttgttataaaacattaagaaaaagctaagaactaccccagattaaaggagacataaaaaataaatacaggccagacacagtggctcatgcctttaatcccagcactttgggaggctgaggtcggtggattgcttgaactcaggaattcaagaccagcctgggcaatatagcaaaaccccatctctactaaaaaatacaaaaaaaaaaaat

SEQ ID NO: 584906 - DNA, 4001 bp, Homo sapiens
gttagttttataaaagcagtctggtccccaagcaaggagggagtttgtttcagggaagagtctaggtaatcatctttgtttcatagttaaactatgaactaaattcttcccaaagttagtttggcctatgcccaggaatgaacaagggcagcttagaggttagaagcaagatggcgtcagtgaggtcagctttctttcgctgtcagatttttctcactgtcatcatttttgcaaaggtggtttcattcatattccgcattgtatctaactgcgtgctttaacatctttatttcctaatgggaaagaatacactcatgagcaagctcaatgggctctctctacgaggtaattttaaacagcatttcttttctgaagtttgattattgcagttaactgtatgaaaatctatacagaactcttcaactacaaaggaaaacatcgatttttattgtttatttcagttttccagggtaatacacagagagctgcaacatgtaactggatttagagaaactaattcctatgaaaaccaattaggaaatacagcacctctgcaaaattctctgtccatccagaccaattctcagcagccaacatttgcaaatgatattttagagcactgtggtctttaagctccttgacgcaagacaagttattgcatgtcatgacagagagaacgtaacaagtccaaaatttaaggaggaggtagctgtttgtttcacttttgatagtagactcgaatctgccttcaaaaaaactaatgagaataggaataaattgcagacttttggctcttttctggctgacagggtttaagtaacaccaacatgccacactctggagcagcaggatctttatttttggtgccaactcctcatcttgcaacaagtgagccacttcttccatgtactcagctgcaaagttcccagcaggtggtcctcctgtaaaacaagcatttgcatttccagaagtatttggtgtatctattagctagtaacactttggaatgcttatatgttcatattcttgttgccctgtagaggatactttggatactttgaattttcctgtcgttttcccccacctcccacgctgctgccatgaagaccagaaagtgtgtgttgataagcaagcagtgatatgaaaaacctgggaaggtctctgcttgctggtctcctccctggttcctttaagcaagcacccaggagtgagtatttctttctttccttttttttttgagacggagttttgctctttttgcccaggctggagtgcaatggcacgatctcagctcactgcaacctctgcctcccgggttcaagcgattctcctacctcagcctctcgagtagctggtattacaggcatgcaccaccatgcccagctaattttttgtatttttagtagagacggggtttcaccatgttgatcagctggtcttgaactccagacctcaggtgattcacccaccttggcctcacaaagtgctgggattacaggcgtgagccaccgtgcctggccaagagtgagtatttcaaggtgaataaaacctggttgtgttcgcttagcaaatatccctcatccaatgaaatgttatcagaattttaagattacagctaagaaaaattactaaactacagtgttataaaatgagtgtcgtgaaacactcattttagcacagccatttagatcagtacctgtgaaggccagcagtccaattttctgggcagcttgagctctcttctcaatgggtagagattcattcatcaacacttggccaagtacaacaattttttcctcatgaaaataagtctcagctgaagggatttttttttccttcttcttaacaaaaaagcccttaacagtgacacgccagaatttctggagacgccgacacagccccgcaaaatacccatacatcttaacccaaatttgcgtacaagaaaatcggctgttagccattgtgtaaaaaggccagtggtccttcaggtacaccactggcagtcacaggagttcacagtcaagaactctggaatgcatcacttagcaacactgtggaatggaatatacaaaccaggggaaagcaatatatgcctaaattcttcagcttgtcattgaaagccttctactatttggactaaacaattttactttcatttctctggtgtacaaaacctcaacttaaacttgtttcccgtaatgcgcatgaatctcactactgtctttgaacctttgctcaggcagggtatatttggaacttgcccgttctagtctgattattcccacatgtactttgcttctttccattgatctttcatagtattgttacctcttttgcttgtttgctacccaaagagagttctctacatcatagatttatcttattttgctgagaaaatagaagcaatgaaaagagaacttgcataactcttaccagtgcatccacccacctatctgcgtctacggtacccatagactctgtctttcctcctgttactgtggataccctctctgtttgtgcagtagatgtcaatcagctcctctcacctcactcaaggatgttgctcttcggttcttctcttatcttggtaatttttccatctcaactggaccctttgcattatcaacaaacacgctgtgctttttttctcattaaagaaagaaaactctcttgacttcatatgctttcttcccacagcgactgcacattcacttccctgctctcctttacagtacagctctttaaagagctgctatactcaccatctccagtctttctcattctttcttggatgaattccaaacaagatttcaaccccatgactccactgacattgcctgtcagggtcattgaattgtcagtctttgacatttgacactcctttctctctgaaacacttttcacccagcttctaagataccacactcctaatttttctcctcctggccactcatcattttcctttactggttcctcttcttatgacctctaaatattggagggcccaaggctcatcagtctttgtatgtgttcttcttttcttttcttttctttttctttttctttttttttttttttgagtcatggtctgtctgtgtcccccaggctggagtgcagtggcatgatcttggcccactgtagcctcgacctcctggactcaggtgatccccccacctcagccttctgagtatctgggaccacaggtgcacactaccatgcccagctaaattttttgtagggatgaggttttgccatgttgcccaggctggtcttgaactcctgggctcaaacaatccaccaacctaggcttcctaaatgctgggattacaggcgtaagccaccatgcccggtccttttttctttatctatacttcctagataagatcaagcagtttatggctttaactattacccatatgctgaagactcccagttatatatattatatattatatatatattaattatatgtatatataattttttttgagacatgttcccctgttgcccaggctggagtgcagtggcccaatcatagctcattgcagccttgatctcctgggctcaagtgatcctcctgcctcaacttcctgagtagcagggactgtaggccaccacacctagcaaatttttaatttttttttttttaagaaatgggggtctcactatgttgtccaggctgttttgaactcctagcttcaagcaatcctcccacctttgcctcccaaagtgctgtgattataggcatgagccactacgcctgctccaattttatatctttaactggatttctcacctgaactccagactcgtattcagtcacaagcttgatatccccatttgaatgtccaagacgcttttcagttttaacatgtccaaaacagagttccaggtcttcctccctagactggctgcctctcagtttctatatcttggaagatggtattacatccttctagttgttcaggtaaaaaattctagattcatccttggcttctatc

SEQ ID NO: 584907 - DNA, 4001 bp, Homo sapiens
aaaaaaaaaaaaaaggagctagggcttgattgggtatagagaggacactggtggtgagggagacatggaggttataggagagatgggagtaagtttagaagtaagaccagtggcagagacagcctggaacccaggtctcccaactcccagtctagcacttatttctataccatggtgccttcctcttccaggtgaggaaccaaggaggggagagggattatggggagctgggatcccctagcttgggaggtttggagtaagggcttcccttcaaactacaactgcatagatggtggaggcatcagcagggtccgctgtggacagccggcggggcctgctgagggctagatggtccagatccgcatagagcaggctctggaggaggaaggggaggaagacaagatggtctccacagtcttccttggggttcaggcctttttttttttggtccattttcctcagagattctggctatccccttcccatccccatgcccttaccggttcctggtccaggtcccctggaatcttgggctcttcctcctttactggcctctggggctcggttttcacaagtggagctatgtgggggggacagagctgaaggatggagagaaggtgaccaacgtgtctgctcccagcaagggctcagactcaggaattgaggggtggggagtgggcatgtaggagaaagaaaatggggtggaattagtctcaccaaatctagggagtggtcgaatcggttgcgggggcaggcgcctgtaagggacatatgagtctttgagaaccaccagtcttgtctcactggttctcctgggactcgccacgccaaggacagcccagcaacttgaaggctcagaccggaaacaacttagactctaccccaccgacagtccagcccaggctctaactctgctgcacttccagctcatctgctctggtggggctctactcaccagtcagcggcctcgctcccacctttgacctctcccattcttcgccaagccaggaccagagctctaggtctagctctttcttttgcgaaggttctggtcctgccccttccacctctggtcactccccatttaacgaggccgggtccctcctgctcacctgtgcagccaccagaccaggcccaaagctcccagtccgagcaccaacccagcgcccagcagcgggatcaggagctggggatacacggaccctgggggaaaggcgtggcggggagggatgctgaggtcaggggtttgacgagggacagccagcagtcccgctcaagaacccccagccaaggccctcttccctcctccgggtatgtgtcggagttaagtacccttgtgcgcacaggcctgcacctaccatgggtaggcccgggggccttgcaataggtcctgtcccccagcacgtgaagcactgtacggctctcgtcctcgtggcggcccttgcagaaaaaagtgcccgagtcccccgcgctcaagaggagctccagccgccggataccagagtccagggagcgtaggcggccgacgaaaggctggaggggaggcacggtgggggtcccgctcgaagaggcccacaggatcggtcggcgtcctttggacaggcccttgcaggccgggaagctgggtgcccagacccagcggatgggatgagagactcctccgcaggagagattcacccggtccccagggcggccgtccagagaagctaggagaggccggaggctgtggttagggcacgtccacagggcaagacgaccctccatcccgtctcctctttctcttctctgttctgcactccagccatcctggatcttcccacacacaacccaccctactaggcggcccttatcttgcttcagcccctctgcgtctatcacaactctcccagggatcgcttacccccagggttcccttgggccctcgagagcagcagcggtagcagctgcagaaacacagccatggttaggatgtggtgaggagaagctgcgagcgaatcagcggcgtggggccggttggggggggaccggagggaagttaggcgtggggagaacggaggggctggggggctccgataagagagggggcggggccaccagctgcccagatccctttgggaatcctcgcaggcaaactcggagtcttcaaatggttctcacttaaaatgtgtgctcgggccatttacacaaatgctttggcctgcttaacttttcaggtgcgcctgtaatcccagctacttaggaggctgaggagggaggatcgcttgagctcaggaggtcgaggttgcagtgaactgtgatcaggccattgcactccagcctgggcgacagagccagccagaccctgtctcaaaaacaacaacaaaaaaaactcctgttttgtaggggattgtgataacgaaataaagtaatacatgtaaactgcttagaatacataggatcactatgtaagtgcttgccattattattactatttctattcttttttttttttttttttttgagtcagagtcttgctctgtggccaggctggagtgcaatctcgactcactgcagcctccggctcctggattcaagtgagtctcctgtctcagcctcctgagtagctggaactacaggtgcatgccaccacacctgactaatttttgtattttcagtagagatggggtttcaccatgttggccaggatggtctcgatctcttgaccttgtgatccacccacctcggcctcccaaagtgctgagattacaggtgtgagccaccacacccggcctactatttctattcttattttagcttctacctcacctctctgtgcccatgctgttcctcctggcttggtaccctgcccaagttggcaggttttgactggggaggtgctttggagcaggtgcacacagccacacctaggacaattgctgctgctggactggagcaacaaggccacaccaagcgcaagtggagcacgggtgacatcctgagaaccttcatgggagcctgaggcagccctacttagcagacctgtggtggctctcctggatgagtagccccagcccctgcctctgctgctgtggcatcacagaagccatcagtgagtcacttattgctgagcaggcattggaaagaccgagtgggggctgaatggagattaatttgacccattcctcccccaatttccaccagcatgcccctatcaatgcccagcagggacccagggacccaaattcagcaattaatttgggccacatccttttgtccattttccaggaaccagcagaagctgccaccatggacactgtaaatcacagaggcctttgatgatgctcattcagaggactgagcagcaggactcttagctggggaccaggaagggcatcttggcctgaaaccaagaaccacaatggcattggccactagtggcacctgccttcccccatccctctctcccatccctactccccactcagtcctgctcagtgccttcccaccccttgtcttttctctggtcagctgcgtagtaagtgagaagggaggggctaccagaggcagggaagggaggagcctttgggtttataaattccaaaaaggccactcaactcctagagctggatccttgaaaatctactctatcagctgctgtggttgccaccattctcaggaccctcgccatgaaagcccttatgctgctcaccctgtctgttctgctctgctgggtctcaggtgagcacctgggggccccaaagacctggtttgcctggtcaggacctttacaccctgctctacccacttcccggccctacccaccactcgggatcccaacacccccagccccaactggctcagctctcctgtgccaccaagaccaggcttccctatgacagcctccttgctctatttctcaaaaagccaggtctccatccatcctccccacctccaagaaagacccatttctctcacctgccagggctctgggtcccctgttccccactccaaggtgtctcctc

SEQ ID NO: 584908 - DNA, 4001 bp, Homo sapiens
ttttttttttgcttttaaaaagtggaggtggaaaaaaaaaaaaaactgaaggtgggagaaaagtaaaagcaaaaataacagctggtgaatccaagagcagtgccctcactgtccataaacacaaacaccctaaatagttctgttctctcctgtgtatgaaggggggccctgcaccctcgtactcgggtttcttccccatccctgaggtccctatgcttacaatttgggtcatgcctcacacttttctcctaaagcccacactctcttcaccctttgcccccaccccacggtcacagcccctttcccgggtctcccctctgctcctcaccttccctctccaacccctcactctcccagtcagtggccgcctcatccccattgggctcccggaggctgacagccagcaccaaggcctgcaggagaccaaagaggcaggcgaagtgcaaagggtgggcagtaagtaggctcagaacagcatggagcccatgcagggcagccaggaaggacagtaggccatgtagccagaggcccagcggtccacgcaggcccagtgtgtccaaggctgcccgcagtggtcgtgagcacagggccagcagggcagaggccagcagctccagaagatgcagggtcaggttggtggagatctgcagacactcttctgggccccccaagtaccgggagggagctcctggttccccccgcagccagcccaacagcttctcacgcctaccaggtttctccaatggggctcctggcccagggacgctcagtcccccttcaggggacacccctggtctcctggtgccacctgaatccacatgatcccatctgagtttgggactggcccctccagcctccagtctcccagactcttgagtgctagagataggctggtcccacttgagggaatccattcttttgctccctagctgctcaacttggggctcctccttgcttggttcggaagcagccccagaaaccctcaatgcccccgagtccttagtcttgggatgccccacatcttccatggtttctggggcactatcccagtcacttcctgaattctccgaggagctgtccacccgtctgggttctgggtaaggcgggtcaggcctcattggtttccggcggccccaagggcgaggtagccagccaccaagccgtcgcaggaacatggctggggtgtgtaatgggcccccaaattctgaggctgcttcctggcactactcagactctcaggatctcctcagaagccagagtctttctggctcagaacaggtatttgcctggtgatgcagtcctactctgaattcagaagtggctcctcccttctctgaatagtcatgcagcctcaagtgtggcaagtagtttgcttcctcttcagttctggggtaaaggggggcatacccaaattcattcaccatccacacccccacaatctgagattccaagaatctcagatctgacaaggcctgggtcaccaccagagagtcctctctgcgtttccggatttccttcccagcaggcagcaccccaagtttcactcaccaaggccacaccccaaggtgtcccagaaactggggaggcagtgctccatccaataaagcgggcaggaaggtggccccaggtcctaggtgctcctggatcgtgtagtctttaactgctgccccaagggacctcaaggaataggaattctctttgttaggaggtggaatgaaagtgtccagcaaactccagccagcagcgttcgtcccttgatttagagggctatgatttctacaaagtggcccgactggcccgcgaacacgcagcagagacgcggcctccacaaggtcagaactaagatgtcctcagagatccccagttacgaagcaaagcgcgggcctacttcgggacctacgcgtccgggcgctgtgcgcggggaccgctcccgggcccagcgtcggggccgcggccttggggagccgccgggagccgcgaagcccggaagcagctgcaccaggactggaaggacccgcgggggcggtgccgcagctcatggggcggaccctgcgaatagaccgcccccgtataccccgcgctgtctgtgcgcgccggaccgccaaaccgagattagcaaggaccaggaccttaatataaacccagctccccattttcccgggtttctcatgcttccctaaactcggtcgccccctacagccccctgcccctgggttcttttccacatcccccaccactcctccatttcgcatccaagacttcatgaaaggctttcccagaaaagaaaaaatgaggagtcttgcgacttgaacagccctcccctgcccgtctgcaaatttgaattcctggatttcacaacagtgagctcttcttgtgcctaccacccggcatgagcaagacaagggggtgggtggtgggagagtggggaagtgtgggaaagaaaagtgtagacaaatgggtggaacaaagaagtttaaagtttagatttgggggctagagttctggtcccagttcaactaagtgtacaagcttgataatcgtgggccttcctatcacactggcctcttccagcaaaaccctacccattctcatctctagaggccttgacttcccttatcaccctgcattataatatttgataacatgggccgggagtggtggctcatgcctgcaaccccagcactttgggaagccgaggccggcggatcacctgaggtcgggagttcaagaccagcttggccaacatggagaaaccccgtctctactaaaaatacaaaattagctgggcgtggtggggcatgcctgtaatcccagctactggggaggctgaggcaggagaatcccttgaactcggggggcagaggttgtggtgagccgagatcatgccattgcactccagcctgggcaatgagagcgaaactgcatctcaaaaaaaaaagaaaaaaattgataacatggcactttccctctccagctgtgaactctttgagggttgggaatgtctttacctgtattcttggcacatagtatatggacttatgtttgtgaaatcagtgaattggctgtagtcagggaactcctcctgggggaagtgagacttgcacgaagctgggcaattcttggtccaggggggttgaaagaataggtgggggactcccaggagggtctgggacctgaaagtgaacccagattggcagggaggtgaccttatcatgccacctggagaggctgccccttctgactcaggtgggacttgcatgtggctcccaggcttctgtttggcttcctcaaaatagcttccagaaaagtgaataaaccacaaatggttgatttatttctgactctcagcccgtctctcacgaagacagagcctattgaccaaaaacttcaggatctgcatctgagcagatcccaggaaggggaagtcaaagggcccaggtcagaggcccaagttcagacttcagcagcagactagggtcagactttaccaaagtcagaactcgaggttcatgtaagtccttagatcccgctcccaagccctgtctttctcctccctccttctctcctccctccagctcagtgtggccacccgagggggtctctccctcccagccacagctcgggtatcccaagctgggaaatgtgtcactcggggctggggtgctgatctgtagcctagtccttcctggtccctcttgaggacagtggggatgggattggcacggccctcaccccggggtcccagccccattcctggctcccagccccccctcagcagcagtttgaagcccgggctggagatgggcaccccaagtggaaggttgggaggctgaggaccctgcgacagtgacagcaggtgagcagtggatgtgcggtggttggaatcttggaagtgggtgtcacagttctcgcagtactggagggagggagtaggagacctgcagagaaagaagaaaaagcattaagggcaggggaaggaaaaggggaagagttgaggcctc

SEQ ID NO: 584909 - DNA, 4001 bp, Homo sapiens
tccactgggaggccccagtgtactcctattttgcagtagaaatgaggggaggagtcaggttacccagcctttaacaaaaatacggggatttattaaaacgtaaaaatacaggccgggcaaagtggctcacgcctgtaatcccggcactttgggaggccgaagggcgtggatcaactgaggtcaggagtttgagaccagcctgaccaacatgagtgagactcatgtccccccgccccctaaaaaagtaaaaatagaatagtcacaaggaaaatgatgtaaactaaaaagagtaagactgtccccccgccccccaaaaaagtaaaaatagtcacaaggaaaatgatgtaaaccaaaaagtaatctctagaaagtcaccaacaccagacgcagcaactcacccctgtaattccagcactttgggagactgaggcaggaggactgcttgagcccaggagtagagaccagcctggacaacatggcaaaagcccgcttctgtaaaaaaactaaaaattagccaggcgtggtggtagcacgtgcctgcagtcccaggaagctgaggtggaaagaccacttgagccctgacggtggatgttgcagggagatcctggcattgcgccctgtctcaaaaacaaaatagcaaaaacaaacaaatggaagtcaccacctgtggtacatggattatagctcaaaaaagaaaaagtggccgggcacagcggctcacgaggtcaggagatggagaccatcctggccaacatggtgaaaccccttctactaaaaacagaaaaattagccgagtgtggtggcgcgggcctgtagtcccagctaatcggcaggctgaggcaggacaatcgattgaacccgggaggcagaggttgcagggagatcgtaccattgccagcccgggcaacaagatcaagactccatctcaaaaaaaaaaaaaaaaaaaggaaaaaattggctaaggtgggagaatcggttaaacccgggagttgaaggccgcactgaattgtgttcttgccactgcattccagccagggtgacagggaggctgtcttaaaaaaaaaaaaaaaaaaaggccgggcgcggtggctcacgcctgtaatcccagcactttgggaggccgagaggggcggatcacgaggtcagcagatcgagaccatcctggctaacacagtgaaaccccttatctattaaaaaatacaaaaaattagccaggcttggtggcatgcgcctgtaatcccagctaatcgggaggctgaggcaggagaatcgcttgatcccagaaggcgcaggttgcagtgagatcgtgccaccgcacttcagcctgggtgacaaggcgagactgtctcaaaaaaaaaaaaaaaaaaaagggcagggaggcgcataatgcccatgaacgaaagcttgcttgggaacaaagctttccgaagaggcattcaaaaggctctcgcacctaatactcacctttactcaaggataacacggcgatgaacgtcttacaactcctaacggggaaatgaaacagaacaaaagattaggaatcttggccatgaactcgttgagcctgagaaatgctggaccgagggggcggtcagagcgctgcggtgatggcatcagcgacacactcaagagttacctggggtcatcatcactcccttcctatccccgggcgaccgccacccccattttgcaatcactcgcccaaccccactcacagttgttttgagtcagcaggggctgtggggccgctagccgagttccccctgccacgagctaggtcagttccaagcaaagacaccagaaactccagtgtgcaacggtagttcacccaactgcactggggaccgccctctcctaccccagccaggccgcgacgtggccgcccgccggctgctgcgcaaaggcagcgcaagccgttgggatcccctgctccccctcactcaacagtcgggccattacaactctcatactgccaacccacgagcccacttcgcaaaaagaactaaaatggcgaggccggggccatttatggcggcgccgggttgggggcctgacgggtatagttgttttcttatctgcctggctagacgcgcggcattttccccattgtttgtccacacagaaataaaacaaagtgaaagaaagaccaggaaagtatgtttcacactcctctgggcaaatattcggagatgctttctgaattttgaaaaacaaaaaacagggatctgtctggccaggcggaagaaagtccccggcgccggccggccagcgccagccgggtgctgctcctaagccgtttcccagcagcccatggtccgttaatgaccctgggactcttcccgcgcgcgcgcgggcgcgcgcagctgcgccagtttagcgtccagctaccctgacacttcgcactccgttcccccagcgaaatctgaatttgcctcccagttcgatcccgcagactgtcaggcaccctaaccttcaattaaacaaaacaaaacaaaaaccaaaaacccaaaaggcaggtcggacgtaataggtcacgcctgtaatctcaacactttggacaggcccaggcagaggatcatttgaggcccggagttcgggaccagcctgggcaaatagtgacacccaacccccgtctctatttatttaaaaattaggccgggcgcggtggctcacgcctgtaatcccagcactttgagaggccgaggcaggtggatcacgaggtcaggagatcgagaccatcctggctaacacggtgaaaccccgtctctactaaaaaaaaattagcagagtgtggtggcggcgcctgtagtcccagctactcgggaggctgaggcaggaaaatggcgtgaacccaggacgccgagcttgcagtgagccgagattgcgccactgcactccagcctgggcgacagggcgagactctgtctcaaaaaaaaaaaaattattgaaactcataagtcatttcaaatcctttctggaccctttcctatcgcccccatttataaacgcgtatgatgtttggtgatgtgtgttgtgtgtgttggtatctttttcttttttgagacggagtctgactctgttgcccaggctggagagcagtggcgggatctcggctcactgcaacctccgcttcctcggttcaagcgattttcctgcctcagcctccgaagtagcaaggattacaggtgcacacaaccatgcctggctaatttttatatttttagtagagtcagggtttcaccatgtaagccaggctggtctcgaactcctgacttcaggtgatttgcctgcctaggcctccacaaagtgccaggattataggtgtgagccaccgagcctggcctcttcctttttttttttttctttttctttttttttttttttgagatagggtcttgctctgttacccagattggagtgcagtggcatgatctcggcttactacaacctctgcctcccgggttcaagtgattctcttgcctcagcctcctgagtagctgagattacaggcatctgccaccacacccagttaattttatatatttttagtagagacaggggttttcaccatgttggcccaggctggttttgaactggtgaacctcagtgatcctcccacctcggcctcccaaagtgctgggattacaggcgtgagccaccgtggccagcccagttcagtggttttctccacattggctgcaaattacaaacacctgggcagctttaaatgtctacactgccctctttgagattctgaattggcctgagagaggcctggcatctgtatttttttagcatcccttaatcgttttattgttccattacggtggagagccatggctcaaagctaaagtatttgttccctctactgcctggcaagtatataaaaaaaagattagctatgggtggtggcatacacgtgtagtcccagctaatcaggaggctaaggatcaattgagcccaggaggtcgaggctgccatgaaccgtgatcataccactg

SEQ ID NO: 584910 - DNA, 4001 bp, Homo sapiens
atttttgtatttttagtagagacggggtttcaccatgttggccaggatggtctcgatctcttgatctcgtcaaagtgctgggattacaggcatgcgtgagccactgcgtctggccattttattttattttttgagacagagtcctgacctcaagcaatccgcctgcctaggcctcgcaaagtgctgggattacaggagtgagccaccgtgcccagccaagaaagattttggaagagtgaatgaatacaaggatttccactagactgagaattagtttgtcaacagcatttcagtgtcttgagaagtgtttacatttggcgtggacaaagctggcagatgacgtagaaagtaaaaagttgcctcttcaaagtttcccttcttgttaaagaataaatcataaatgttagaaacaatagtttcttttaaagactaacttacttcaagcctccttgctttgtgctaataactctgttaagccctattgtatgtaactgcgggacatgctcacaggcccaggcacgttccagctcacagcctgtttagcaaatcgggtatcagtttaagattatgaggtccagccccagccaacggatgcaggacacagcagtaaggacaacccaaaggcgtaagggacaaatatgtctgcttttcctttgttcaggagtgctctcaccatcgttccatctgcaattgagcaccctttctgcataaagtaaaaattgccttgctgagagatcttttgtctccatgctgacttttcttcgtgtcaccaattatctatttctaacaataacaaggtcttttctgcactgcagtgacaaccaaagcatcccaaatgaaatcatttctgcaagacccaaactagcctctattaacacgtactaacaattcagaacaccagagaagaaaagttattggaaacaaaagggtctaagcgctgaagcactgtatcgcacttgaaatggaggctgaagatttgagaaggatggactatgcatcttgtttaccaaatgacctactacggtgtttatgagaactatacgaaccaagatttactctgttgggagcttgtaggaaagctgtaatgtctaagacatacctgaatctctaaaccttattaaataaaactttttttttctttgaaagggggcctggctcgtcccccagactggaatgcagtggagcgatctcggctcactgcagcctcgacctcctgggctcaagcaatcctcccacctcagccttccgagttgctgaggccacaggcgggcgtcgccatgctgggctaatttataacatttttgtagagacggcatcaaaatatgttgctcaggctcactttgttttcccaactctcaaatgaaggctctggccgggcgctgtggctcacgcctgcaatcccagcaactttgggaggtcgaggcaagcggatcacctgcggtcgggagttcaaaaccagcctagccaacatggagaaaccctgtctctactaaaaaatacaaaattagccaggcgtggtggcgtatgcctgtaatcccagctactcgggaggctgaggcaggagaattgcttgaacccgggaggcagaggttgcggtgagccgaaatcgcgccaccggactccagcctgggcaaaaagagcgaaactccgtctcaaaaaaaaaaaaaaaaaaatgaaggctcactgctccctccccaggaggtgccgcaaccttggccaatacagccccagagttagacaagcagacagagaaagtgtgcagggctggggttctggcccgggcagacgggaacgcggacacatctagcactccgagtccgtcaaggcagcgcgagcgctgcgccgctggaacaagtcaccgcgaaccctaatcccacccctccttaccctattaacgacagaaagcctcgttccgctggtccctgaacaaaaactcctaccctactagtacacagcccacaacaatgcacgctgccggcgctacagcccctaagcaaccggccggaagtcggccccacctcctcctgatgtcacggaaatgaagggcttcgcagaggatgtcccgcccgctcccttcagacgggcgtagctggcaccttcctgagatatgcctgcttgcccccgatttttttctccttgcagtgagaacctcctcatgtggcatctttacttattctcttcttggaaaatccatgtgacctccccgcgcttaaagtgtttccacgttacaggcgacttaaaggcagccctggagcctgacgtataattcgagcgccgatgcagaaaggagtcaggtgtttttttttttttttttttggtttccggttctgtcacctccaggctgagccgggctggcggaagaggcacgtgcgctgctgaatggagctggtcgctggttgctacgagcaggtcctctttgggttcgctgtacacccggagcccgaggcttgcggcgaccacgaggtgagataccgcgtagttagagacagtcggaggcggggccgggaaggtcgggtttggttcctacacagcagaggtgaacattggagcgcctgctgttcactggatgatttgatgaatcaaacctaagagacttaagagaaaagctaaccttttaaaccgtagaatggacattttatcaaaatgaggcaatatctgccttttctagtagacaaaaggtccacgggacacaaaggaaaccggcatttctgcatacggacaaatgagtcgtagattgtggatttaaggatcgatcccataagttgacagtattcagaatttaatgaaagaagatctcgctcttttgctgaatttctgccctggaattttacaaattactagaactagattaggataaatcccttataggtaaagcgataccaattcattatttgttgggaacttatggcgagctgggcggtggagatgcaaagatgctggaggtatggatcttgccttagagacgttgcctacataaggggtggaggactgaggagacgcatagatggagagaaattacagcagaatatgatattactagatgtgtgaatagataaaaaggtcaaataaattatcagtagtcaaataggtagataggactatactcacgactaggaatccgacctcctaacatctagctcacttttattcttgaagcaattctaagcattttctagaaaattgagtacagtacttctttatgaagtcaaggcgtcggtctttaattatccagaaaatttggaagtatatcacttggcctattgctttcgtttattttgtttcctactccagttatttgctctttgtctttggctgaaaagtgatgtgttttgaatagtcaaagatgatgctatttaattttttttttttgtagtgaaattacttaactgtgttccagacacacagtagtcctcacagcaaccctctgaggaggatgcagttattctcgttttgcagatgaagtaccaaaatgttggtcctagataggttaagtgactgctgaaggacacacagataataattgacacagctgaccccaaaatgtcaggagcccccgagggtctctgacatttgaaactcttaaccattaccctatacttctactaaatctaagcaatagcctagataacctacattatgtgaattttaaaaggttattatttgatttaaggccatagcagacccgcaaaaatgcttgattcaaaggaggcccccttggtcttaaatgatggaaggagtatcttctgtaactaaggacctgatttgcagtaacacatgttcaaagaagtttgatgggtttttttctttttcggtttgttttgcaaatactttttgatgcagttccttcagtttaaggagtgagtgagtgtgtgtgtgtgtctgtgtattttgctgtcatgcttcgcactcatccaatcagacttcctaatgctattgtcacatggcaataagcacagagttcctgagatttcgttattggtgattctctagagcttacgttg

SEQ ID NO: 584911 - DNA, 4001 bp, Homo sapiens
aaagatgttttacttctttaatcagagaaaagcaaaatcacaatgaggtgtcatttcatttccctgtaggcagccaaaaattaaaacctaaggcaaaattaagtttcggcaagtttgtggaacaacagaactccaatacactgctggtagaagtgaaaattgctatagaattagaaaatgccgttacaccttggcattatattgtaacaatgaaaagacctataacatactccaggaattctactccttccactaatgcacaaataaggtacacaagaatgtgtagcacccaatcctagtgtttctggaattacccaaatgtcctttgagaagggcactggaaaatgcatcatatgttcacacagttgaatgaataactacaacctcatgcgtcaatgtgactcaatcacaaaacacagcgttatctgaaaaaaaatcaacaatatgaaaacatttctataaagattaaaaacaccattgcacagttgtatcaggaagcagcaaatagagacctccttggcaatagagactatttcttaaattggagtataagttcatagatgctggttgtgcttcatagcttacatgactgctacatagcttacatgtgtgctacgtgtgtgtgtgtgtatacatatatatatatggaataattcataattgtttaaaactagttaaagggggatgttgaatgaaccctacaaaattttaacgttattaccttgaggtttggataatgtaggactttcactttctgtattattcatttctggactatttaaaacttatacaattaagtaaaatgtttgtatttgggtaaaatgattgcacaaaggaaaacaaattgcatagaaatctggcaccatttgagggcaataattactgttttcaacttacataacttctccaggtgtcatatattaaaattatgttttgcggaccgggcgcggtggctcacgcctgtaatcccagcactttgggaggccgaggcgagcggatcacaaggtcaggagatcgagaccatcctggctaacacggtgaaaccccgtctctactaaaaatacaaaaaattagtcaggcacggtggcgggcgcctgtagtcccagctactcaggaggctgaggcaggagaatggcgtgaacctgggaggcagagcttgcagtgagccgagattgcgccactgcactccagcctgagggacagagcgagactccatctcaaaataaataaacaaataaataaataaataaataaaattatgttttgcatagtctgggctgctaactgtattatcttgagaaaaatttccaacaacaatgggtttaaaaatgttggttttactgaaagcatgaatgctttttctgtactgacaattcctggcttcatctaatttacgttatacttatttgcctttggctcacttctgcacttttcccatttttaaaagataaactgtaaactgccacaaatccttttctgctggagcctggaccaggagcgcggattcctgtaaataatgatgtaaataaataagtaaatcaatgactcccattcccaaagggccttcttttccatttttctctggggcatcgaagtgcggtgtgccctgcgagctcccacaggaacaacccggaacgtttgtggtcctgttgggccaccgcgtgctcggtaggaagcggacgtcccgggggctgaaagggccttagcgattttctcgctctagtcccacccgagacccggggcgctgcaggaacctgcccaggccaccgggtgggcggctgggcgggagaagctgggcagcccctggcaacaccgaacggccaggacacacgcggcttcctccgcgggaggcgcttctctctgcgcctgggccttcacgacccctcccgcgaccgtggccccgaggccaggtgcttacttgccgctctccacgccgtggccgagacccagctaagcaaccagggaagcctcgatggggtcatggcgccgactccccgagcctccgcgcaggcgcaaagcagtagtgggaggagcagggggcatgatccggagcctccctgcagagggcggggcctccgtggccggctttagaaaaggagttagaggcatccctgggctctttggccaagagagacccaggctaccttgagcccggtgttaaaacgccaaatcgtggctgcagttagaagagggaataattccgttccgttcatgcttgtcagtctgagccgaaatggcccgtggaagatcccttttatagtttacaaagattgagcaccttttactctctcactcatgtaaaatgcttcttttacctaattctccctgttttgtgttttaaatctttgttcagtcagctcctagttcgtccattctgaccgactaaccagatgatatgaaaggcgacatttttgaatgaggtgcaaagcaagaaaaggctctccatccaggccaggatccagtgcaatgagctctgccccttaacccttacatcccaccagctctgatagcgttgagtggatgtggcagacctggatgctttgtgcaactcgtggaaatatttacagaatcatagtgaaggcccccagaattctggaattttgtcttttcttttaaagaaaagtttctggctagctattgcgccttggtagtgtctgaccatgtgacatcaagtggttatacgatcgaagcttcttatcatgaactgagaattatctggttctcctagataaggagatccttttacgaagagaaagtgggccgggcaaggtggctcactcctgtaatccgaacactttgggaggccgaggcgggtagattacctgaggtcaggagttcgagaccagcctggccaacactctactaaaaatacaaaaattagccgggcgaggtggcacattcctgtaatcccagctacttgggaggctgaggtagaagaatcgcttgaactcgggaggcggagattgcagtgagcagagatcacgccactgcacgccagccttggagacagagcaaaactccatctcaaaaacagaaaaagaaaaaagagagaaagtgggatacacagaactgggccaaagtcaaaacggaaacagttttcatttgtagggagctcacagtcctaatatcatgcttttgacctttagcttatatctacagtttaataatgaattccttgtgactagctgactgaggaaaaaattcaaagtcggatgatggctttgctcaataaactggcccagctggcaactgactgcttttcatatttagagccccacttaacagaggccctgaaggaacagaacagggaaaaaaaattatttccagcatgcataatttagcttatttatgtattttatgtttttacaggcacatgtcaccacacctggctgatttttctatttttagtagagacagggtttcgccatgttgaccaggctggtttcaaactcctggcctcaagggatccacccctctcagcttcccaaagtgctgggattacaggtgtgagccactgtgcctggccagaatttagcttatcttgtatgctttgcctaaaaagagacatggcttgagataaaaatcgacatttcataggcagtgactggtttgtcaagtggctgggaactgggaatgtaaaagttttggactgggtctttggaataggacctctcaaagtggtcccaaagcatgaaaacatttgggtcctattgaacgttaaaaaaaaaaaaaaaaaaaagagcttccattgcagaagggctcttaatcagaacaagattattagttatctattgctgcctcacaaattatcccaaaatttattggcttaaagcaataaacagttattctctcacagtttttgtggatcagtaacctagaagccagagtgactgtggttctgggtcctaaatgaggttgcagccaagctgttggctgaagtcccagtctcgtataaatgcacaactaagggaagatctgcttccaagctcattcacatgatt

SEQ ID NO: 584912 - DNA, 4001 bp, Homo sapiens
ttatgggtttcaatattaaccacatctggtctgagcaaaatgaaaaagcatcatttgtcttgatgtctcacttctcatcgttccttattctggagattctttgtcatcagttggacctcccacctaactaccagagctggcccctcagaggccactgcttttgcagaaccttgttttcgtccttctgtgaaaagctggatatgtcctaaggaatcattattgacattgtggctcttaaatcccttaaagtgacctaaaggccataaggtacacggtgaaatagattcctttttaaaataggaacaggattattttagttctgtctctgtccctaagattttaggtttgaatgctttctttcaggaaaggttaatatctattttgccacttaaacgaacataccagcccaccaactgtccacagagatgcacatatgatctccagattcatagccacagtttgtccttcgggttggatcagctaatctgcctggaggagagaggatgcacagtcgtatttattatacgcattttgaaactggctgtaactattgcttaaccacatagattttgtttgtagatacaaaagcatttatttctgaatgatatgtgtttgtattcccatcattctttttttatcttttattttttagtttctaatttctttccttttccttaacaacacagttttctacttttgagttataggtcctaaatattatttacttttgtaaggatactctcttctatttcctcctctaccttctaatcgaaactatgaagcaatatgcatacagatgaaaagagatggtcgagagtcaaaacaaacccctgctctaccacttactagcttgactttatctaaataacctctaatgccttagttttctcatctatgacatggggataataatattaactacattataaggttgtgatgtgaggtgagaaaaagcaccaaaggtgtttcacctgtaatatgcattatgtaaatattagaaaataatcattgtttttcttccaaatgaaattgctcttttcttaacctctctctcacacacaataatttctttattggctgtgtcatcagcagggagtgggcaacaggcaccactctttctcatgagcttctatcaaccagaacaaaagtatctttcaattcatgtatattttatcccaaaatgtaacttctgtctatacactgtaaggtaccttatttccaagaggaagcaaacattttacagagaaagatcttcatgaacaatgtgatgcttctttataacctcatatcataattagaacttcaagaaattcaaactaattggacatcactttgtatatccccttgactgttttgttcatctcattgcttagaaaggagtgtggcacttagtagaacttcaacaaatatttgtgaaatgctcaatagatgagatgtgatgtcttttcacagttgataactatgtcttatgcctcattgaagcttctaataataacacacaacccacaaaagaaggatttgtggataaggagaaggataggtagaaaaacaatgattataagggaaaagagaacaagataaagaatcaatttttaaaaacatagtagggtatatacagagtccaatttcccaaatacttcataggtctatcggtagatcattacaatgaaaacaagagtcattcttacctgtcctatattgccagccatactgcagaggcaacccccataaaatattctgttcattatctggtgcaaattttgcaaaatacctggctgtctgattcaatatgattttatacatccccattctctcaaggtatacccagggattaataatgtacatgctgttctccaccctgtagtcactgagctgaccaggactctccttccacagagggggctctgtctctgagagattggaagtccctgctaaggaagcagaaaaggaaccaactagtacacaaacccaggaaggaagaaaagccattgtgccagagctggggattgcgatcgtagcagggcttttattggagaatggaagaggaagtcatgatatttgctaacctcacagcatatcaacactttgcttttttgttttcctggatagggtgaaaatgtagaagaaattgatgtattagctaacatttaggacaattaaatttcccagactcttcagcgtcagaatactgtgtcagaacctaaatacaaggttaggcttgtttataatgtattagataaaactatttatcaacaaaaaccttccagaagtttcccaggctgcattgtgattacaaaatacatcacaaatggctttagaatgcttccctctaataaaaatactttaacatatttcatggaaaatattaaatagctggagatggaaatactaggatttataataatcttcaaatgtgtactaaaaatatgtgtgatccagttgtaatacaatgttctgcttcaagaaagaagcttaaagaatatctaattagctcaattcaataatgaaagtcagcctgctggaacaaaacctgctagttaattcttaatatctatttttcattctttattagtaaaagaatcgtagaattttagctgggaatatggtctcccagaattaaggctaaatttccaatttgctttacacaagcaaccatgtgactaagtgtggaccacagagacataaatagaaatagtatccacaatttctggaacatgtcctaaaatgaagggcacatgtcaattcctcttcccttcctccatgttgtggcttggattattgatgtgatgattgaaattcaattctgacccctaaacgcaaggcactatcttagggatgacagaatgcaaagctggaggtggcttgagtcccagagggctgtggagccatgagatgtccttgaattcctatatctgagttttacctgagcaagaaacaccccactctcttgtttcaaccactgttattgaagttttattcacacatagtaaaaattcttgccttattaataggtaatgcatctgaaaatctcaattatttacacaattagatgcatatgcttcatagtaggtcactggtactgcttgttcctggcatggtccacattaaacatcctacagcatgattccactcttttttcctgtcatattatttacccaatagccatttgataattaataaattttccagatatattaatataaaagggaatggtaggaattgctactatagatcaagaatgcaatcattctggaaattttaaaagtatattaaatgtttataagaatatatacgtgaatatgtactgtaagatgtgttactctaaaaccaaatgccagattgttctcaatggagaaatcttaagagcactcctttaaggtcagaaataaaataaaaatgaccaccagcattataatcatttaacttttctttgaggataccaaacaataaagttagtaaagataaataaattagaggtataaaattgagaatgaagatgtgctagtactttcccttatagatgatatgacagtgttcagaaaacataagagaataaactagaagggtaactacaaagaaaaaatttactaaagtggttaagaactaaattactatatataaatcaatagcttttatatataaaagcaattgggaaatataataggtgaaaatggaagaaaagtcctcattttattgtcaacaaaagggccaacatataaatgtataattatggtagatctgtttggaaaaatctctaagactacaaaaaaattgaacagttttaaagtcatacaatgtttctcaatagactcaacattatcaacatgttaatttataaatttgtacaataaatgagaaatattaacaggatttttagatgtgctttctggaaagatttttaggactgaggctaaaatttgcctaaaaaataaattatgaagaaaatacaaaaactctaataataatggataataatagtgaaaggaaactttccataacag

SEQ ID NO: 584913 - DNA, 4001 bp, Homo sapiens
ccattcacagaataaaaccagattatcgttggtgttaaagaattaagatggtgcaatttggggcaatatatagattaaatacaaagatatggtctcactacttattatcttggatttatttaaagagcatacactgtatcatcttcaactaaaatccaatctcatcaattttgagtcagcttgtcaacaaaacaaaagtggagatgtaagtccttgataccacccaatcttgggacagtcacttcaaaaattacttaaaaatcacttcacaatgctatacttcagcagctaagaatgttcttaaatacaaataaccttttaggagttaagagttggggctgtgcgtggcagctcctgcctgtaatcccagcactttaaaatgccatgacaggaggatcactttagcccaggagttcaagactagcctgggcaatacagtgaggcctgtctcagcaacaaaaataataagagttaaacagtagggggaaacctggaaaacttccagatacttaatagataccacactaagattgtatttctgatctgaaattagctaacaatttaagcaccaaaatccaagtagcacttccttacattcataacctcatctttggtcaaataagccttgctgataatttaagaaaatgttcattttaagttgcaaaaaatactgctcttatcatcccatccttgactactcacaacttactgtttgctatttaactgcggaactaattctgattaagacctccaccgcccctaaaaatgaaacttcctctaggtcattttgagtttttaaaaactgtacttctatacaaggcaaaatgaactctaagtaaaaaagaaaatcacacttctaaacacaaattaaccatttcagtatttaattgctcctaaaaggtgtattctacttcattaaatgtaagagaaaaggttacctacattacgcagtttaagaaacaggataaactttagcatataaacagtctgattacaatttcacactttcaaccatcttatttatactctacattagataatctttaaattccatcataaggtttcccatgttaactccatataaaattttgtaatcttgcccaccccatgtcaactcagtgtatactactactaagcttcagactcaaatttatttccaaaccaaagaacgctcaagggtcttttcgcatgctgcaactgctcaattcacagaatcacccctaagggtgaaaaaacagagcatacaaagcagactttttttcaaccactctttaacctaatattcataataatttaagagtaacaaataatatacacttacaaaaattacttgtgctaattcaccattaagaactttaaattaccttctccttgaatacaaaggcaatatacatcttgaagtcaaactggtcagctagagattcttttttctttctaagctgagcacgtagtctgttcagagcttgtttcttccgggagtttgggtcccccattttgaaatacaggtggtactaaagcctttggaaattgtcactaaactatgggcactttttcttaagactcaagtacaacagaaacaagtcattttttttcctgctaatatgattgattagcgaaaatcacgactataacccaaaaactgcaccttctgtcaatattagcagactgtcatattacagggtcaagaaacaaaagctgctgtccagtcatgtttggacaataacgtttggggtcagacgggaaaaagggaggaaagaaaggaaagaaagaggagaaaataactaactttctggaaaacacatttggcttaactgccaaaataaaggctttgcggagaaatgaaaagcctataatcaggatttaggtgtgcaataaaacacagctgacaccagaccaatccctaaaatccatccggattttcccccctttttagaaaagggattaaggaacagggagggggaagtgtgatccttgctttccaaaaaaaaaaaaaaaaaaaactcaccaaaaccaaaaccaaaaccaaacaccaaaacagggtaggtgaatgaaactgaaatatccaattagattttacccagccagctccatggctgtagtacctaattcttagttatttcagatttcactattgctatgtattgtcagtgcttgttattgattacacttggtggtgagcatagagaaaagtgcaaaatcggtagagaaggaaagggagaggtacagggtttccctgcaatcaactacagtgtataccgggggcgggcagctgtggcccaaaggagccatgagaaaaaacagcggagtcattaccaacttccccatcacccacattttcaccctcaggcggctgctaacgctgctgccaaggagaatcatgacggcagaaggaaaaggggtatataatacggtattaattattccggctctgtggttagacctgattaatgcccgggttcccaacacccccagcctgcaactagtcctacattccccaagggagacttccctgtggatctgcccccgttcaaaatggtggggagtgcgatttatcttcttgtgagcattgccgaggcaaaggtggcgggttcttctcccaaatcccaggcggtgcccggagaccacctgccttccacccccgcaggtcccacccccaccccttgccttcagcggcagcgactcactcgcaccacgggagacacaggatcactcaggttttcactcatttcatcgtggaaacaattcccgcccgggtggagtgggcgggagagggtaaatgggaaggttcagtgggggaaaaaaagaaaataattgtgttaatattacttctaaagtaagcccacccaccctccccccaaaaaattaagttcccggattagctctctctcacgttgaacagaccatgtttccagagtttggattgtttagggtggggtcgttagttgtttcccgaggggcagggggtggaattgaggcagctagggcggggtgggtgacggggaaatcccctccctgtccccgcggagcccgggactcacggaccgactctagggcggggtttgggccctctagccgcagcctgcgggcggagcggtggcggcggcggaagaggcggcggcggcgggggcgctgctggtagcacgggcaggagccatgtcaagagaaaaccaccagccaactgagcccctccatccccgctgcagtgcgcaccgtgactggaccgcccgcgctgctgccgccgctcagcccccacctgggacccatagtctggctcggcgccctgggcggcaacggaggggaaggacgcggagacagcggcaacagggagagaaaaagaaaaagaggaaaaacaaagagaaagatggggagttggattggtactggcggcggagggggaagggaaaggaagccctgcgctaagggtcagcaaagtaaccccccaaaataaagttatttcagttcaagcatctgctcttgagtctttcttccccctacagtcggattccggctctcaggaaaggtcgaggagacccggaggggggaaaagccgaagcggttggtgagcgtccgcggcagtactgcctcgttcccccccccgccggtggctgcagaagcggcgaaggcctcgggcgcctcgcgggtccggggcagagtcgcgtttgagaaaagaagcgagaacaaacaacttaaaatggcagcgacggccgctgcgtcacccgcctctcaccggcaccgccccggtgtgactgcgactgcgcgccctgcgggaccccaccatttgcgcagaatcaaagggggagaaaggattggaggtgggaaagttttcaaggttaccgaaaaagaggaaaacagatcaagagtacggaatagggacaggtcttttaaaagtggagcctttgaatttaacctctccatttcagtaatcgcccctcaaaaggggagtttgagagttgagactcctctctcctccagtatggagtatccaaggggcgtggaaaggg

SEQ ID NO: 584914 - DNA, 4001 bp, Homo sapiens
tttacatgtcctcctctcgaggctaaggcagcctctccttgcaaataggaagtttttgcttgatcgtgaccttgggaaaaaggaagcaaaggaggaatgactccttttatgagctttctggagatatttgttctaagaaccttctcagtattccccgtacctttggtgactctgaataaggaaagcgagcaagcagtgaagagagaggagctggttgcgggtgagcacacgccccttgtaattaatctccacttcaggaccaaaagacagtagagctccgttcactgatggagtttattcagtctgcgaaaactattaccaccaatgaatagcaatcacgatggggcattccaggtgctcagatgtcattctgttaacttggtgtgagctaccctctgaaaggctccagccctggacaatattgttgttaaccagggatgtagcattagtaacggcagactctttctgtggccctcatttttatcttgatgctttgttcccttcttttttattgcctctccacctgggcttttaatgtgtttttcctaggctggtacttatttccaacaagctgccaagtaatctctctggaaaagtcaacggactttttttttttttttttttctgttctttacttgtgtttttctttttctgtgtatttttctttgtgtgtttgtgtgtgtgtgtttgcttgcattttgctcgtgttctttgctttgtttgtgttcttctgataattgcatctttaggagaaattcctgaatgaacacagagaggactttagcaacgcattcggccttggagaagataaaggaggaaattttctaaggtggggaggacctttcctcacgtctgtcctagacaaggccacaggctgcagggctgcgtctctgccaactgtgacaagaacagcctcttccagtctacgggatgcaatactttgtccaatattcagttaacaggtagtaaatattgtctttccctcctctgtaccttaaaagggctttcagtctttccaagggccctttgctctttggttagagttgccagatttagtcaataaaagtccagggcacccagtctggattttattttaatatgaatttcagataacgattttttaaaaagtatttgtatttgttgtttatctgaaattcagatttaactgggctgtcgtactttacctggcaaccctatctttgattgaactctgttttcacgctgttttccagggcattcgaaatctagctgagtgactgctgagccagggcgcgaggtcctgggccttggagcccaggtggcctgggcggtgcggctcctcgcgctgctgcctcaggctctcacctccctctagcggccgccaaggacatcacacacgccgagcggaagccctgctgggcggtgctgccggctccaaccccggaaaggccacgtccgagagagctcacctactttctcctggaggggctgcggtgggggcctgcacaagaaagtggccttactcccaatagcggaaatggagtttcccttgtttcacttaaaaatacaatggaaaaaaatgcctctgtacaacagcctaagctgacagttgatgtctaaccctgggctgtactcaccactaaacactgatagatgttgtcattttcatgctaaagaaaccccactcaccccaaataatttgtcaaagagtactcatgtagacagcaagttttggaaggtggagatgcttatctgtcttctgtgatgtgcctgtgcctgatagctagtaaataagtttaaatgaattgacattgaaatacactacaggcttggaattaaaaacaaagaagaaacctattcctaccctcagagaatgaccacttcatcgcagaggagatgatggctgaagtgcttatgctcatcaacgactgtggaattgggtcttggaattttagttcctctgttaaacttaggaaatggatggctggaggtctgcgccagccgatgagggattgatacacctgagattgctttacaaaacactgcttttagtgtttaatgacacaggatagtgtctacagcagtggcatggagccagaacatgggttctagaatccagagatgactcgcaggttccatctgagttccttaaaggacagtttctgcaacgtaggtgttccatgattgcttgttgaatgaatgaataggagtatctatcacaaccatgtccacactcattggctttagtggagtcaaggcaaggtagagatattaatgacagaattctggtgataggggcccctaccaccaatggcagtattaaggggtgattagggagaagggtagcttttagtctctttcaagccacgcaaacaaagatcacagaatctaagcaaaagcaaatgtcttgctttacagtttcaagacaaagcccctggaagttgcccccttttaaatagattgtcccttagccttgctacgcaaatacactggatcctgtaaccatgttagcccttatctgtaatttcacaaagtcgggtggcaggtatttgctcaggaaattgagacattaggtactcacacttttaaaaataacacataaggaaggcaataataattacataagataatatgttccaggctctatatcttgttatctaatttaatcttcactgtaaccctgtaatgttattattattgcccacatttttgcagatgtggaaatgtcagcttaaagaagtgaagtaactaggcgaaggtcatagagacagccaatatgcaaatgcacatctgccttattcaactctttccaacatacagcgctggtacttgagtatatgaggaggcctgtttgtatacctccgagcagaatcaaataggaaatgtttgctagaaataaaaaggaagcatcaaaggaaaatatggaagggtcaaccaaagggtgaatgggctttgtcctttcttcgctggaggtctgagctcagaagcctgggtctcaatagctcattcctttagaaatgaggttctttacacttggactcagggaggggaacatcacacaccagggcctgtcagggggttggggggtagggaaggaatagcattaggaaaaatacctaatgtagatgatgggttggtggacacagcaaatcaccatggcatgtgtatacctatgtaacaaacctgcacgttctgcacatgtatcgcagaacctaaagtataatgtttttaaattaaaaatatatataaaaaagaaataacgttctttagataacaaaggaaagggcagtgattccaaaatctttctcagcttttaaaatgcacacactttcaggccttagctcctgggtattctgatctagtagtactgggatggggccctggaatctgaatttttagcaaacatggcaaatttgaaacccaggagatgtgatgttatctgatgttaattcctcctccaatcaaccacttaggctaaattcttaaggtaattttctaacaagtatttgtattattatttgtataagattatgttaggaaaggaacataaggcactcattgaatgaactggtgtatttctagagagcaatatgtcagaattctgatggtgttttctatgccatttcactggcatttggcagcttataacatagccccagtggagatgtaaactccttaaatctggtaattccactttatattggattataaaaggttatgtggggtaagaacctcagaccgtacaaagaacagttaatctcatgaaaagaaaaattttggaaccaaaatgtaatagtggttgttttaactctatgttctttcagtcatttagatcctctactcattctctgaacaagcattttttaagtgcttaccatgtttcatgctatgctaggagctatgaagaagggggaataagagctgcttggtttcattaactttagtgtgatacaccttctgaatcctgtgaataaagagtctgggtaaactaaggtcaatacataaaaataaaacagattaca

SEQ ID NO: 584915 - DNA, 4001 bp, Homo sapiens
ctgcctgtagtcccagctacttgggaagcagaggtgaggggtagcttgagcccaggagttcgaggctgcagtgaaccgtaatagcaccactgtactccaacctgggtgatggaatgagattcctgtcttttttaaaagataaagtccaaattacttaccatggccctttatgatctggtcactgcctacctgttcagtttcatttcccatcaatccttcttcacattctacactgtcatactatttcacatctttttgcttttgcatacacaatttcctctgcctaaaaagcctagtctccagtgctttgtccaataagtgaactctttaagactctgacctcagtttttgtcctatgcacctctagggcttggcattacatctattttcctgtctacctcccaccctaaatagtgtttcttgaaagcagagataaatggagaaaacacaaaaaactaagaacagacgtgggaattcacctcagatgtggaatcagatcaatgttgaacaaatttatagaaaggacctaaaattatcattccgaactaattgaatgtaactcgtggctcatggtttattcattttatgttttattattttattcatttttaaaaatgcagaggtcgggagcctgaggcaggagaatggtgtgaaccggggaggcggagcttgcagtgagcagagatcacgccactgcactccagcctgggcgacagtgtgagactccgtctcaaaaaaaaaaaaacaaaaaaacgcagaggtagcaacaatgtgatgagggtttaaggttagcaggttaggaatctagcatttggacattgtttctggtgtgtggagtagctgtggaggaacaggtattcaaagcaggtcttgaaaaatgcctcagtccaaggcagaaaaggtctgacagaaacaggacctctttctggtatgcaagttgggctacatgaacctttagtcaaaacttcaatgtagcagaattgaatttattagttattattttaaaggcatgttattccctagagggaaattttgacaacccaaattcaaatgaacgaatttattaagggagagacgtctatagaagatcccaccacaggaactaccaaatgagccatcagaaaagtcagaatactaagtatctggaagtagtctctattataaagtgatttatgactaaatactttaaaagaaacatatttgcgaatacaaaggctatgagggctctgagactagaaagtgtggcctgcacggttaacagtcttaaaatactacaaaacacgacgcaggcaaatttccttctactaagaggtgattacaaacaactattttacttgtgtcaagaaaccaagtcatatttctttctgaaatccaagatgccaggtttatcacataccaagtacacatttaaagaaaaaaaattattgccccctaacgattattagaaaaagatctttcagaagggggtggggaatctactcttaatttcttaaaaattccgtcaaaagggcagaaatctggacttcattagcaacgctcaagttatggacactgctgtgatgcctgagaaccaagttcaagcaaggtccacctcgttttgctctccccggcggagtcaaagaaagtgacagatgtcttaagggagtcgaccccgggggagctgccaggggatgctgtcagtctacaaaactggagagactgagaaaagggatccgcgctgggatagagggtggtagcagcggcgagaagcggctgcgcgaggatgtcagagacgggcgcggcgaggctgtcacagggcggcctccccccacccagcctcgggccccagtcactcacatgcggggctcgcgcccctcgggctcctcccgcctcggggacagctgccgccgggcgaggaggatgggcaacttcctgtttccgggagcgcgacccggaagcaaccccccactcctgggcgaggccttgtaccctagagtaattcctcctctcgtccagcgcttccgcccaaaacagaacactcagtgtcgtggcgagcgcgggacctctcgcgatatctggagagtgtaggttcttgctccccctggcgtccttcttccgttctggctcttttcgccccagtcctaaatccttgtcttcctaatttacctggactggctcacacagacttcatagctgaactgatccatagaacaagcatttactgagtcccctactatgtgccaggcagcatgttaggcattaagggatgggagtggaagggaaatgtaaatgaagagcagccccttccttctggaagctactactcttgagaaagacgaacaaatccctccagttttcactcagcccactcattagtgagagcttactctgttgataaaagaaaaacttaagccgaattaagtataaaggagtttaattgagcaatggaagattcacgaatcaggcaacccccagaatcacagcagattcacagactcccagggtgcctcatggtcagaacaaatttatagataaaaaaggcaaagtgaggcacaggaatcggaagtaaggtacagaaacagtgaggttggttacagctcggtgtttgcctgatttgaacgcagattgaacattcagcaggctgtgagtggttgaagtatggccgctgggattggccaccactcagttattgttacaggtgtatactattaagttaggttttcaattttgtttgactattaagctatgttacagttcatccacaaggactcaaatatagaaggacagagtccttctcaggccatatttagtttgccttaacaattcccccgttttggtcattttctcaattttgagagattgaccaaaaccttggtcattgatgttattatcgctgtcataagtgtacctgtatggttttgaaactcactaggaaacagtagaacagtgggttttgcaggaagagaataagggctgagtagaggatacctccttattctgaaacatctgtttacaggagaaaaaacctggtctgttctagcattttgtgtttttttaaagccttggtttgattatgtcacatttagcatgagtgactccattttagtttggtttggtttgttggtgcctagtgcatgagctcagtccaaaataatggcctcccatgattttgtttaaaaaaaaattcctcacttttggccaggttcttacttaggtgacagcgtgaccagaacttagggccttagcgccactctcagttacatcattttgggtttctggtctcagcatgtcattcataggttacggtgccttcatggtcacacatttctttcagtttttgttattccagttgaaaagagatcatttgacgttgtagagatggctgcatgcaagcatttaaaatctttgagagaatacagtgcaccagggagactattattatcattatcgggcggataatagcaagagtttggagtatgctccttacccagggtccccataagccaaaccacctaaaattaaatagattgaagaatgagttagatgaagagtctccttgcttgactaagtggtcttttcactaatcccctacaactggatatttatttttattgtatttattttgtgagagggagtcttgctctgtcaccaaggctggaatgcagcggcgatctcagctcactacaacctccacctcctaggttcaagtgactctcccgcctcagcctattgagtagctgagattacaggcacctgccaccacgccaggctaattttcatatttttagtagagacagggttttgccatgttggccaggctgctctcaaactcctgacctcaggggatccgcctacctctgcctcccaaagtgctgaggttacgggtgtcagccatcacgcccggccagaattgtttataatttacatttgctgtatttctccataggccacaggtgtcaacagctgcacaggtacttttctgtttagccaattctattacttagtataattttcaaaggaga

SEQ ID NO: 584916 - DNA, 4001 bp, Homo sapiens
attcaaggtgatttttttcatctggcccttgtctacctgccattctcccctcaacagccagggaccagccaaggtcctctgcctttctgttcttgcccattgctgctttcagctaaagcagagttctgtcagtcctctctctatttgctcatgctgttcatttcatgctccctggccatcttccccaccttatatggcaaaattctacatcttcaggctccaacctgtaatttctgaattctcctgttggtattttttaaagttacaaaataaattgttaaatccaagcaatgtagacatacagagtaagaagtgaaagtcacctccttcctgaaaacaccatcaacagtttgttggatgattgtccagacttttttctatgtacatataaacctctctcatgtttttttaacaaaaaaatgggatcatatgatcatactgtatgtatgttttttctgtaacttggttttctttcactcagtaattcaggtagctgcccatagtatggatagttgatattttaggcatttcctatttcaaggacatttaagttgcttcctttttttttggctatgacaaatactgagatgaacatccttgcacatattgtatccttaggcacttttgtatattttcctagaggatacttggaagttgaaattactgaggtatgcacatttcagaattgtatacgtacttcctgattgtctttccaaaaggctactttctgtattttgaaaatatcctccagaatgtaagcttcatgagggaaagagtaccacacacagagtaactgtcaatctgtgttgaatgggagcagtgtgaaagatgaattggatgaatttcaggcagaaaggctgttagctattttctagcacactcctcatatacttatagagtgtttacactgtgcaaggcactgggtatccagactatacagagttgactcaattctcacatctggccaggtgccatagctcacatctgtaatccagcactttgggaggccaaggcaggtagattgcttgagcccaggagttcaagacaagcccgggcaacatggtgaaaccccatctctacaaaaaaatacaacaaattagctgagcttggtgatgcatgcctgtagtcccagctactcaggaggctgaggtgagaggatcacttgagcccgggaggtggaggttgcgataagctgagattgtgccactgcactgtaacctgggtgacagaggagaccctttctcaaaaaaaaaaaaattgtcacatccttggagcttaaagtctaggtatgtgctggagtagaggggaaggcactcgtcctttctcttgcctcttccttatcttttagtagtactggtgaggaaaaagcactcatcctattgggtaggtgcaaagattcaaagttaccaggttttgcctttgttatactccctcccaaacaaacacaaactgtaccttttattgaaattttttgaataggtaatgtatttacatggatcaaaaatacaaaagtttttaaaaggtattcattaaacatcttcctattttccatctacccagtccctacccccacccagaaacttctaaataaatatgaactcctgatattttaatgtctctttttttaaaaaattaaaaattaagtgtaagaatttttttcctaatttaggggttggttatattggtttcagataatcagatatagctatatatatatacatatgtatatatgtatagtattagaattttgagttctccatgcttgttattttgctgaaaagaagtacccagaacacctgcgtgttttactcaaaaaagataatgggtgtttatgttacttgcattgtggtgttttcctttgctgagcatgaaatccagtggttatcacaatttcatgacttacaagcttgaaaatcaagagtcctggagcagttccataatactcctgtctgccctgacctttttgtttactggagctgttgtcctctccctctgcagcatgggaatcattgtgctggagctgtactggaagcatgctccaaagacctgtaagaactttgctgagttggctcgtcgaggttactacaatggcacaaaattccacagaattatcaaagacttcatgatccaaggaggtgacccaacagggacaggtacagttaagccaacattagtttatgttttcttttttttttctccttttcgtctttttttctaaagccagcattagtttctgaagtctctgtcgtaaataggtgataaggcagccagagctctcttttccacttactaaggtctgtgttggttgattctggtgacaacgcctgccttcctcaaacacacatgtgtggaattgaccagaaaccaacctttactcctaggcttggtagagtttttcataacttacatgtactgctcactaagaacaaataatatttgtctgaattatagtgatgcaagtagtctgatcaataagaaggaaagactttataatattttgagaataataaaatcctgggttcttttatcgattcattcatttaacaaatactgagtacctgttttgtgtcagatacttttttaagctctagggagatacctataaacaaagagacagaattattgctctcaataaagcaggaaaagggtgtggggatggaattttagtagaaaagtcagggaactcctctctgacattattggagaagagatctgaatgaagtaagaaagtgaaccttgcaactgtggggagaacattttggatggagggaagagcaaacacagaggccctgaggcaggaacctgtgctggaaatcataagatatgataccttatagggcatggtagagactgggttttattctgagtaagatgtgatgtgagtcattggagagttttgagcaaaggaaagacatgatctgatctatgctttaaaaggatcactctaggctgggcacggtggctcacgcctgtaatcccagcactttgggagcccgaggcagttggatcatttgaggtcaggagttcaagaccagcctgaccaacatggtgaaacgctctgtctactaaaatacaaaaattagccgggcgggttggtgggcacctgtaatctcaggttcttagtcgggaggctgaggcagaagaattgcttgaacccaggagatggaggttgcagtgagccaagatcgcaccactgcagtccagcctgggtaacagattgagactccctctcaaataaataaataaataaaaggatcactctagctgctgtttagagaatagatgtaggggcaagatgtaaacactatgtaaatagttgttgtactgtattgtttggggagtaatgacaagaaaaatagttctatacatgttcagtacagatgcttccccccaagatgttttcagtcgcggttagttgaacccatgaatgtagaacccacatgtagggagggccgactatgctcatgagtaagtagttggataggaatatggggttcagggaaagacctggtatggaggtattaatttgggagttactggcatttagatggggtttattagtgaactggtggaacccttactcatttcaagggcccttgcttctcagtctgcttcttctctgctaatttctgctcgtttgcctttaaacaagtttggttttctctatagcagagtcttttctcagtcttgttcttttttgtcattcttaatcgtctcatgatttatcatctatggtcagaagcattcaggtttttgggtttttttttttttaatgtatatggatgcatttcaaaatacagaatatataagaaagcagagaaaaggggaaaaatcattcataagcatagctcctaaagatttctaaccatcattaactaatccctaaatatcccatctttcagaaaggaacagtgttaacttttggtgcccatcatgtctggtttaagggatgacaggataaatggaagtagtttcaaaaaaataggatatataagctattg

SEQ ID NO: 584917 - DNA, 4001 bp, Homo sapiens
ggattacaggcgtgagccactgcacccggcccatctcccattcttaaagatgtggattcctaacctcagagatcctctcccacggtcccacagtgcatcctccgacatgtgcaggtgccatctggtccctttcacatcatccttttgaaaatgaagctcaaggagctgatgcagacgtgactaccatggccactgctcttgtaggtgataaggtcctgtgtcattgttcccgcaatctatgtcttttgttagcatctatgaaactggcagactgacttattagcttacaagcagggtaaaatgccacacccttcactgttcatgcaaatgataaaagggtcaccaagatgacaaagccatcctaaatgtgtgtgcacttaacagagcttcaaaacatctgaagaaggccggggacagtggctcacaactgtaatccagcaatttaggaggccaaggcaggaggattgcttgagcctaggagttcgagaccaacctgggcagcatagtgagactctgtctctacaaataataaaaaaaattagccaggcatggtggcagacacctgtggtcccagctactcaggaagctgaggtaagaggatggcttgagccccagaggtcagggctacagtgagtcgtgatcacaccactgcactccagcctgagtgacagagcaaaaacttaaataaaaataaaaataaaaaatctgaagacaaactgataaaactgaaatgagaaatggataaatccacaattataagtggagagcttaaccctcctctcagtaatcaatagaacagaaaatcagcaaagatacagaactaaaaatatcataaccaattaatctgattgatatttgtagaatatttcacctaatacatgcttcctaaatttggtatttaccaaaagagaccatagccaccatgcccagctaatttttgtattttaagtagagatggaatttcaccatgttggccaggatggtctcgatcttctgaccttgtgatccactcgccttggcctcccaaagtgctaggattacagttttgagtcaccgcgcccggccaatttttttttttttttttcttttttgagacggagtttcactctgtcacccagtctggtgtgcagtggcacgatctcagctcactacaacctccgcctcccaggttcaagcaattctcctgcctcagcctcctgactggctgggactacaggtgcgtgccactacacccagctattttttgcatttttagtagagacagggttttgccacgttgaccaggctggtctcgaactccagacctcaggtgatctgaccgcctcagcctcccaaactgctgggattataggcatgagccactgcacccacctgtcaggcctctgagcccaagctaagccatcatatcccctgccacctgcacgtatacatccagatggcctgaagcaactgaagatccacaaaagaggtgaaaatagccttaactgatgacattccaaaattgtgatttgtttctgccccaccctaactgatcaatgtactttgtaatctcccccacccttaagaaggttctttataatctccccgacccttaagaaggttctttgtaattctccccacccttgagaatgttctttgtgagatccaccccctgcccacaaaacattgctcctaactccaccgcccatcccaaaacctctaagaaccaatgataatcccaccgccctttgcagactctcttttcagactcagcccgcctgcacccaggtgaaataaacagccttgttgctcacacaaagcctgtttggtggtctcttcacacgaatgcgtgagacatttggtgccaaagacctgggtcagagggactccttcaggagaccagtcccttgtcctcaccttcactccgtgaagagatccacctatgacctcaggtcctcagaccaaccagcccaaggaacatctcaccaatttcaaattgggtaagcggtcttttcactctcttctccagcctctctcactacgcttcaatccccctgtccttccaattccagttctttttctcctctagtagagacaaaggagacacattttatcggtggaccgaaaactctggtgccagtcacggacttgggaagacagccttcccttggtgtttaatcattgtggggacgcctgcctgattattcacccacattccactggtgtctgatcactgcagggatgcctgccttggtcattcacccacattcccttggtggcaagtcaactgaagggatgcctgctttggctgctcacccacattgcagcccagggctgctccccaccccgcttctccgtgtctctacccttcccacccttctctctcttttttttttttttttgagacgcagtctcactctgtggcccaggctggagtgcagtggctccatctcagctcactgcaagctccgcctcccgggttcacgccattctcctgcctcagcctcccgagtagctgggactacaggcacccaccaccatgcctgactaatttttattttgtatttttagtagagatggggtttcactgtgttagccaggatggtctcaatctcctgacctcaggatccgcctgcctcagcctcccaaagtgctgggactacaggtgtgagccaccgcgcccggcctctacacttctctttaaacttgcctccttcactatgggcaaccttccaccctccattcctccttcttctcccttagcctgtgttttcaagaacttaaaacctcttcaactctcacctgacctaaaatctaagcgtcctattttcttctgcaataccgcttggccccaatacaaactcgataatggttctaaatggccagaaaatggcacttttgatttctccatccgagacctaatttttgtcgaaaaatgggcaaatgatctgaggtgccttacatccaggcatttctcacgcttcgttccctctctagtgtctgtttccagtgcgactagtcccaaatcctccttctttccctcccgcctatcccttaagtctcaaccccaagcatcactgagtcttgtgaatctttcttttctactgagccatctgacccctcacctcctccccagactgctcctcctcagctcgctccccgccaggctaatcagcctccaactcttcttcagcctctgctcccccaccctataacccttctattacctccctccccacacccggtctagtttacggtttcgttctgtgaccagctctcccccacctgcccaacaatttcctcttagagacgtggctggagctgaaggcatagtcagggtacatatgcctttttctctatcggacctttcccaaatcagccagcgtttaggctctttctcatcagaccccactaaatgtgcacaggaattccgatatctaactctgtcctacaagttaacctggagtgactgaagtgtcatcctaatttctacccctccccagatgaacgggaaagtttttctctagcccagtctcgtgctgataaccgccggcttcatgagccagacctcctggaaggcattagagcagttccccgagaggatccccagtggaactatcaggcagattccccaggtacagctgggcaagattacatggtttcctgcctagttgaagggcttaaaaaggcagcttacaaagctggtaattatgacgaacttaaggaaactacccgaggtaaagacgaaaacccagcccaggtcatggcccgcttggcagctacccttagacgctttaccgccctagacccacaggggccagaaggccgccttattctcaatatacgttttatcacccagtcagctcctgacatgagaaaaaagcttcaaaaattggaacccggccctcaaatcccacaacaggaattaatcaacctcgccttcaaggtgcacaataatagagaggaggtagccagacagcaacacatttctgagttacagctacttgactcctctggaagac

SEQ ID NO: 584918 - DNA, 4001 bp, Homo sapiens
acacaaaaattccttttataggtatatatcctactaaaatcaattattcatcatactacatgaatgttcagagcagctttatgcataatagccaaaaactgaaaacaacccacatacacatcaatggtaaaaaggataagttaacttaagtatattcatgcaatagaatactattcagtaataaacaaacttcaaactactgatacgtgtgataacatggaggaatcttacagacactacggtgggtgaaaaaaaacagaaatgcaaaggtgtccaatcttttggcttccctgggccacactggaagaattgccttgggccacacataaaatacactaaaattaacaatagctgatgggctaaaaaaaaaaaaaaaaaatcacatggcggggcgcggtggctgatgcctgtaatcccagcactttgggaggccgaggtggtcagatcacctgaggtcgggagtttgagaccggcctgcccaatatggtgaaaccccatctctactaaaaatacaaaaattagccaggtgtggtggcaccagcctgtaatctcagctactcgggaggttgaggcatgagaatcgcttgaacctgggaagcggtggttacagtaagccgagatcacaccactgcactccagcctgggcaacagagactctgtctcaaaaaaataaataaataaataaagtcacaaaaaatctcgcaatgttttaagaaagtttacaaatttgtgttgggccacattcaaaaccgtggcctgtgcgggttggacaagtttggaataaagcataatgcttgattgcaattacatgaagtttaagagtagacacaactcatacttggtaatttaagtccaaatgaatagtggttacctctggggaagtactactgaccggaaggagcagttggaaacctggggtgatggaaatgttctagatcttgacctaggggctaatgacatgtgtatacatatgtaaaacttcacccagctgtcctcttaatttctgtgcgatttattgtgtgtaaattatatcagttaggaaaaaataagaaaaatgaaggaatgatggagaaaaaaagaaatgaagagaaacgtaacgaaggaagaaagaagggaggaagggagggagggagagaggaaggggggattaaacccaagcacggagggggagagatgctcctcaaaaatatgctatcagtcatgtagtgttatttatttatttattgagatggagtctcgctctgttgcccaggctggagtgagtggcacgatctcggcttactgcaacctccacctcccaggttcaagagatcctcctgcctcagcctcccgagtagctgccattacaagcacacgccatggtgaccggctattatctgcatcttaaagatggggaaagtttgaggtttcctgatgtgttcagcgtcacagactgggtgagtgactcaagctgaggctaaaacccaggtgtgtagggcaccaaagcctttgtgattccacctcctacagctcaggtcacttcctcggagaaaggtgactcctagaaatgcctcccacctggaactgatctcctcctgggaagaacgtctgtcttatcgccgtcgaccttaggcatggacacccttctgtcccccacccacaactgtgagcctgctcaggaggcacagccgcgttcattcattttaggcctcctcaagggctcagcgcctgctaagcagatgcgcgttcctgtaggacaaggggtggccactggagacgcgggtgcgacgcaggcgatcacgccctcggacgacgctgcggactgcgcttccttccgaagagggaaccgttgagaagagtgaagcgatgagttatgcctcactggaaaccaaccgcgtccgtgtgactcacttagaaactcactgttacatatttggagcctgagctgacgaccttccgggtacacgtcaggcagaagcaggtgcgcggtgggagtgtccgccccgccccgccggtcgcgccggccccgcccccctcacctgcgcgcgcaaccccaccccagcgcgaggctctgcaccggccgcgcccgccatccagcttttatatggcgctattttggtcgcgcgccctgattggccgggagcgggcgacgacacgctcgcgcgcctcagggaggggccaagatctgggggaggggagcttctggcagccgcgcggatccgggggcggcggggcgggactgctgcggtctctgggggtgctttggggcttctgtgcctagtctgcaatctgttagtggggttatattttaataaaagagcttgtgtgtccgaaggggatttgccaagaaccaaactcacccttctgggagggagttgccagatggcgggaacaggcggcgtaaaccttaccagacgtgagcccaggctgctcaagtgtcattcgcgtcttgaagctcttgcccgcctccctttgcaagcgcgtctaatgccaactctaccttgccctttgctaaaccagccctctaatgtgttatcgtgcctcacgtcagacaatggctgggcctgtctctctttccccttggttctgtcctctgcccttctcttaagccagaagaacaaaacactccttagaatcgctggaggatctcatttccaccacattcccgtgtccggagccgaagagccacgtctgaccctcactggtctggctgtccaccaatcaggcagcattgcttctctgagtctcaaggttattaaatttcttctggtggcagactggttttgtactttggtgaaagtgaccaaataggtacgaagtgtgattcatcaaaaattcttacacttaaaaagataagccaaaaggatcattcgaagccaccactccatattagatgggaacttagcttgaaaggggttctcttaaggatttctatttacttctttgaattacaaatatcatctctggttggaaagcctataaacgcctctgagatttcctgagttcacaactttgaagatcatttgcagctggatgcagaaaaaacaaacctagtaattgttgaatgtggacatcaataagaattaagtacttttggcccaaaggcagtggttcacacctgtaatcctagcactttgggaggtcgaggcaggaggataacctgaggtcaggagttccagaccaccctggccaacatggtgaaaccccatctctactaaaaatacaaaaattgggtgggcgtgttggcgcatgcctgtaatcccagctactcagggctgaggcaccgaattgcttgaacccaggaggcagaggctgcagtgagcagagatcatgtcactgcactccagcctgggcggcagagcaagacttgtctccaaaaagaactttcaatgtgccaggcattttaaatgcttaacaggcatttcatttaatcctcacaaaatccccatgacttagatactattattatacccattttacagaaagggtctagaaagcttgcataacattgtgtctggacttggttcctgccagtgggttcgtggtctcagtgacttcaagaatgaagccacagaccttcgcggtgagtgttacagctcttaaagatggccgggacccaaagagtgagcagtagcaaggtttattgtgaagagcgaaaaagcttccacagcatggaggaggacccaagtgggatgccgctgctggctggggtggccagcttttattcccttattgtccccacccatgttccatttctatcctatcagagtgccctctttttcaatccttcccgtgactggctacttttagaatcctgctgattggtgcgttttacaatcctcttgtaagacaggaaagttccccaagtccccactggacccaggaagtccagctggcctcacctctcaacatgactcatgcaacacattagtaccatggcagtgccgggattcacacccaaggttgtctgactcctgtgtgcccttaactactaagctctgcagtttcttctttcctaacca

SEQ ID NO: 584919 - DNA, 4001 bp, Homo sapiens
ccatgtctcctttaaaaatgtctttcagggccgagcgcggtggctcacgcctgtaatcccagcactttgggaggccgacgcgggcggatcacgaggtcaggagatcgagatcatcctggctaacacggtgaaaccccatctctactaaaaatacaaaaaaaaaaaaaaaaaaaaattagctgggcgcggtggcgtgtgcctgtagtcccagctactctggaggctgagggaggagaatggcgtgaaccccggaggcagagcttgcagtgagccgagatggcccactgcactccagcctgggtgacagagcaagactccatctcaaaaaaaaaaaaaaaaaaaaaaagtctttcagtaacctgtgctttctttccatcccatgttgccacactggtccatattctcctgacttcctcaggcctgtccagagctccagagctgagagtggaaaggatggccactcacattgattctataaatttttgtccttccaggccatccatagcctggagtgacatcccctacccggtactcccctgctctactcagatcaggctcatttccctgcagacagataatgttccttacgaattaagcttcagtcatctgccctggcacgtgcttctctcctaaaaccttcccatctacccattcatctattttcaaaattcctacaatgtcttcagtctctaaatctctatcttacaattcagcacttggtgatttcgtttactgttttagagcttcaccactgtttcaagggtgttagtgtttgtgtttacagatcataaatgtcttgagaggagcatacttagggctttccaatatcccctactgcaaatggaccagtgctgtctacacagcaaatattgattgaataaaacctgcattccaatgacttatttctatcaagctctttcaatttatagtcattactcatctgcctggattcttttattgaatttctgaatgaatagtttattgaaaattagttgttttcaaacctatgtcatcacttggtaaaatataaaaaagtaagccaagcagaccagtcaggatcagtgaaaggcccaactttatgctcacttctcccttgtctttcaaataatgctgcctggattgtggtgagatctgaaaaattcttgctttgttttcccaatgcaaaaaagcgcaaaggccttgtttcttagttttcttgtttgtgaacccagcacttccaattacatttctacaactttgttcatccctcatgtggcactgcacaatctgccagtttacctttttaatttaaagttagactattttttccatctttcatttgtccttacaggtttatgttggatttttaacatatttatcaaatgtttgaatagatgttccagagacattctaaagctgttttaagataggagttaaaagaggtgtcacgggagttactcgcaaaaactatagttttgtttaaaagctttttcagttgtaagacaaactttacctttttaaaaagcacttatctcattcatttttcacctcaaaacgagacaccaaactttttaagacacaaaagtgtgctcacttccaggatccatagtttcttggacccacgctacggacctggctctccctccctctgcaccgggttttgtgggagggagaacgctttccaacctcctccaccaaggactctcacaaactcgcaatcgggctcccggagtgctggaacgcccctgtgtgacgtccgcccgcgccgggggaactccgcagagacaggtgcagcccgcgaggcccgagcgaccctactgtgggtgcggtgtcttcccagagagtggtgaagttaggaaggtacgaccccctaggccgaacagcctgtgggctagctggcgcctcctgccgcagtaaacacaaagtggggtacagaaacgaaaactccgggaagaaacggccagcacgggcctcgccgtgccggctactcaacacgccttcctgagagcacagaacatccacagccctatacagcgcgccatccagagagctccggactcccagctcggcgcaggggcgggacttccgctcaagtcagacttccgggcgaggcggtgaggggcttccggttggggtggcagggtggtggatctgtcggtcccgttttcccgtcgcacgtggtggccactgttggcttctgaatggtttgcaaggcggatatccacgccaaggcctttggatcggccgtgggtacatccgtctgagccgttcctttccatcgcagagcggcggcctccggcggcgctctccagtcatggactaccggcggcttctcatgagccgggtggtccccgggcaattcgacgacgcggactcctctgacaggtaggcggccgtacagtgccctggctctgggtacggctctctccttgaccgcccccttggggtgtggactcttgtttgcggtttagagggagactagtggttcatcactcagcgtctctcttgacaaccctttgcctgtttctgcatcccagctgggtttttctcccagttcacgcggcagagttaagtgaaagctacttgtcaagggagtctgcggttctcaggtcggttagcgtcactgggaggcagagttggggatagcgattaggaaacatgggtttttgcgttttaaccacatttagcgttcaacaaatacttactaagcacttaatatgtaccacgttctgtcctgggcgccggaggtaacaagaagaaccaacttcctgctgtcatggaactttaccttctacgtgaaagagagggcacaccatttaaaaaccaaataatgatgtagactatgcaaatcgtttgatataccaagtggtgactgaatgggtagggaaaggttaagtccagatttgaatgacaaggagctaatcctggcaagagcagagggaacagcatttcacacagaagggacagcaagagcaaaggccccgaggccagagtgcctagagcacagtggaggtagttgagaagattggtagggtgatagagaagtaagaaggggggccagatcatggagacctttacaagtgatggtgaaaagttcagatattaatgtgggtcttatggaaagccataggagggattttagcagaagaatgacattatttgcttggtgatttaaaggaatcattctttctaggtagatgatgttcatggagggtgggagtggaacagagagaccagttcaaaaataataaggtaatcagattcaaagatggtggggactagagcccagatcctaaagatatgtcttggaggtagaagtggcagcgtttggtggtagactggacgtggagtctggggaaagagggatgaaggataactcctgcctaaaagcaaaatgaaacatattggagttattttggaattccaagaaaacagcttgtactttatgtttacagtaaggattcatcacatgcggattttgttaattattggggatgttttcaataaatatatgtatgttgaatgctttctgtgagtcagatctagtcttaggtggtagggaggcattggtaaataccatcctgaatgacacagagcttgcaccctagcaggggaaaccgatattattaaataattagactatttgtattcgaattgggtaagtagtacaaaggagaagtgggggaaaaatagggaagacttccttgagcaagtgatagtgagctgatacttgatggatgagtaggggttagccagagaaagaggaagggcattccagttttatggttacggagaagtgtacaaaaagctttagagaagaaaagcagcagaagaaacacagccagcatagctagtgggtagttaatggtaatgagagggcactaatttaccatccaccccagggtattgtaaggatacaccagtgattttccattggggaagatgttgccatcccgacttctacccaggggacttttggcaatttctggagacgtttttgtatgtcacagctgggggtggtg

SEQ ID NO: 584920 - DNA, 4001 bp, Homo sapiens
ctagaaggacaaatccattcccttctctcttacttttgtgttttctgctcctccctcaagctaagaatagtttttacattttttaatgcctggaaaaaaacagaagaatattttgttactggtgaaaagttcaaggttcaatgtctgtaaataaagtaaaacacaaacataccattcctttaggtattgtctttagctgctttcaaactataactgtggaactgagtagttgctaaggagaccatatggcctgcaaaacctacatgtttactatctagctcttaactcaaaggtttaccaaaccctaccctgtatcaacaaattaaattacttctcacattaacgatggggaacaaaaacttacttcctactagcaaagaccaccttgataatcaccttcctgatttctcatagtcaacttctttttctctttatccttaagaagtatttatatgacactttgattgtaatgttattaagaattttttaaatttcgggattcatggagaagtcgcctttccttgcaaaatatgcagtatattcaagaagtcatgctccatctacacttaaggtactgaattaactatttcacacacttttattgtctatccattacatgctgtgagccaaatactgtttggtgccgtaggaactaccaaacaacccatccttgctttcaagaggcttgcagtctaattagactctagtaactataaatccaattctctaaagttcactctaccgttgtaattttacactaagtgggcttagatagtttaccaagaattctaaggaacatagcttcaatgaaatctacagaagcagtaaggaaataggagtactcagtaaactacagtgctcaagtcccagaagcttctgcatttccataactataaaaccaaaggtcctagatgtttttaccaagtgttcatctccactctggctgtttggacctagtcccggttcaacttcctaaatgcagtcacccatacatactcatttttaagaatgcatccattcaaatattgctacaacttgcagcgaacaccactctgatgagaataaagaaaaggccatctgcaggttgatttttggccctaaaagtgatgatacggcggctacttccacgaacacccctctacccaaagcagtcagagagccagcggcgggtgccgtttttccgagccgttcccccagtctcagttgcctctgcattttttagaagtgactcatcgcctcaagtcaggttctgcagaggggaagccaggtctgtttctttccagcactttctgatcgaggtggctctggtcagagccggcgcaatgactcccacccccacccccctggaagactcacagcccggtggacgagaccccccaaagttagagcggccgggcgggcggcggcgctggggtggggaggccgcggccgcccgccaaccccgggcagctcctgcccgcaccccgccttccgagcggccaggacgccggagctggggaggcgggggcagggcgcgccgctccgctgacccagatgggagtccgcccgcgcccgcgccccgcgcccgggtcgccgcgccccggcccccgcgcccgcgccgcctttattcccctcgcgctgctgccacagccgcagcgtcccggccgcttccctaccccacccatcgggctcaacttgccagcgcccgccgccaggcgccccccgcacctgcaccccgacccctccccgcctcgccgggccccgaccgctgcaggattacctgcttcgctgccctggggtcccgtcctcggcaatgcaaatccgtggtcggccactcgtaccctcctcccgcggccctccccttctcctcccctctccctcctcccagctgaataggagccggtgtcagtcacgctgctccaggggagagtcgccggcagcttccggagctccaaatacagacgagctgaggggggagagggagagcaaagccacgcgggtggggagtggaaataaaggggagcagagaggagaagggggtggaggaaaggaggggcagatgggccgtgggagaaaagacagggagatggggaaggcagagccagggaacgccagcctgcctgccaagcgccaggctatgcgagaaatggattcagtgcatgaggcagtattgcaaagaagtctggaaagatccggaggctcctggctgaaggaggcacagataggttggatacccgaagatctgtgcagagaaatgggtaatggatccttaggaatcaagagacggcatgtgtgtccccagacccaatatgaggataaaggctctgggaggagaaggagctagacagctaatgctttagcgagacatcaagactgagtgcactcatagtgcgtgtgatgacatttttaaaaagtattttataaacagcaactttttaaatgtcctgattatttaaaaattaaagtaaccaaacccacttggcttcttaagatgtgcagcatatttgtggccacttcccctttatatattgattataattgcaaaattggaggcttttctcttaacgtcattagaaggaaagcattgattttcaattttcatcaaagtttatttcagtctaaaaaagtgacttgaagctctttattgaatgaatgccaggaaaataattgcagaaaagagaaaaaaagaggggaaatgtaactgatatcttctgaaagtaaaatctccaaacaataaatatgagatgaatttcttaaaggccaatattctctgtcgatgttaaaattgcacataagttggttctgtacattataaggcttattctgaccccataggtcagcacttatacaaaggtcattccaattacacattgctctctgctgacagtaatgaggtgcagtgagtctttgcttccctttgtctggaaagaagggaaacaaaatgacataaacattgatcaatgagtgcgtacattgcataaagccagagccagcaccctccctatcctgtggataccttgcatatggcgggcattcaatatgtttgtattaaataatgaatgaatggatggatggatgaagtatgtatgcatttagaacatttgtgttccagaaatgcagaaaaaatatatatccataagaatcaatgtgtgcaggatcacagggaagttccaagcatccattcatatgacttttttttagcactaacttcaacaaacattagcacagtatttccttagctacatctgttttttattggagtataaagtattatggagtctaagagtggatgagccacaaatcctgtctttaggttgataatatagtaggaagatgtgaagagtataaaaataaccacagttctaggaatgtcgtaaaaaacattctaaaagaagtatgaacaaatttccatggatgttcagaagaaaggaaggttgcttctagactggggattagagaacactttctgatggacatgaaagttgagtcttcatgcggaaatgagacattaagagtggattgtggaggaaaaaccctcaagatgatgggcagggacaaaagtggagaggtaataaaggatggcatgtatgaaggacagtctgtgagtttagctggattggagggctgtggaagccaggtatggaaggaaggttaggccctggctggtagaggccttcaatctcagcctaaaatgtttgaagcctaagtagtaggcactgggggactattgaccatttttgagcataatcatgatagcaatggttagtttggtggtggtatataggactggaaagagataggaggcagggaaatccactaagaaataactagctagtctggaggggaaagtaacgagcctcaacttgaagcctgaactcttcccttaactagccctgtcatagcatctgtctgctatatgatgtctccccaaaagggctagcccccagtgaacacttcttcctcacaactctttgatacttattgtccatattttccaattggacctatacattccaggaaaa

SEQ ID NO: 584921 - DNA, 4001 bp, Homo sapiens
tatcctgatgttttcagactgcagttgacagcgggtaactgaaactgcgtggaaagcaggggctgctgcatgttaaaaggcatgaatggacaggaagctttctgctgcagctgcacatcctgtctcctccatcagactgagaacctacagatcattttgttgttgttgttgttgttgttttttgaggttttttttgaggcggagtctcactctgtcgcccaggctggagtgcagtggagcgatcttggctcactgcaagctccaccttctgggttcacgctattctcctgcctcagcctcccgagtagctgggactacaggcgcccgccaccacgcctggcttattttttgtatttttagtagagacagggtttcaccgcgttagccaagatggtcccgatctcctgacttcgtgatctgcccgccacggcctcccaaagtgctgggattacaggcgtgagccactgcgcccggccagatcgtttttaactaaatcagttttattttattgacaaaaaaagtatatatctgttgtatacgacatggtgttttgaaatatgtattcactgtggaatggctcagttgagctaattaatatctgcattactgcacatacttgttatttgtttgtggtgagaacacttaaaatctactgtcagtgattttcttttttttttgagatggagtctcgctgtgtcgcccaggcttggggtgcggtggcacgatctcggctcactgcaacctccacttgctgggttcaagagattctcctgcctcagcctcccgagtagctgggattacaggcgcccgccaccacgcatggctaatttttgtattttagtagagacacggtttcactatgttggccaggctggtctcgaactcctgacctcagatgatccacctgccttggcctcccagagtgctaggattacaggcgtgaaccactgtgcctggcctctctcagtgattttctaaatgcaatacattgttattaggggactatagatttaaggacagtttgatttccggcactgggaaaaaactaagatgttgtgtcagggaactttaaaaaaaaataaatactaataagtaataataataaataaataaattatattttgagatgaggtcttgctatgctgaccaggctggtcttgaactcctgggctcagggcacttctgaagaacaaggactgggtttggggtcaccagctaggcctaaacttcctagggtcaggtaaacagggagggcctgagaagctgggaggctgggtctaggggcccatggtctcacggtgccccaggctgagggtgaggtacagggctgaccttctgctggccaaggctggctgccctctgtgcaccctagccccacaggaacaactcagttctgcccagccctccccttccccccagcccactctcccccatctcctggagtctggtcccaggcttgcctcaggtagtcctgcccctgccaccctgaggatctcatcttcctgggctgagggacctgcttttctaggcttaggagaggttctctctgttccctaaagttttcttctctacgtgggctttttcacacaaacccttttccccagcagccatgacagtgggatggccggcccctctcctctccccaactccaactgtcagtggagaggagaaagagttcctgcccggcctaccacccagtctgaccaccagtggcctatccttccccaaacagtctgagaacgaggcccaggtcctgtccttagggagcatccagtctgatggaagagtcactctctgtaccctcaaggggcatccagtctgatggaagagtcactctctgtaccctcaaggggcacccagtctgatgcgggacacagctcctcccctggggggaggctctagcctgcaggaggtacaggagtggggcaaggccccatgagtgcctacctggggagtacagcatgctggtggctagctcggtgcttgacagttgaaggttctggtgggagggggagaagagaccctccccccagaactctctcattgcagtgggattcctaggtcagcagccggtttaacagctgccttcccttttctccttctcagtaacccagccccttacccagctgagggctacccgctttagggacagatgacccagcacccctgccttgcacagcctccaccagcctggctgtcctcactgtatcacggtcatcccatcagggtaggtcccagtccctttttttcagcccaaggtttccaggaaggggttgtccctgacacaccaacctgacctttacatccagaaagccttctcattcccaaaagcccctttctcactgacatggcatttttcctgtgttgctgtcttcacatggcaccctcctctgtgtctcttcttcttataaggacaccagtcatatggggctagggtcccatgcatttcagtatgacctcatcttaattgaacgaattacatctgcaaccaccctgtttccaaatgaggtcacattctgaagtactgggggccaggacttcaacatgcctttttgggggacacgattccacctgcaacactctccttgcctagccccagtctggcaaggttaggccactggtctgaccacatgtcctgcctctgcactggaaagtgggaatgctttgagctaagaactctgctccagagtgcagtcttctctggagtgtatgatggctgaggacagggactgtcaaggtcatcccagtgcccctcagccctgcctggtgctaatcaggcacagaacaggtgtgagagcacccaatgggatcagagaaccttgttccaagctctgaaacaggagctgaccttgggcgagccctccccctttctcctttctgggactcaatctcctcatctacgagaatattaattatggtttgttattatgtgccaaacactgggctaagaacttcctacttatttaatccttaaaacagccagaggccatgacattgctattcccattttatagatgaggaaagtgaggtctagaggtatgatgcaacttgcccagggtcacacagctgttaagcggtcgagccaggatttaaactaataacttcagatttttttttttttttttttttttgagatggagtctcgctcttttgcccaggctggagtgaagtggtgcaatctcagctcactgcaacctctgccccccgggttcaagcgattctcctgcctcagcctctcaagtagctgggattacaggtgcccaccaccatgcccagctaatttttgtatttttagtagagacggggtttcgccatgttgggcaggctggtctcgaactcctgacctcaggtgatcactcgcttcggcctcccaaagcgctaggattataggcataagccaccgtgcccggccataactttagctcttatccgtatcttctgctgcccccagctgtgaaaggaggaagtggtctttggggatcctgtggtctcccctgcccactcctgattccactattgcacctcttggatgcctctaatgtgatctgcctggacatgaactctgtgacgaggtgccaggggtagggtgcaggcaggcacgggtgttcctctctattacagcctcccaccctgggggagggctgtcctcaggactcttgctcagtgtgctgcttgggcattatctggagtttcacatttggaaatgctggaacctggctttgaacttcaggccctgcaggaaagggaaggcatgctgggcagatgaggaatgagagggtctcggctaaccagaggtgggggctgaggtctgtccaggccatgctttgcagacaagggggcttgccaggcaaatggcggtggtgtgcctgcccatccatacggaaaacaggcttcgggagcaccgagaagccttcacacaaccaaggtgctcctttcaaagccatgccaatatttgtccaaccaccagcaggcactcccttggccccaagactttggggact

SEQ ID NO: 584922 - DNA, 4001 bp, Homo sapiens
ggaggctgaggcgggcggatcacaaggtcaggagatctagaccatcctagctaacagggtgaaacccgtctctactaaaaatacaaaaaattagccaggcgtggtggcaggcgcctgtagtcccagctactcgggaggctgtggcaagaggatgacatgaacccgggaggcggagcttgcagtgagccgagatcgtgccactgcactccagcctgggtgacagagcgagactccgtctcaaaaaaaaaaaaaaaaagtttgtaagcagatttactcatgcataatcttttctgggacaattccaatggattcagatgtgaaagcaaagtagacaggagaaggatcacatagcctttcgttataggcagtctgaaggaagttttctttttaaaattgagagaatgtggctgggcggggtggctcacacttgtaatcccagtactttgggaggctgagggcagtctgatcacttgagcctaggagttcgagaccagcctgggaaacatggcaaaacccagtctctacaaaatacaaaaattagccaggcatgctggtgcacacctgtagttccagctacttggaaggctgaggtgggaggattgcttgagcacaggaggtcaaacctgtagtaagccgagatcttgccattgcactccagcctgggctatagtctcaaaaaaaaaggaaaaaagaaaaagaaaaatcattacgaaactgagaatgtgtccttaatgtagacgctaaaagacaaaaaataaaatttagagaaaaacacaagcatttgtagagaaaaacaggaaaaagccagagaagacagtgtatttttacactcatgggaaaggctaatacagcaagaccccagaagaagaggtaaggggcaaatactaacaaaagctatcatatacggcacatttactatgttccaggcactaacctaaatgatctaaatacattattcacttagtttaaatcctccccagagttctatgaggtccatattattcttttccccattttacagatgaggaaaacacagacgatcaagaaatttgcacaaggcaaccacctggtaagtggcagagctgaaattagaccccaggtctgtctgtaaagcaagatggccaaaatcaagaatattcaatacaatataaatgtttttggaaagaaggccatctcttgtaaaacggaacgccaggaaaagataattggagggcatagcggggataggaagggagatgggagaatccctgccatgaaagcctctgtccccctccagtcaaagaggcgctgagggagatgggggggaaaggccttgaggagaggcgaaaggtttgctgctggaggtgtggagaatggaaaaagaccaaggaagagtcgaagagtcaaagacaacttgatgcctgaagcacaaatgctcagctcctacgaatcctacattcacatctgagttagggcctactatgtgctaggaatgaatctaggcgctgtagaaatgaaaaacttatttaggcatgttggtttgatgcctaaataaacatttcagaaacaatcaacatcaatgatcacctgacactccaggaaacccatttctccaaagaactccatccgaaagattttaagagtatattccaaggagagactggatggtgggggggaggggcaggacgagaggccgaagggacaattcctgggcgcgcccacccatagtccccgcccagaccctctcgaaggaccacagagggacgcagggtgcaagccctgaagctgcaccgggggcggagggaacgtggctacctgcggccagacgtcaggcgcggcccttccccgacctacttggccgctccagatggactccctccgactctctggtttcccaggggcagccgacctccactcgggggactaccgcgccatgcagcctcttccttagcagtccctcacggaccgggcccctacgacaacttacccgccctgcccggcccaagacaacccggttcctttctgcccaccgaggtctccctggcatctccaccaataccagagcgctatcagggtatggaggcgggactgagtgcctacggccaatcatatcagacgcaaagcacgtcgcagcgcccacaactagttcccgcctttggaagggaaaaaaaaaaacacggttggcgccaaactccagtaatcttcctagggctttaagagagaggggcggggtgtaaggtggcggggaaggcgatggggcggggcttcaataggaaggggctgacctgagtggaggtaggggcgtggcctgagagaagctttttagtgaaagacaggaagccttgagaggtctgtcatttatttaatactttatcttaaaattctgctgtcagctgcgtgcgagacaaagtgctgggctcgattacgatgaataaatttgttccctgccctcagacgcgttcctggatgataggcagacaaacaacttagcttcggatgttgggagccttaaggaggggatactagtctagcggggcaggagagagaagagctttttacagggtggaatacctgacttgccttatagaacctgtaggaatggggggtgccggtaggtctagcctcaggagctcagcctgagcattgataggtgcgaaaataaggccaccttcctcggctacttatagtctgcctatattcatccctacccatttcctcgtttgtccacttagcttttttttttctttttgctttcagacagggtatcgctttgtcgctcaggctggagcgcagtggagcgatttcggctccctgcaacctccacctccaaggctcgagagatcctcccacctctgcctccagagtagctgggaccatagacgcgagcgaccaccacccctggctgttttgtttcgttttgtttctgagatggagtttcactcttgttgcccaggctggagtgcaatggcgcgatctcgacccactacaacctccgcctccggggttcaagtgattctcctgcctcagtctcccgagtagctgggattgcaggcatgtgttaccacgccaacctaatttttgtatttttagtagagacagggtttcgccatgttgaccaggctggtcttgaactcctgtcctcaggtgatctgcccagcttggcctcccaaagtgctgggattaaaggcgtgagccacccacgcccggccacccctggctaattttttaaaatttttgtagagatggggtcttgctatgttgcccaggctggtcacgaacttctgggctcaaacaatcctcccacctcagtctcccaaagtgctgggattacaggtgtgagtcactgcacctgaccccatttagtcttaactgccatatcaaccaatttatttttatttttattcttttttttttttttttgagacggagtttcactcttgtcacccaggctggagtgcagtggtgtgatctcagctcactgcaacctccgcctccggggttcatgcgattttcctgcctcagcctcccaaatagctgggattacaggggcctgcctggctagttttttgcatttttagtagagatggggtttcgccatgtcgggcaggctggtctcaaactcctgacctcaggtgatctgcccgcctcggctttccaaagtgctgggattacaggcgtgagccaccgcgcctggctttatttttattatttttttagagacaaggtctcagtctgttgtcctagctggagtgcaatggtgtgatcatagcttactgcatcctcaaactcctaggctcaagcaatgctcctacctcagcctcccaggtagctgggaccacaggcacacaacaccacactcgcctttctttctttcattttttttttttttttttaatatagacagggtctcgccatgttgttgcccaggctcgtctccaactcttgacctcaagcaatcctccgacctctgccttccaaagtgctggtattacaggtatgagccactccacctaagttatgta

SEQ ID NO: 584923 - DNA, 4001 bp, Homo sapiens
gcactaaatagaacacaataaggacccttgtttacagtaggacagctgaaacaaggcagggcatcatcacctgttcaactttagctgagaacatggactgcgagcgactcaatttttttcccactgctttgcatttgccacaaaagcactgtgagtactgattttggggttacaaatacattttagccattagggaaattcgcaaatgtggaatctgtgaataatgaggatcaactgtagttgcaacccagaccatttggctctctagaagagaccatgtctcttctaaaatagttactatctgaccatttgcagacatctcctgccccttgctctagcctgttagaaaaaaactcactttcttgttcttgaagccactgagttttggagtttctctgttactgcagcttattgtaccctaatgcaggttacaaagtctatgttcttcccgccacaaagtaccatctcagtcaccactcataaaccatcctcttcacatttccatcaacctttttcctaccaagtgggccaatatttctcaagggatgccactaaaactacccacatcaccatggggtgtgtgtggcttgtaaaaaaaaaaaaaatgcagattctggccggctgtggtggctcatgcctgtaatcccagcactttgggaggctaaggcgggcgggcagatcacttgaggtcaagagttcaagaccagcctggccaacacggtgaaaccccgtctctacaaaaatacaaaaattagccaggcatggtggcacgtgcctgtaatcccagctactcgggaggctgaggcacgagaatcgcttgaacccagaaggcagagtttacagtgagccgagatcacgccactgcacttcagcctggacaacagagcgagactctgtcttaaaaaaaaaaaagcagattccttgttaagaatgcacatcaaagtcctactgaattactcggggtgtgggaagagttcaactctccatttttaacaagccctgtgactctatgcatgctaaagtttgagaatcactgaactcactagtaagcctgaagaagactatgaccctgtacctctcctgcaacctccgggaggatgccctaagggaaggaaaacaggggaagcaagatgaatttccaggaagaccacctgtgcttgattcccaggctccaccacttccaccatctcagcctgggttccacctggaacctcaatttcctcatctgtacaaacctcacaggcttgcagtgaggattaacaatgcaatgaaagtagcacatagcggttgctcagtatgtatgttttctttcccttctatatgcagcaaattatttttaagccattcagtgacatcaccaattccagaattctctttacatattcccaaagtaattttgaaggtacaagcttccatactccggaggaaaaatttccccttttagaggatatttaaaccattaataatatacaccagaatgggctccctcatctttgagtcctagccctttgggagttctccttagattctacaggtccctatttctctggggtctccctcacctctgtacccatcccttttgttctgtgtcccccgctttgagttccctcacttctatgccaggccgtctttggggctccccttcacttccatgtctcttcctctctggagatgccctctccagagagtctggttcgcccatccggcacctcctcgggctccctgtcctccgggaaccccgtgggccttctcacccctcccgtccctctccccaaaccgcgtcgccctctcatcctacgcttggctcctcctcctatctatagcccagcctatcccttatcccgcggccaggagaaggcaactaacgaggtggcccaacccccacttttcccctcacctctagagcgacgcccagattctcccgcttctttttagtcatgttacttgccgggatcccccagtcatcactggacgcgcccaccaagtcgctatgtgcgcatgctcaagtcttcgtgcttctccctcattggccaccgagtcagcgggaggtggggctgctgccgtcgccatcttgttgaggggcgcggccggcttggtgcggacatgtttatgaggggcaacctctagcttgagacctcagcctagatgggtggagggtggaaaagtcggtacagggaggcagaatgtacagcccgggagtagacctgcccctttcttccccagttttaagccgctttgcatcactgagagccttttttaaccccatgttctctttcagtgtgttttgtgtttcagcaacaaccccgtccctgtttaggccacgccccccattcaaagtctgtccatccttcaaggccggtgctggagccttgagcttctcggccaatggaatctgataatggccctctattgttatttctcctttgtgtcttgacttctttttttttttttttttggtttgttttattgtaagaacaacctacaaacatcacagaaaacatataactgagaagcagcatcctttattctaccaactttatcagttcctctttgcttctgtttattcctcccaggcttggcctcacacacagtattttacattgttgtaatcgtactatactgtacaccatagacccacggcctttgaaatgttttgactgtgaccctacgataaaaaaatgtattttataccatggcccagttacccatgaaaccaaaaccaaagtttcacagtaagtacctttacctcctgtaatgcactctgttattttgtattcttgcctatttaattaaaaaaaaacaaagtcgggcacggtggctcaggcctgtaatcctgtgtctggagttggttccttcaggtgggttcttggtctcactgacttcacggtgagtgttacagctcttaaaggtagcacggacccagagagtgagcagcagcaggatttattgtgaagagcaaaagaacaaagctcccacatcatggaaggggacctgagtgggttgccactgttgactgggggatggccagcttttattcccttatttgtcccctgttacagagcactgactggtccattttacagagtgctgattggtgcatttacagtcctttagctagacacagagtgctgattggtgcatttttacagagtgcagattggtgcatttacaatcctttagctagacacagagcgctgattggtgcgtttttacagagcactgactggtgcatttacaatccctaggtagacacagagtgcttattggtgcattataatcctttagctagacacagagcgctgattggtgggtttttacagagtgctgattggcgcatttacaatcctttagctagacacagaacgctgattggtgcgtttacaattgtctagctagacagaaaagttctccaagtccccactcaacccaggaagtccagctggctttacctctcaatcccagcactttgggaggctgggcagatcacgaggtcagtaatttgagaccagcctggccaacgtggtgaaagcccgtctctactaaaaatacaaaaattagctgggcgtggtggtgggcgcctgtaaacccaactactcgggaggctgaagcaggagaaacacttgaaactggaaggcggaggttgcagtgagccgagatcgtgccactgcactccagcatgggtgaaagagcgaaactccatctcaaaaaaataaacaaaaacaagttggtggcaggacacctcttaggtttatttcatgaccccttaatggaggttgaactgcaatttgaaaaacactgccaagtatgtttttctgtgtctttgaaattatcacttgcggtggcctcatgtgccaccaagggagtctctcgcattcttgcattggacatcattttattgacagtaactccaaatattgcgaaagcaaaccttttcgtgcacacagctctgtcctctggattctttctttaagataaattcacagaagtagaattactaggtc

SEQ ID NO: 584924 - DNA, 4001 bp, Homo sapiens
tgttccaggtttgaagagactggagacataactaaatacagtgtgtgatcctgagatggaaaaaaaattggcaataaatggcataattgggacaagtggcaaagttttagtaggtcgtgtatattagataatattattgtcacaatgctaaacatcccgattttgatcattgtatgttcgttagagaatgcccttattcataggagataacacaccagagtatttacagatgaaaggtcataggggaccaggcatggtagtgcatctctgtaatcccagcactttgggagtctgaggcaggtggatcgcttgagctcaggagtttgagaccagcctgagcaacacgataaaactctgcctctgcaaagaacacaaaaattatccaggcatcatggcatgcctggagtcccagctactctggaggctgaggtgagaggatcgtttgaacccaggggtgtcaaggcggcggcgagccgagatcgtgccactgcactcgagcctgggtaacaaggtgagaccctgtctgaaaaaaagaagaaagaaagaaaaggagggagggagagaacaagagaaaaaaaggagagagaaagaaagaatcatgatggctgtaatttactctcaatgggctcaccaaaaaaaatatatattaataatataaaaataccacatacttatgtatggttaagacaccacattgggataaaaattaataaagtcaaatatgaaaatgtcagatgaaagaaaaaacatctagtaactggcctctgagttagaaagaaagaaaaaatagttttatttgcacacagtggtacttattttccacaaatattccaggaatcagagaaatctaaatacaggtcagatgtaaaacaacaatcaaagctgctgaatattagaagaattccgatggcacgttggagaatccaactcatgttttgaatccactacatcccccagggatatctatggtcagtacacagcgtggtaggaaaagtccaaaactttggaaagaaagaaaaatcctccatcatttactaattgggtgagttacttgcggttagcagttgagctgaacacaattcccccatctctggcaactactcccaatacacacgatacccggtgggccccgatgccaaggccaaagggggattcttaacccagactgagccagccagatcttcttgtgcgcccaagtatgcatatgcccgtgttcgtgtgtgtgcgcgcccgtgtttgttcgcgtatgtgcctgttcgcgtgtgtgcacgagcgtctgtgtatgcgcgcatgttcgtgtgtgtgtgcgcgcgcgcattggtacatctaatacctgaaagtccccagtacctaagtaactcctgggagtaaatgagtagatgcattcaggaacaactgaattaccaacgtttctggattacttcgcaacgaaagggccggtgactctactccgggctggccctcctcctgccacatcagattttccagaaattgctccgaagcacacttcagtagctaagcagggaaagttaaatgaaggaattctttgctcccaggggtggcggggaggaactgcccggccacagtctttcgaatgtcaccggtttaaatggtcagagaagcagagtggcacaacctaaaattcagacgcgctccgcaaactccggtcctgcccatcccctcctgaaatcagcgccctggcagtcccaggccacagccctcgcgggcacagagctgctctgattctgcccacgcctccgggaggaaaagggtgcaaatcaggggcgcctcggcccctcctgggtcgtctatccccagggccacccccgcgcgcggccggcggctgggaccgtacctcgggcgctggcgaagcggcacccagcgcgatatggctggtgcagtccaggctcatgacgacccgagcccgggggcgcgctcggacccggaaccggccctgaggaagcggcggcgccgggagccggcgggtggcgcgggtgtctcctcgggcaacgggtaaacaccgcggggacgcggcggcgcgcggctgcgcgcgagtagggtggcccggccgcaggaggccggggtggaccccgaacccccgagcgtggcctccgtggcgagggcctgcaactgagcggccgaaactgccagggcgacctggggggagtcggcggggataacggtcggtcctcccggtgggactctgcagtgaatgcaattccaggcctcatccttatgtcagcgataaatacagccagtgggcactgtgaacggtgctggcgcgagtgaggcataggaaacttcacaagggtgaacggagcatttatttagcacacactgtgtgcaaatgtgtctgcgagcgtgcaacctgtgcaggtccgggtcctgcgcttggtttaatactcagctgtcccagtcttgacgtttttaggaagttttgaacaaggtgtcctgcattttcattctgtaccggggtccacaaattatgtagcctgccctggtgtgcgttctttcatttcaccttctcaacaaccctgcctggaagtacgggtactagtaataccagtgttagtaacagccacagctgctcattatgaaatactcgtgctcgtccatgcactgttctaagtgcttcccacgtatgatcaatctccttaaatgaaacaagattatgaagtggatgttagaataatccatctgcaagacaaggcaacagtcacagggaaataaaataaaatttccaagatgtacagggtaagtggtagaatgaagatcaggctccagatcataacactaaagcacagagaagatgagtaacttgtttaaggtcccacaatttgtagcagaatctgaaaatggaatctgcattcacctcactttaaagcttttggtgggccaggcgcggtggctcactcctgtaatcccaacacttttgggaggctgagatgggtggatcacttgaggtcaggagtttgagaccagcctggccaagaaggtgaaaccctgtctctactaaaaatacaaaaattagccgggcgtggtagcggacacctgtaatacagctatttgagaggctgaggcagggaaaatcatttgaacctgggaggcagaggttgcagtgagccaagattgagccactgcactccagcctgggtgacagagcaagaatctgcctcaaaaaaaaaaaaaaaaaaaaagaaaaaagcctttagtagactcctatgctgtttgagacacatgaaatcaaacaggtgggaggattgcttgaggccaggagtttgagaccagcctgggcaatacagcaagactctatctctacaagttttttttttttttttttaaattagccaggcatggtggtgcacacctgtagtcctagctactcagaaggctaaggcggggccaggtgaggtggctcatacctataatcccagtactttgggaggctgaggcaggtggatcacctgaggtcaggagttcgagaccagcctggccaacatagtgaaaccctgtctctactaaaaatacaaaaattagctaggtgtggtggcacatgcctgtaatcccagctacttgggaggctgaggcaggagaatcgcttgaacctgggaggcggaggttgcaataagctgagatagcaccactgtactccagcctgggtgacagagcaagacgccatcttaaaaaaaaaaaaaaaaaagaaagctaaagcaggaggatagctttgagcccaggaggtcaaggctgcagtgagctatgatcaccactgcactccagcctgggcgacagagcaagagcatgtctctaaagacaacacaaaaaggcaaaatcagagctatggcagcttttcttggattccatcagtcatcctatgtgcattcatattgaccctgaggatttcttcatctggacaatggcttttgagctcacggtaactttgccatatatctaatccagaatcatctcaaggctttcacttgatgcaccgttaaagaaaaagt

SEQ ID NO: 584925 - DNA, 4001 bp, Homo sapiens
agctagggctaataatgattctagcttggtgataagtgaagttctagaaaatcaaacttgttcgttgcctattttgaatatactttctctaaccatttccaaacaaacgtgaattttatgatatatatttagttttgcccatatcaaaaaagttaacaatgtgaagttacagatggcccttccatgcggaatacgtgtaaggcctcctagttatccctacacaatccccttactttatctattaatccgctctattttctaacatccatctatttaaaaaatacccttccggccgggctcacgcctgtaatcccagcactttggaaggccaaggcgggcggatcacgaggtcaggagatcgagaccatcctggctaacacggtgaaaccccgtctctactaaaaatacaaaaaattagccgggagtggtggcgggcgcctgtagtcccagctactcaggaggctgaggcaggacaatggcatgaacccgggaggcggagcttgccctgagccgagatggtgccactgcgacagagcgagactccgtctcaaaaacaaaacaaaacaaaacaaaacaaaacaaaaaaaccccttccatactttatttgtgcatagtgttaaatttttcttaacttcattatttcatatatcataagatgaatttatatggctatctctacctcatcaggttgtaaattgccttctagaaacattaggccgtttttggcatgctgtgtttaatttaggcatgccatgaccattcaaaaagattcaaacccattgctgtcgcttaaaataattatttgatgaattcaataaatttttctttttccttttgcctggacttagtgccactggcactggaatttaaaccactgagcttaaattggctgacgctagacaattacaactggagctacaatactgccaaagaagaggctttctgggaaaggctccaatgcccagtctctaatcccagataccactgggtgtcaatccacttaaaccttggctaacaatttttcttttaagaagcattttttgtaacagaacaataattctggtgttgtttcaacatgcaacacaaattaaatgagagtttgaaagatgactgaatagagacgattagttctctgaagaggcaaggatctgtaaaaatgtatgatacgcataaacacgctggcctgaaatttaacgatgctaatacacacttggtggtacaagaaaaaaaaatctaggaagtaaagcaatgcaaataaaccagtggtggtctaaaccacaatattctgcggagccagcactcgcgatttcctcgtttttggaaaattacatctgtcacaagagcactgaaacccttcctgtatatcaaacagcaaagaatgttttagagaaggcataataagtaaactgctcatagttacttattcacacagtggttttaagtgccaggtcttgcctccaagcagtaccactgggcatccctcttgacatcacctcattccccttccccaatctaccgaagcgatgacccttcaccgcccagtacccagcagtgaccagagtggtgggaagggcctaaaggggcaggttgcggaggttcctttgcttccactacatacctgaagaagaagggtattggggcccccttccgcaacccgcaaagacccgacagcctcagaagccaccgccgcagccacaagcagagccccggtcacatcccgggacccgctcctccgcagctccgtttgtttacggaagtgacgtaagaggtacagcctccatgccccaagcggaagccccgccttttcctgctcccccagtgtcgctcttggctccgccctcggcatttcattgcttcccctgtccttcctttagctgtaactccggcgggcgtgttgggtgtgtcgttttaggctctgtgacccaggagcaagacgcaataagcgggtgcagtggaggtagaaacgggaaatgcagtaccctttccggaagctactccgcccctcggtgagtgttagattccccccccgaactacaattcccagaatgctgttcgagcatgcccgaaggcggaaccagagtgtcgccatgcaactgttccttggttgtttccgattggttgcccggacttctcgcggctaaactaattttggctccaaggcggcgtgaagagtgtgattctgttcagcgaccgtgattctgttcagcgaccatgatgttgagcccctaattgagagtctgttaccactattaatagctactctgttcgggccctacacataacggtgtatctaaacctctctacaattttatgggtaggtgttatactctctgttttacaaatggggaatttgaggctcagaaaggctaattgatgcaggtgtctctctgtcgtcaaagatagttctacttccactatacttaaagcctctggagaaggaattgcaggctgagagaaagagatctatcttaaatgagggaagaaatgcacgtttcattgcctggtctgggtagccttcccggtgttggagtgggaggtgggaaggttttagattcacaggtccttagattgaagggactctggaggaacaccacatagcaccccccgcattagctaatggggaaaccatatctagagattgtatccatgccagaaaaggcagagcaaagacaaccccagtctcttggcttctaggataggatgttcttccgccacccgccatttaaaaaaaaaaaacaaaactattgaaatgttaaaaaaaaaaagcacagaataaacaacgcacccactatccagaacgaacagatttatgaatgaaagaaatggagcattacagataaagaaggtgttccctattctcagtcccattctactaccaccctcagagaggcaaccaggatcatgaatttgatatgtatcttgccaatctaggtttctatatttaaactattactatgtattataaacaatatgtagaatggtttggggcatttgaagttttacatgaatgctattatattttgtgtattgatctgcaacttgattttttcaccaaattctgtgtttttgagagctatccacattgataaatatagctagactttatcaaatagatttgtcacaaattatttgggaattcccatagtgatggatgtttaggttgtttcccatttttcaccattacaaacactactgtacagtctgctcaatatcttttcccagtttctccttttaattaatgtcgaattgtcttatttgtatgaacagagcttgcaactggtgattcacatgctacttttttttttttcaaattggttgctaacagctaaaattgaaagaataaaaacaatgtggcatcccatgaattaacgggaagatctgactacgttagatgtgcattgtagcctggcaacaatggttcaagctggaaagcatctgcctcctttacctcagttcaagtaatatctagtttttctttgtctttagtacccatctgagccctgtagcatttgtgtttacaacctccaacatgatgtagggacacaggaaagtacccttctaaatggacatgtttcaggtattcagaaataggtattcaggttttgaatacctattttaagtccctattttagccacaccctgtgataggaggtcaggatgcatctatcaacaaaaggtacaagagctttatagtcagagatcttatattcccgatataagagactgacaataaattagtatgcaaataaaatagtttcatttagtcagatgagagtcctgaaataacagcttaaggtcaaaagtagtttgtactgaaggagaagtatcagggaaggccttcccgaaaatgcagctttgaggtagagatatgaataaagtgcatgagccagccatggaatgatctgaggaaaatgagtccttgagtgccaggcacggtggcttttgcctgtaatccagcactttgggaggctgaggcagacaaatagcttgaacctaagagc

SEQ ID NO: 584926 - DNA, 4001 bp, Homo sapiens
gtcgtttttagagacagggtatcactgtgtcacccaggcctcaatgcagtggctggatcataggtcactgcagtcttcaacttctgagctcaaggggtcctaccaccttagcctcctgagtagctaggactacaaatgcatgccaccacagccagctaattattttctgtggagacggagtctcgctttgttgcccacgctggtcatgaactcctgggctcaagtgatcctcctgcctcagctcccaaagtgctaggattataggtgtgagccgccatatctggctcgctctttctttctttctttagtagcagcgatctgtaggctagggaaattaagtgacttgccaaatgtcctctagctggtagccaaactagaaatagagtctctgtctcctgacacccagtctagtattccttcttcatcatgctgcttcttctaatgtaatcctattctggagcaaaatggcagaatgatatcccagtacatctgggaaaagacacatgaaacaagaataagaatgtttacagataatacgacagcatggccagctcccacagcatgtcctctgtaaaggctttcttccatcagaatgaacccacactgccacagtgctgggtctctacctctagtttgcacttcttcatcttgcctcataccatgctttaccatcagctggtggtcaatctatctcccctcttaggattttagattccttattaattacaaatttaagtcaggatttgtcttattcactattgttatcctcatccctagcacttagcacactgctttattatttatgcactgtaggaactaattgcttacataaaaatgagtacgttctggaaactagggccgaaatagggtaaggagtttattccagtgaggaagggtcactagcaagcaagcctgagaaaacggcgtggatggatccctacctgcctctccgccctggctcctgcctgtcactggaaacatcccgttcccacatggtcacttgaggtctctgggtgtctagccgcctctctgagacatcttgatggcctgggggttggaccaggggaatgtctgagagccaggtgggagccattcttggcagagttgaaaggggccgagcttgaaagtgggaggggggaatcagcccagtggaacctgaagaattacaaaaacaaagatggtcagtttcccaggcagagacaaccaccactccccttgtctggtcccactgacctgaaggtggaaacatctccacattatttgaaggctctagattctgtctccagccatctatgttcccctggacaagaggagaaacaaagacactccaattcaattttcaggccaccttccaaagagaaagcccctacaataacaaagtcataatccttgaattatagccaggtccacccgatgcttagctcttttcctacttccccaaagtaggagataccccaaattcacttgcttgtctcaacctggttcctcatggaacccaagcaactatcaagtggagagaatttactgaaagagacagactgagaggggctctgaggctttactcatactttcaggattctgggcagtgcctctaccctcctccttaagtttctatggtccctgctgctcctggccagaggtgagaaaggaggtacacagtgcaggggtcttgagcgccatctccagagttctctccatggctcagcaaggcctgagggaagcccatccagacaccagcaggccatgactcttgggtccttccctgttaaagtgctggcccaaggcctggccccagctgaatgtggccacatgcagggctagaccctccccaagaccttgggaatccaggccgcctagatccccaggcagaaaagccagcgtcctgacatcttattcaaatctttcctgcggctgttctctcagcttctctctactatccccttagcttccatgcctgctgcccgcctcctctttctcgagtcctaacacatagtgggcactttaagatcttcctcccaccctcccaccctcattaatctattttttacccgaatctgggatccctactcccgtccctttttacaacctaatctacctttttctgaaggaattattctggtcctgaccctcacccccatctctcaatagcctgccctcgccccctgtacgctagccggctctactctcccaccactgctcccctagatacccgaggcttcacccagttagcccgtgagctctaaggctgttctgatctcttcatctgtcccttcacctggcccctgtacccccttcccctttggaccccttgaaccctcccaggacccccgctcagccccttcccgcccccaaccgactcttcccgaacgtcccttaccaaccgcgagagccccctactgcgctttggccacaccccctacgcctcgctcccggccccgcctctgcccctgaccgcgcctgcgcaaggcgggcgccctaaagtcctatttcactctgttgggaggagggggaaaggtgtacgcaggcgcagtggcgtctaaatttgggcccactaaatgcgtcggagcatctccgcgcccaggcggctcctcctcactgcggcaacccgggaaaacttgtgaactaatcagaaaaagtggaaggcgggagatcttggggcgctgtccaatggcgcggaagagaacacatgagctggccaatcgggaacggcacgggggcgggctcgctcggcgcgaagttcgggcccgggaattccgaaggaggggtaggcgctgcccgcgcgcagaggccgcgcccctcctggccccggcttcttggctgtcaaacagatgcagcaacgtcggctcctgccgaggagcccaaggggtcccgggatccgccgcacaggctggcactgcttgaagaggaggctactcggagactgcgccgcgcgggtagatccgaaacggggctggggcggagtgggaaaaggccgggtatgccttgcatgatcgcggggagctccttcctgtttttatcccacctagagaagccgggaagtaggggtttaggtccaatttgttggagtacttaaggactcgtttgcactttcttttgggggatgacagtggattcattgccctcggaggttcaaccagttatgagtgagggattggccagaagatcggggcgcaggcaagcaggagtgctctattaggataagcaagtttgacaggaagaagctactcttctccgaattacacagaggtgatgtgttcgtattgcacgtagacgtgtgtataacaggacctccttccccgcgccccgccaccccgacacacacaggagctgcctaaagtatccttgccttgcagattggaggctccccaaatattttgcgatctgaggatccagctcaagtgaggtgccataggacgtgttcctgagtttgcattgcacggagaccttcctggaatttttcatttgcaagtcggcttaaccaattttgcattgagtcctaggctgcttgcactctgaatttgggctattcaggtagtgtgctcaaagttgaaaccgcatacagcacaactcaagtttgcatcagactgggaagcgaacttaagccagcggtgcgtggcccaggagtgggaaaggaaatggatgcctgaagtggaagaggtggtgcagagggggcaccgcccatgctgccctgcttccaactgctgcgcatagggggcggcaggggcggtgatctctacaccttccacccccccgccggggctggctgcacctatcgcttgggccacagggccgacctgtgtgatgtggccctgcggccccagcaggagcctggcctcatctctgggatccacgccgaactgcatgccgagccccggggtgatgactggagggtcagcctggaagaccacagcagccaaggtgagcattaagcagggcagctttgcccctgggtggttgaagcgccaggctggaatgagtaaggtctccacaagaccctgctg

SEQ ID NO: 584927 - DNA, 4001 bp, Homo sapiens
ctattctggagcaaaatggcagaatgatatcccagtacatctgggaaaagacacatgaaacaagaataagaatgtttacagataatacgacagcatggccagctcccacagcatgtcctctgtaaaggctttcttccatcagaatgaacccacactgccacagtgctgggtctctacctctagtttgcacttcttcatcttgcctcataccatgctttaccatcagctggtggtcaatctatctcccctcttaggattttagattccttattaattacaaatttaagtcaggatttgtcttattcactattgttatcctcatccctagcacttagcacactgctttattatttatgcactgtaggaactaattgcttacataaaaatgagtacgttctggaaactagggccgaaatagggtaaggagtttattccagtgaggaagggtcactagcaagcaagcctgagaaaacggcgtggatggatccctacctgcctctccgccctggctcctgcctgtcactggaaacatcccgttcccacatggtcacttgaggtctctgggtgtctagccgcctctctgagacatcttgatggcctgggggttggaccaggggaatgtctgagagccaggtgggagccattcttggcagagttgaaaggggccgagcttgaaagtgggaggggggaatcagcccagtggaacctgaagaattacaaaaacaaagatggtcagtttcccaggcagagacaaccaccactccccttgtctggtcccactgacctgaaggtggaaacatctccacattatttgaaggctctagattctgtctccagccatctatgttcccctggacaagaggagaaacaaagacactccaattcaattttcaggccaccttccaaagagaaagcccctacaataacaaagtcataatccttgaattatagccaggtccacccgatgcttagctcttttcctacttccccaaagtaggagataccccaaattcacttgcttgtctcaacctggttcctcatggaacccaagcaactatcaagtggagagaatttactgaaagagacagactgagaggggctctgaggctttactcatactttcaggattctgggcagtgcctctaccctcctccttaagtttctatggtccctgctgctcctggccagaggtgagaaaggaggtacacagtgcaggggtcttgagcgccatctccagagttctctccatggctcagcaaggcctgagggaagcccatccagacaccagcaggccatgactcttgggtccttccctgttaaagtgctggcccaaggcctggccccagctgaatgtggccacatgcagggctagaccctccccaagaccttgggaatccaggccgcctagatccccaggcagaaaagccagcgtcctgacatcttattcaaatctttcctgcggctgttctctcagcttctctctactatccccttagcttccatgcctgctgcccgcctcctctttctcgagtcctaacacatagtgggcactttaagatcttcctcccaccctcccaccctcattaatctattttttacccgaatctgggatccctactcccgtccctttttacaacctaatctacctttttctgaaggaattattctggtcctgaccctcacccccatctctcaatagcctgccctcgccccctgtacgctagccggctctactctcccaccactgctcccctagatacccgaggcttcacccagttagcccgtgagctctaaggctgttctgatctcttcatctgtcccttcacctggcccctgtacccccttcccctttggaccccttgaaccctcccaggacccccgctcagccccttcccgcccccaaccgactcttcccgaacgtcccttaccaaccgcgagagccccctactgcgctttggccacaccccctacgcctcgctcccggccccgcctctgcccctgaccgcgcctgcgcaaggcgggcgccctaaagtcctatttcactctgttgggaggagggggaaaggtgtacgcaggcgcagtggcgtctaaatttgggcccactaaatgcgtcggagcatctccgcgcccaggcggctcctcctcactgcggcaacccgggaaaacttgtgaactaatcagaaaaagtggaaggcgggagatcttggggcgctgtccaatggcgcggaagagaacacatgagctggccaatcgggaacggcacgggggcgggctcgctcggcgcgaagttcgggcccgggaattccgaaggaggggtaggcgctgcccgcgcgcagaggccgcgcccctcctggccccggcttcttggctgtcaaacagatgcagcaacgtcggctcctgccgaggagcccaaggggtcccgggatccgccgcacaggctggcactgcttgaagaggaggctactcggagactgcgccgcgcgggtagatccgaaacggggctggggcggagtgggaaaaggccgggtatgccttgcatgatcgcggggagctccttcctgtttttatcccacctagagaagccgggaagtaggggtttaggtccaatttgttggagtacttaaggactcgtttgcactttcttttgggggatgacagtggattcattgccctcggaggttcaaccagttatgagtgagggattggccagaagatcggggcgcaggcaagcaggagtgctctattaggataagcaagtttgacaggaagaagctactcttctccgaattacacagaggtgatgtgttcgtattgcacgtagacgtgtgtataacaggacctccttccccgcgccccgccaccccgacacacacaggagctgcctaaagtatccttgccttgcagattggaggctccccaaatattttgcgatctgaggatccagctcaagtgaggtgccataggacgtgttcctgagtttgcattgcacggagaccttcctggaatttttcatttgcaagtcggcttaaccaattttgcattgagtcctaggctgcttgcactctgaatttgggctattcaggtagtgtgctcaaagttgaaaccgcatacagcacaactcaagtttgcatcagactgggaagcgaacttaagccagcggtgcgtggcccaggagtgggaaaggaaatggatgcctgaagtggaagaggtggtgcagagggggcaccgcccatgctgccctgcttccaactgctgcgcatagggggcggcaggggcggtgatctctacaccttccacccccccgccggggctggctgcacctatcgcttgggccacagggccgacctgtgtgatgtggccctgcggccccagcaggagcctggcctcatctctgggatccacgccgaactgcatgccgagccccggggtgatgactggagggtcagcctggaagaccacagcagccaaggtgagcattaagcagggcagctttgcccctgggtggttgaagcgccaggctggaatgagtaaggtctccacaagaccctgctgcctgcctcccatactcccatcagattggatggatggtcgtggtccagaccttcatcttcccaccagaagtgtgcacagtcagaagctctctgccagactgaccctttttggtcccgtttagctcatacaggacctgggatatcatcagaaagatatcacagtggggatgttctgaggccactagaggccaagtttagacttgattcagtttccagctttgctgaggcactctgttcctgggttagggcagttctatgttgaataatgtttttaataatctgggcatgtctttctccgtgacttgaggcagttagcctcagaaagcctagattcacatttgagttttgccactgcctcttggtaaagtcagctgtaggagtgttatggttattagactatagtagccaacattcatctagtgcttactgttatgagccaggccctatttt

SEQ ID NO: 584928 - DNA, 4001 bp, Homo sapiens
gatgttaaagtgtgaaaacgtgcatcttagaagcatgaaatatagcatatttaatatcaattgccctctttcaccaaattcacctaagacaatggcctttcataatcttttcgtttgtttttccagaattgtcttgtcttccacactcgttaccttttccagataagaaactccatgactgctcaagggatttgagcaaggcaaagtggtcccttcttttaggactatttgaattgggagaaaagaatagtttcaaagaagtacacttaactttataataattttatatttgaaaagtgaaaacatatttttagaatgctatgaataaatgaaagcataatgagaacactattgaaaataaggcaggatcttttttttttaagttgaaaaactgaaaaatcaacagtcagctacttgtcaattctctcagcttctttcagagtttatcagaatatctcttctccactacctaaactttttttttcaggagctctaactccaatacctaaactttcgatactttaattttgcccaagcaatatttcagtgtgtgaaaacaatgcaacatatatacacacacatatatatatacatacacacacacacatatatatacacacacacacatatgatcagtggtaaagcttctttaacatgtcatctccacagaatcactttatagcaagaggaaaacctgcttttccttaaataggttactgagttcattgtttctttttttctctttgcaaagggctaaaaaatgaacatcaggaacagatcctattcacagaatcgaaatttaaattacttactaatgctttcttagcataaaaaattataccaagataccttgtcaaattctgttcatctttcaactatacagtggaaagcctactcaaatgttcaatttaccccataacgcaccttcctgcctgcttaaacaaatgtatttagggataaatgtttttaatattattctagctctcacatggtcactgacagaaacaagaacttattcatgaaaaaggttaaagaaacaggtaaacaaagtcactggaaaaataggcctttaaaacaaaatataaagcacaggctaatgaaatggataaatttagagggcacctgccctataccttatcaatataaaactccatctagacataaagtacgcgcaagaagcggttagtaggcagaaacaagccagactctctcctctcctcataatattaaatccactcaagatatacagtgaatgacaaaagaccacgacgccgatcacccgaagaaaccccaggtaaaagcacgccacaactgtcctgaacaggtagcctcacagtcttgagctgagtcacacttcccgtacctgtgcccactctatccgaccccccgcggcctagctaaaccaagaatccgaaattaaactccgaaacgttccttcccgggagacgaaactctctcccacccctccccctcacagatccttccctccccgaaactggggctgggggcggggaggggagtcgcctcagaaaagcgcatcttgattctgaccgctgcggtctcccgtgaggaccccggcactcggaactgagctgggatccaggcccaggggagtcacaggccccgtcctcacagctcccccaaaaaccggccccaggtgagaagacggaagatcgcttactagtgggagctctgccaaaagttccctgccatggaacacagcttgccctgataaaaaagcaccagccggcggagcggcccgcggagcgaccatagacccagcccgtccggtaaccgcgctcctcgatcaaatcagctcggctcgactccgctccgcggcggcgacggcgaaaggaagaggatggccccctagtctccttcacgccggccgacaacactcaactgtgcaaacccgttcctatcgacaaaagttccggcccgcggtagcggagggagccggaggggaggtgctgacccttggaggtgctgagattgaagagaactagtgttcacgagagctcgcggcggttggaaggctctcgcgagagcgtcttgagaattctggccgggggcccaagccgctcggtctcctgtcttcagcacgggagttgctgagtgggtctaacctaggcgaagtggctcagatacggggttctgttattacctcttccaggacttcaaaaacagaacaatgtggcattgtaataaagtacaaggttttgtgacttatttttcctgtgattggaaagagaaataaatgaagatgactttgttctcagggatcaagtgttccttttttttttttactttatttatttatttattttgagacggagtcttgctctgtctccaggctggagtgcagtggcacgatcccggctcactgcaagctccgcctccaggagttcaagcgattctcctgcctcagcctcccgagtagctgggactgcaggcgcgcaccaccatgcccagctaatttttgtatttttagtagagatagggtttcaccatgttggccaggatagtctcaaactcctgacctcgtgatccgccctcctcaacctcccaaagtgctgggattacaggcgtaagccaccgcaccctgcctgttttttacttttgagacggagtctgggtctgtcacccaggatggaatgcagtggcacaatctcggctcacagcaacctctgcctttccagttcaaatgattctgctgcctcagcctcccaggtagctgggattacagggattacaggcgcgtgccaccacgtccatctaatctttgtatttttagtggagaggggatttcgctaggctggtctggaactcctaacctcaggtgatccgtcagcctcagcctcccaaaatgctgggattaacaggcgtgggctaccaggcccggcctggatcaggcggtttttttttttttttttttttgagacggagtcttgctctgtcgcccaggttggagtgcagtggcgctatctaggctcattgcaacctctgcctcccaggttcaagcgattctcctgcctcagcctcccaagtagctgggactacaggctcacaccaccacgcccagctaatttttgtatttttagtagagacagggtttcaccatgttggccaggatggtctccatttcctgacctcgtgatccgcccacctcggcctcccaaagtgctgggattacaggcgtgagcaaccgcgcccggccgcgatcttttttttttttttttttgagacggagtctcgctctgtcgcccaggctggagtgcagtggcgagatctcggccgcgatcttaatggagttattttggagtgataaagtgcaaacttacagagcagcggaatcaacagttttgcagaacatctaaaaatattcatgcatatatgtatgcacatgtatgtacatgtatgcacctaatagaaacatactgcaaaaaaagccataatttaattttacaagacgaaatattttgtattttccatttcattttcattgtagcaatgcatttattgtaaaacttataattatttttctaaataattggacactccagaaacttgtttatagacagtcagcatctgaggcaacttaagacagtatttttcacattgtaggtggagaccaattagggtgtggtaaaattaagtataatcattttcctaaatagaacagaaaatactaggtaaatcagaaatagcaaggatattatatttaaatttggttcagttatatatgtgtgtatatacatacacaaacacacatatacacacacagtcaagatgtgaaatgcatttgtttgtatgtgagaattagtctgcatcaggtgtggtggctcacgcctgtaatcccagcactttgggatgccgaaatgggcggatcacttgaggtcaggagtttgagaccagcctagccaacatggtgaaaccctgtctctactaaaaatacaaaaattagcggagtgtggtggcgtgcacccgtagtcccagctact

SEQ ID NO: 584929 - DNA, 4001 bp, Homo sapiens
agcctcccaaatcaagtgacctaggtttaaatcccagctctgccatttgtttcttgtgtctgaaggaagattacttatctccagtgcctgcgtttcctcgtctataaaatggagagaatcctaatgcctacctcataggactatattaggaggtttaaatgagatatgatctctaagccacttagaagagtacctgacagtgttatgtaactgttagctagtattctaagcccttgagggaaggggaagccggaaggagaagatgtttgggaccatggaggtcatgatctcaataactggcatagactagaactctgctacaattatcagaggctttcagtgttaagttccaggggaagaaactctgatttgattaccatgacatccccaacagctgtgggaatagcctgtgcagatggagtatggccatagcaaataggtgctgaatgaattcataaattgctgtgtcagtcatttcccgaaggagccccagaattgaacggccagaagaatctgtgaggaagcaaagggagatccacttctctatccacgtctggtcccaaagagaaatgaggtggtaggcagagggcaaggactcgtcagaggaaacagtctcagagtccagggatgaggagggggtgcccaggattgtgtggactgtcacatcacccccaggtggaccctcccagctgtacccagctgggaattcctgggttcttgggacccagcccagaaaactgccttttctgggattcatcctgttcattcccttgatggttagacagtggattaaagggagcaggaattgtttctgggtcgcccctatattccagtgtccaacaccacagctggggttcaatccagttctgtggaataagtgcccccaaagacttctatgcttttcatccttctgaacccaactcaaatgtccttttctctctgaagccttcccagccaccccagccagtgtacttggcatctatgtctattgttttgtgatccatattagctgtggatgaataacatcattgcaccctcagcattccatataatgccaggcacatagtaggtgttcaatcaatgcaaatgaataacttaatgctcccttagtaacagcaaccaatttattcagttattcctcttgttggcacttcaagagacacagaagaagctaagatcatcatctatgtatcaatcagacaccactgaggggtccctccctccagtttcatcccggtgcacttgccagagcactcacagactccccatccacactggtctgccctcctactggccttccaccccatctttgaggcatgagaagaccaacagcccggtaaagccacggggcttccagatcagctggagggggttgtgccgatgtgtgtacatacagagggctcagggcctttgggggtttctctgcccttcaattccgtgcagaacacctcactcagtgggaaagtgagccaagctttcggtgccaactaggaagtgatgaggatgcggcgaccccattgacccacccagcaccgatccccaacgcatggtctccagcctgagctgacatcccatctaccccggtttctccagcacccaagcctacctcctcgtcaggtgacctccccggagcaccgactggggtcgcaggcgctctgtcccgccgcctccggagcctgcctttggggagtgggggtggtcgcaaccaccagccgcgaggagaggattgcacctctcccccccggccggcatccgaacagagccagtctccacccctgcagtggcgaagtgtttacaaagtccgcgccgcgccgccgatccagagctgggcaggaagtggggaagagggggcggaggagacaaaggggctggtgctctgctcagccaagtttcggtccccggcctgactctcccaccccctgtacaccctcggcgaggccaggaggctcatccggcgccgcgcacccccgcccgcagcccccgccccacgcggcataggtgcgggggcggggcgccacggaggctcaggtgtgggcggcggggccggggcagcacgggttcccggaccgctgcctcccggcgttggcaactcctccacgtgctatccaggaagtaaacaacatcatgaggagcgacttctttttctttttcttttttttgagatggagtctccctctgtcgcccaggctggagtgcagtggcgcgatctcggctcactgcaacctccgcctcccggattcaagctattctcctgcctcagcctcccgagtagctaggactacaggcgcacgccgccacgcccggctaattttgtgtatttttagtagacacggggtttcaccatgttggtcaggctggtctcgaactcctgacctgaggtgatccacccgcctcggcctctcaaagtgctgggattacaggcgagagccaccgcgcccggccgatttcttgactcttactacacgtcaggcactgtgacagactctttctgtgtatcatctcatctttcccccagctttacagaagaggaaactgagacacactgaggattaaggtcaagtgcccgaagtaccatagctggctagtgttaggatccaagcccagaatctgcgtcctgccaggcacctgcaaatggggacgaacacggcgcagctagaggggctgacaggctagggagaaaaccactggtagccgcgggcaccccacgccctgggagtgaggcggcaagggacaagtctcccgccccctagacttgcctcgcaaatacttgcgggtcgagggcgcgaaggcagcaggatgcagcgatagacttggactaggtggtccaggctctacttccaagtgggccattgacaggcggggcggccctcagcacaaaatcaccaggctggatgctccagggtttcccaacattactcgctcagaagaatcatctggggagctccttaatgagaaagattcccaagcccctcttccagagagtgaagtcactgggattgggctgggcccagccaggtgttactaataataagacaagtttggaaaaccctgcgagtgtagatgatctcctggtatgctctttataagaaccgattttcatattaaaataggtttcttttaactcagtgaaaccgggcgcgttttcctggcccacaaccaagccactgaaggccccagaacacttcactctcaaaaggtcacgtgaggctggcgcggtagctcacgcctgtaatcccagcaccttgtgaggccgaggccgcggactgcttgagcttaggtgttcgagaccagcctggccaacatggcgaaactcggtctctactaaaaatacaaaaactagcggggcgtggtggtgcccgcctgtaatcccagctactccggaggctgaggcgggaggatcgcttgagcctgggaggtggaggttgcagtgaaccgagatcgcgccattgcactctagcctgtgaaacggagcaagactctgtatccaaaaaaaaaaaaaaaaagtcacgtgagccggggtcaccggaggcgtcccccaaccgactgggcttcggaaaaccaaggggcgcacgccgccccgccccgccccgccccgcgactacaagtcccatcgcgccccgcgctcgcgcacactacgccagaacaagatggccgacgcggcggccacagctggggccggtggctccggaacggtaagggcaggaagcgcgggctcggagccgagagagtttgggtatcctgcaactttcccctcgactgagcaacaagataatgcccagaaattcagccccatcatgagctccgactggcggagggtgttttcaggccgtaggcgccccctccttgggacttggctgcggcctccggagttggcggacctgtgtcttgattggctcgttcgctgttgggggttgggagcccggaacacccccgattggtctgaagatgccgttttcgccttcttattggccggccaaagttgaaaggcattcccgtttcaa

SEQ ID NO: 584930 - DNA, 4001 bp, Homo sapiens
agcccttccttaaagcaatcagggcctggctttaattggctctgggaggcttttctatcacaaagtccacatgaggataaagactcaaccaaggcaaaaccccctcccccacatgaagcacattccactcccctactccagtgggggtgtgcaggcatgcccttctgctgccaataaataactcatggtggctgcgtaaacccagaggcaaagtactagtgagtgtagacatgcaatttgacttgttgctatctgggggaaagaccaggaaggagtggcatcccctggaggtcaggaggagggggtttaatgcctgcctgcagctcaagcctgggcgggagtgatactaaccatcacaccacaatgccccatcgtttgttccaccccaattcctttcccaaaggtcctgatccccttgcttcctctccagggggcagaaagcctctgatatctcaagctttccttttcctggaaagtggggagacaatacgtgtcgggggtggggggagttacacacgcacccgcaactggcggggagagacagcgtggtcggtgtagatgcacagtttttcgatggtcaggggcgtggtctcgcgcagcttggaggccagcagcatgcagaccgcacccaggagctgcaactgcgcctttcgggtggggacgcaagacaggtagcgatccaggtagttcatggccagggggaagacttcctcctcacagcgctgctcctcacatacctgggggagggcgcacagtcactgctgggtctggagcgtggggaacacagcagcgggggggtgggagcgctgaagtgaggtgggatagggagcaaaaacggcagagagggtaagctacttagagagacaaggaccaataaaggaggaggatgcgccctccccaaggtgacgccccccacttcctctgcgcggcctcctcccctctccccttgacgggggagtggtaaagccaaggagcccttgctcacggaggattccaaacggagactcccctcccccacagcgaggggaagtgggacgcaagggtcacccatggtagccagagagctgggacctcacccccatcaccgccaccactgcacacacccgaggggaagggaggaggctcctgccgctgcctcctgcacttttcatttccctgtcggccggaacagggcgcgcgccacccccatcgccttccccgccagaaccccgcgaaagacacaggaaccggctcccgggcgggggcggccgagcccagggttttccaggcgcgctctccggagaaggccgggaggcggagggaagcgggagacgctgtgagaagccgaaggggagagagtgtccttggtcccgtttgctcggcccgaagagaggcacagttagggtgccaagtgactggcagtcactgtcgggaggagccgattagggctcgggaaagcaagggaggcagctggcgtgggtgccctagtgaaaggccaggccccgggagtcttagcctcggagcatcctgcagattgctgtggggaccgggatgtcccgacagggcggccccggtgtgtccagacccgggagcggtgggggagggggacgcgtccgggcggtacctccagcatccagtaagccagcatcttccgcatgtgcggcttgatctcccgctgcacgcactggaagtaggaggcgcggggtacgtagcgctcctccaggcggagcaggctctgcaggacacgctggtcccccagcagccgcgggtccggcccggcccggggcgcgtgccgggtgccttcgcaacacagcagctccatactcgggcagcgaacaggcagggcgggagtgcgggctcgcgagtcccaaggcaggcgacgggccggagagcgcggggcgcgggtctggcgctggcgctggcactgcgcggcggatccccagcccgcccgccgcccgcgcgcgcgcgccgcttccctgacaggcgccccgcccctcgcgacgatgtagcaaccgtggaatgctcggacgtcgcaacgctccgaggggcggggctgcggcgccccggacggaaagggttggctgagcgctctcccctccctcccgcggccccattgggccgctgagcgcaagccggccggcttccgggcactccaggccctctggaccaccgggtgcagagaactttctaggaggtgggcctcctacccacccacgggccctcccattttgcttctcggactctagtcacccaggaaacaatttttctccaaaggtcattcattcacttattcattcgtcaaaccctacttcaccggctgcttgctctaaggaatgcgataaataatgtcagagctagttcttagtgaacgctgctcgaaagcctcacgatgtaatgactcactacatcttcacgaaaactcggaaaccgaggcaactgtcattcagttggtccgtggcagagctaggattgggaagctggccttcttgctgcagattctgtgttctacaccattgctagttaaactgtgatcccagacctgtcccgtgcgtggtcatcgcctgggagctggttagaaatgcagactctcaggcccacccctaacctgaatcagaatctgcattttaactagatttctgtgcactttaaagtatgagagctttagtctaagtcagcatataacagaacggaaaggccatggagtcatggcctcaccttgttaagttgcttgcctaggtttggacaagcccctaaagtcggccttagtttctgtttggagaaactgtggacggagaaactagattctcattgaatcagtttcttgcacagactctgtgagatctaccggttgcatttcttccacctcccaaacttttggttactttgtagttttaccggaagctagattccacttgacgaagaggccgaaaaagacctccaataatgctccaaatgggaggaggccatgaggatccctgccctactggggtcctcctgacttaggagacactaaggaagtgtctaaccattttctgttaattattcttttttttttttttttttttttttgagacgaagtctcactctgttgctcaagctggagtgcagtggtgcgatctgggctcactgcaacctccacctcccgggttcaagcaattcccgagtagctgggactacaggcacgcaccaccatgcctgactaatttttgtatttttcgtagagatggggtttcactatgttggccaggctagtcttgaacccctgacctcgtgatccgccggtctcggcctccaaaagtgctgggattacaggcgtgagccaccgttcccggccgaattattctttcttatattataaattgtattgtagttttcatatcataaaatattcttttacattgtagaaaacttcaaaaatacaaataagccacaaaaaaaggaaataatcatttgcaatttgccatgaaataaccctttaatatatcaatgtttatttttctaatctttgttctatgaataaacacacattttaaatggaatcatcacaaactgttttgtaagcttttttcattaaaaaaatactgttaacacttttccatgctattaaatattctaggacataatttgtaatagggacataatataccattaggtgaatgtacaaaatgtattttggcaaacctgtattggtggaaatttaaattatttctagttcttctctattagacataatactgtaaaatatttttgtggtaatatctttgtgcacactcatgattatttctagaagtgaattaatttctagaagtggaatttcccaatctaaggttatgaaacattctaaggcttttgatacacttctaattgccaaattttcctgctgaatagttaaaccaatcttttccaccatcattacatatctatttttcaaaacaactctgccaactagagagtgaaagtggcttattagtaataataaatctattttggcatattactagacatttacatttcttatgtac

SEQ ID NO: 584931 - DNA, 4001 bp, Homo sapiens
gctgaaggatgcgctgcatatttactgtattttactcagcaacacagcaatgtccaaccaacattttggtcttggggaagcctattccaaattaattttcaactaatcattttaaacatttaaaacttgggatctgatgggtgaaaatattgctaagacatgtgatgagatttctggctgtctccaggggagctgggcgtcgtccaaccctgcctgggccccattcgtggagccgctggggacgtgtgctttctcatctgcagcagcacaccaaattccacactgagatccttccaatacttggaactacagtatctgcttccgcattaaatgggcccatgtgaggtctactgagttgccctctctgtgttttggggttcttccagcccacctcttgactgcacctggctgtctgccattcctcatcacttccagcgtgcctgactccagcaggtgacattcccactgaatgtgctgcttccaataagctctgggctgggaaaccaaacagcccccccttatcagaactgtgcctaaaataagagccagtgtatctgaatgtgcacctgagggtctcccctgggagaaaaacacaccaagtttgggtacaggcttcgtggtatctattttggtgcagagtctctttgggttcatttcctctttctcaggctgccttagaggttgatattattagataagagagctccaggtaagtcaggcctcagagggttcagatgtttaattagagaagacataatgcaaaattacaacaagtgcatccgagattgttatacaaatggaatcgcagtattgttaaatgacataaatgcattcacccacaacacagtgaaactgattgtcactggtttatcactttcacttgggagacaatgctatcactagaactccttctgatgcattgcagcatcaagaattctcttgaagcagacccatcagtgtatccagagacacacgttccagacacatctgtgtattccacgaggctggctctgggcttctctgtgtctcccccacctcaccccatcccaccttcgtcagcacgctgtggctctttcctccctcctgggatgtccttctcacctgtgatgccgcctgctgcccttgttcatcccaacctccctgcacaaagccagcccctccaccgagcctcattcatgttagatccaccagcaccccccattctgcagcagccacagcccccagggtgagaagtttgggagacatgttccattttggtctgtgggatctgcatttcttccttatagttatggctcatagagatgactgctctttcaaaggtggttgtggtctattagagcgtttccaatgtccccatacttctttctcgagtgctagtcaaaagcgacttgcagatggtatggaatgtctttgtgagatagaaagaacacagactaggatcagaaaaatctgcctcccaaccctccatggccatcttctggctgtgtgactttaccgccctaactctttaaaatagccccacacctacctgccaggattgtcttcagaattacataaaataacacataccaaagtctctagaatagagcatgtcacataatagactcaacaaaggtcagcatctcttctttctttttgggatgactaaagtagcctaaataaataagtattcgcaatgcatgacttgataacataaacttttgtaatactctattacctccaaagcataaaacaattattgagacaaaagaaatacaatattttctaagttccaagacaaaaaaaaaacttaccaataaagaaggagctgtctgttccacaaaccaacagccacagttttttctcttaaatgtcagactttgaaaaggttgacatttctgttcaccagcatatacacgtgggccctctcttactgatgaccacagagtcctggggaccttcctgtgctcccagcccagctctcctctccggccacactgctgcctccttcacccatacactgggtggtgtgctgggctgccctccttaccacaagttttattcctcagcacacacttcagatcacagaaaggagacaaataaggtggaggaaggaagatgggttgatgtaactaggtcacttggtaatttcaatttcagacgtaaatttttctttgtttcagaattattgatctgtggaatatttcttgattcttcttggaaattacaaattaattcaaatgattgtaaagttctctgaaaggctctacagttttcttaagagaataaaaaaacctgaaaataccatatgatatatgctttatgagtaaagacacagtgaatagagaatcagtatctcaccaatatcccactgcaggtcagtggcagccacaaaagaaggcataccctaagcataaaggagaaattccaccctcaaaatactcatgttgttttgttagccattttctacaatctgtggccacgtgtcacaacttgaccaatttgaggacgcagaaacccctaagtttccatactcccaaggcaactgtcagcgctcagcttaagaacaacctcgtaatttaaggggaaatctaggttaccttctccacttaggtctataataagcaagctacaaatcccctaaggaaagtccaaaattgttgcttgataggaaacgccaacggcttctgcagggacagaagtgagagtctacaactctaggtcatccacccctctccttcctttttcaaatgattataaatagcattgttaaatgttaattaatgcatgtgtaatacaatttagaaagtacttttcatgtttattacttcatttaatcctgacaaacaattttgggagaatggacattgtgaccttcattttgcagatggaaagaaaccagcacaaaacgcgttgagtaacttcccaagaatgtatgagccaggagtagtgaattcagaaaataagccctaggtcttccacgtcctctttgtaccacacggcagtccagcgattcctccggtaaacacttcctcatgcccaccgcgtgctgggcactgctccaggcacaagggatacggcagtgactaaaacaagtaaaagtcttggcctcctggggtttccattttagtcatggaacacaggtaacaaccaaaaaaaaaatgaatgaaaagatacgtagtatggaagttggccaataccgtggagaaaaatcaagcagggaggtgcaactgaggcagctgcaatttcaatgagggtgaacaggggaggtttcactgagaatgtggcatttaaatagagccccagaagaggggaaggagtgagccacatgtgtacctggaggaaaagcactttgggtgaagtccttgatgcagaatttgcctgacatattcaaagcaatgaaggagctcagtgagggtgaggtgagccagggagggatgagagctgtagtcagaggtgaggggccggtcgcagggcctcacagtccaccacagtgactttgcctcctccaggggagacgggatgttactaagacttcggagtgacattatctgacttccattctaagatcactttggcagcagtgttgaaaacggattcaagggatttcaggcagaattaagaagaccacccgggtaggatatgaggggaatattttggaaacaaactcaacaggatttactggcagactggatgtgagatttgacaaaagaacaagcacagaggatgggtccaggtgtctgccctgtgcagtgaaagctgctcattcaatgcgctgggaatatgaggaggaggtgggtctggggtgggaggcagtgttcacaggaagccggttagcaaattgagacattaaagcagccactagaacatcccagtgcatattcacaagagccaagacatggaaccaaccgacgtgtgcattggcagaggaatgggtaaggaaaatgtgctgtctatacccgtggaatgctacccagccagaaagcagaaggaactcctggcatgctccgcaggatgggtgg

SEQ ID NO: 584932 - DNA, 4001 bp, Homo sapiens
aatcactggtttacagctgtttatctcttttaacctcacaaaaccctttaaggtagacatcatacccattttacagatagcgagtgtagctcatctaggactgtgagtactggtgagactcccattactgtctcttactcgccgttctaattcaccttgccaccagcaggtcttagtgaaatgccatagaattcccacaagatcttaaataatatatttattttaaaacatcttattgatatcagagttttgcatactgtaatggtaggtgttcaatacatttatgttctctaagtttatttgaatcatgggcccaccatattttatacctttttagataagcatcagtggagctgaaactctaggctggcttccttctgcttttgaatgagagtggctaaggaggagaccaggaggtttgattttttttttgttttcccccggtgatttgtttattaagcttctgtgggttggttttttttttttttcagttcctttaatttctttggaagtttgcttttatgttttctgttttatttgcagaaattacatctttaaccatttaaagaatagctttagttatggccttgcatttttgtttttctttataaagctgatctctacaatatctatgtcctgctgctaagtggactttggagctgatctccggctggagtgcagtagcgtgatctcggctcactgcaacctccgcctcccaagttccagtgattctcctgcctcagcctcccaagtagctgggattacaggcacatgccacaatgcctggctaatttttgtatttttagtagagacgggattttaccatgttggccaggctggtctcgaactcctgacctcagctgatacacccagcttggtctcccaaagtgctgagattacaggtatgagccactgcacctagcctggctccctttaatatcattgtgtattattttctggtcataagatactgccttcataatcacagtggcattggcagccctcatgagagctttgcaactgagacttgttgaaatttccaccttgtcaatttctcttaactccccctcacaagctccttcctgctcaatcttaggctgtccgggatgcccactcatcagccttcattgcataaatgacttactgcctccaaaatatttcttagcttaatttttttgttttccaaaatctttcagtgtatttgatcaaataaagaatcacattcctctccagactgatgccctgaggatatctcctgtatgaggagcaagtacccagaccatcaccgaagctccagtgcagggagcgagtatgaaatcccttactatacacttagaggaaaagtgggcttcctaaaaccataaagtcaatgctttcaggaaaggaagtctgtgtcgttaagcataaacatggtcaatatgccagcattctggaagattaatgagtaaaacagtcccattcctgtcagactaggggatcaaagaagttacatttttgaaagaaaagtctcaggggccttggcatgctcacctcaggcagtgctctgatccactcccttcagcctcactccgggccccacaatctgatgactccagctcaccaatgtgatgaccatctgtcaataagatgcagcttctagcagtcattaagaaaaaagcggtgagctactagaattgcccaaaagcaagttctggattgccacttcctattgaaaagtaacgcctatttgcccaaatgcaaatggttaaccatgtatatcctgtagggtattgagtaatcgtaggatccctggaatcaaagtccaaccaatggtaaagtgataagaaaaagagaggcattgaactccccagaggaagacagcctttgcatggttttcaatttgcagcaatgagtttgtacccaaactttcatactcctttacctggttatctcctgggagcaaggagtctctgcaagccgactgggaagatttgggaacgtttgcaagaggccgtgtgagttaaagacatgggccgggagcacttttgtgtggagtcagtcagtcctggccccaccccgaaagctgtgcagccacagaagggccactgagccccagcaagcctcggtttcctctttcagaagaaagaccatgacagctctaacctcagagggttccgagaaatagccatgcccgtccacggaagccgaggagcagcgcctgaaggagaggtggttctccatgcatctcagctattattacaagatactttgagagcaacagaggagctcctcaatcaaaagcgggcacctaatcttcatgtggcacagagacagaatctctgggtgacgatgcgggtcactgccctgtctttagacatatcaaggaaagcagctgacgacaagtcactcagaaatttatttgtagatgcaagtgcttaaaaaatagaaaagaaccctagaatcacaaggctgttcgcacctgggttgctgtgaaccacgtctcaggaaataacaaaagttttacagacaataggttcgtgatcaattctcagccagcctgatggactcacactttctccacttcccagtgcactgtgcctccccacccccaggctgcccacgaggctccactgcccgctgcccagctctgctctatcttgaccacacctcacctgggtcgctccttcctgcagagccctgagctccacgtcctcacgcctgagtgagcctgagaagctggagcgcaccccttatcatctctctggggaaccagctagacacagcaggacctgtgtcctgctcaaccccactggccattttcccgggtttgtccagggtcccctccaaagactctgctggccccagtggctcccccttactggataaaagaagggccttttctgtttgaagtgcttgcagacctatggtcacggggtcctcttgctgccatcattcctctccctgccttacaacaatccttccaaacaaagcctctcctgactaagtcctggctgttttcctctaacagagctcacaacttccttcactctgggtgacctgtccctcctccatctgagagaagccctggggcgctcctccccagtagttcaccccaacccgaaacctgctgattattggatggcgaacaaagcaagaccctcccctctgctcttacgacccctcccctgctacctcagctccatcccctcctcctcatttctaccatcgcccctgaggcttctgcttcctgtagaagggctgcccataggaggaagaaacaggccaccaggtaacacacccctcctgcgttctcaggtgccctctaacactgcccttggatggtcttgcttagcgtgaaggtaagaaagtaagcccttttatagatgattagccctggcaatgcctgcctggaaagaaaagaaagaaaacgaaaaacagattggactttgctggggaccaaaaatgaacattaattaagcagaaatgtaacgtgttgaacaaaaccgcgttgtgtggccacgcagatgctgagggacccaggaggcccaatgacacccccttccttgcagaacaaagagattcatggccactgtgggggccccttctgttagactgcacagaggcagggatctggaggtctccaagagtggcctcctccctgcaacaccctccctgccccagaggggaaggtagtggatggagattgagaccctgctgctgactggctcccagcctgggctggttgcctttacttcgagagctgaggtggaagctccatatggcactgacctctgcaatgtttctcatgtcctttgccccatattccttctgtagttccaagtcaaatctaaattatatgtcaccctgagaaagctgagacctatttggtttttagctctctaaaaatgcccctatattaaagatcctcttagatctcactcttattgaaacttcctcaaatttaaaatcacactgttcatttgcatagacactgtgaggtgcataaaaggcgaggaatgtgg

SEQ ID NO: 584933 - DNA, 4001 bp, Homo sapiens
[379 bp omitted]agtgagaattaaaagtatattaggtaagatactgcaaatttggggtttctctgctatactacctaacacatgaccttattaacatattccagttattactgcagaagggtaagactttatgctgtttatcttacctttttcaaagactccttctgcttccaggacagagacagtgaggtttgatgctgtcttgagcagctccgccttcacagtcacctgtgaagggcagtgttccagaagctccaccccaatagtcacatttcctccgggcctgatgatccctggggctgtcaccagaaaccgaggcctaaagagttcccaacaagggaaaaacaaagtttcttatcctcacatctcctttcttttgtgaccctcagatttcctagtgcgataggcactccatactgcgccaattgcagttgtttccgttaacattgcccactgctctatttggcaactgaattgaaatgctactgaaacaacaataattcccataaatcaattttaatgcagtaattcatgcatcactactagaggaaggcctgtgttattatttccattttataaaccacgaaccgcacagaaggaaccatgatgtaaatggcttgcaccggggcataatggagttattggcaaagcaaaagtctctaagcttctcctttacagaggaccttatcccagcgtgattattttcttgttgttgttgttattttttaactaagattttgcctgtttcttattcaaacctttatccttgagtagctgcccaacgagggtaaaaaattatttaaccaataccattgattgaaatataccatttgaaaataaactacaactggtgaaaattccaggtatagcgaatcataaaagaagtcactaaagcagcactttctctgctataactaggggttagggctcaactacagaaatctttaggaatgaatggggcttgccattattgggtgctgttgttttcttcctataatgtctgcccctgaacccatacatcagtcccctccgccacactttggcaatgctaaggttgagacatcttggttagaaaaaatatatcatgtctttgagagaagaatcgcaatctgggagcaaaaagttgagaagcaaaaggcagaggcaatgtggactaaaaataaaatgactctcttcagaaagttgttatggccggggagacgcttaaacaacttcatgagtggagaaagttaactgtcccatggagagccacgctgaagctacatatggtcaaacctccaggccagtaccaggctggggactgcagccgcgagggcatttcccacccgctgctgcacagcagccgccacctccccgaagccctggcccagagccgcagagcggcccaggcccgcgcgcccgcgcgccccccgcgcgcccacgttcctacccgggagccacggccagcgcggcggtgcacacgcagaggaggtgggcggcggtcaggagcggtgggccctgcatctcgacggcgtctgcctgggctacagtccgctgccggggaagttcgcgggcaccgtggggtgtggcttgccacctcctccctgattttttttccctcttaattcgagtttagtaatctgaaatgggcgcgcctaacagcagagtgagagatctaaattgagacaggacttggaggctccacccctcccatccccattacaatggcgcttctcgctgctgtggcaaacatcgcaaatccagggggtgagaaagcagttgctaaacgcaggcggccccacctggcccggcgtcccagctggccgcggagaacagagcgcgcccacttccccggcccaccgggttcctcaggctgtttacactagcgctctaccaacgatgcccagggtgagtaaacaggcccatccttgtgaggagaaattcatagcaactatgtgaagtggaaaaaagtcaatcattgtcctccagactatgagtcagaattttagagaaacggcacacacacacacgcacacacacacgcacgcacacgcgcgcaaaaccggggcgtatttcctgggtagttatttaatgtatatgaatggaaacagaaaaactatttttccttaaaacaaaaaatgaggtctactgctttcctttccaggaaaatgttatgatttatcaccttaaaaaaaaaaagaagaagagaactcgcactgcagacgttaggtgttgctacttggaaccctgaaaaaaaattacctaagaagatgcctttatatttttgctacagaaagaatttggtagaactgtaaagcttggagcaatctctgaacacagttagggttgggttggctctcctgtcagaatgaaggccagtggccggtggtgcccaggagttattgatgcccaacgctgtctggcttctttgcagctcctctctcctgctctctggcactgccaccatcttcagatgactcaggtttcaccatgactacaccataaaagcagggaactgccagaaactgttggaaaacagacacattcagtccctgacaacttaaactttctaattcatggagcggttttagatggtagcattctaatatggggcaaaatgcaaacggaaaagaggtcagcaaaaagatgtctcatgacaaagctatgtgctaaataaggaaaagtgagaaagtagcacctagacaaactgtggtttggggaatccagaaacttgctttcctccctttcctgttccaccctttttctccctgctgaacagcttgcaaaggtccttatgtcctttccttcaggcagcctatctttagtggccaacttcctgtgcaggcaggacttaggaatggtcaaaagtgtctgtgtggatccctgggtgctgacctgttcctgacacagctgttactactggtctcctcacctccgttgttcagagaggaggaccatggtcaagggtgggccaagcaccaaggtctaactcagtgcttctcacatgccaatgtgtgtgagaatcacatgaaaacagactctgacttggcaggtctggaacgaggactgggattctgctttactttagcagacagtaggccatggagactctacaagtgggggcaatttgggggcaatttgatgagcaaaggcaattaagaacacagaaaattcttctcaatctttcacttcataaaggtggattaataaattcaggttcattctagaggtaggcaaacataagagggactgcaaaagattagatgataatgttgcctcccgagaagacttacagaaagtcttagaaccacattgtataaatctgtgtggattttaaagtgatgccaccttcctgtttatgccctccttcccacaatacacacttgtcgaaaggcgtagtcatgcaaaaatttaggcatatggatttgcatagagatgaggctattacatgcctggcacagagtagctattcaataaaaatgtgttaaaaggattaatgaaaaatgttcatctcagaagtgggattttttattaagaaaaactgaaaatgaggccaggcgtggtggttcacacctgtaatcccagtaatttgggagaccgaggcgggtggatcacctaaggtcacgagttcgagaccaacctgaccaacattgtg

SEQ ID NO: 584934 - DNA, 4001 bp, Homo sapiens
aagggttcataaagtaaaaataaattttctgaagtttgtatagataaaacatgctgtttaaaaacctttgtgcttgacgggtgtagcaaagtgaaatgtctgaaatgttctttacaatgaactaaacttgctacctttcagaccacactacatccacttatgatttccagaaaatacatacctcctttgcacgcacttcaattacacaaagacaaattaatttgatacttccaaccttctcttacacacacactacaattctgaaaggaaactgtcaaattaagactgagacaaacatattctgctctatcatcttaaaatagtgcggttagaattcccagtattatactgcaatttacttccctcgttttgaaatgttaccattacatcttccttaaactaaaaacaaaacattaagtttactatatactttattaaacttttataaaatactaaaactagaggagaatttgtagaatatgaatgccgtgataaaaatcattacacttcggcattcttcggtcaagaagccaatgttaactacgtaaacattactccttaactaatgttaactagaataaccaatcatacgagactgcaggttttaaacctctagtgtttctcccgcttattacctcaaacttatcttccttctctcttttgtgttgtcacggtatatggcaatttctgctttaaaatgtatgtatgccttaaccagccctatgcgactgcacataacaaaagacacgctcctgatcgggttttagaaaacccacagacctgggcacaaacccccgttccacgacctactaaacatacgctatctgagcacaggacatagttaagaaaattttaaaaacaattgaaaaaagaataaacatacaatgtcaggagagtttactcatctccgtctctgcatctacctcctaggtttcactacctaccttccagtttagccttaggatacgtacgcaaaacacccggtacatacatgggtacttttcttccttttcgcatactttgaagtgtgaagttttcactaactacgtgctcaaacgtcagctacattctattcctatctgcaaaaccaatgtaattaaatctcaagcgaccttctcagactcaagtctgagacacgaacgagcattaccgtctttaagtttctctttcccggacttccggagaaggctacctccggagagaggcgccgggagggtgaacaaccagtggcagggagaggcagctcggccccaccgccaacctcagaggcgcgacgcccggccccatcctcaaccccaccgctgcccccgcggaaggaagccacgtccccatttccgaccccaagtgaggctaggaattacgatgcacttttaaaaggcacctcgacttgcaacacttcgaggggggccccagccccgcagccactgggaaccgcgcgtccgcttccccccagcgcgctccccacccggcccggccacgagtggactccaggctggccgccatgttgccggagtcgccgccgcaccccgagcgcggcccgcccgcccgaccgtggcccgaacccgggccccgcccgcacggcgaggaggcagtgcggctcggctgggcaggggagggcgggaagcccacagggcccgcgcccacctggtgccggagtggtgaccagcgggagggacgtcaccggcgccgaggttacgttggagatgggcgctaaagtcgtcacgttcgggtgctgggtcgtgttcttgtccgcggacagcacgcagagcacgcccaggcaggtggcggcccaaagcagtgagcgggagagccgcgacatcgtgtcctcagcgctggcgttcgggagaaagctaaggctcgcaacgctcagtcaacccctcaatcccctgcggcgccgcctccgagactacgctcccccgcgggagcgcgcaggggtcacgtgagaggcccctgttttcggcgtgcgggggcgaagaggagggaggtggggctcggacgataccaacgggaatcctacggggggaagcaggggagtcgggaggaagccgaaggaacctggccctcaaagcgactgtgccacagccaagaaaactgggagcttctgcaaatcgttcttcttgccctcagattaccagacacgacgcagctggacttgtctcatgcctgcgatagggacggcccccaccctgacttgcatggaacagtcgacataatgtggcctactgcttccacctgagcgccccgccaggctgtaattccgcgggcccacgtgacctccggggccgcgccttccggacgcaactccactggggcggaagttggttttgtgcggctctcaagaactaagtttgtgctgtgctgcgggatccccagggagcttccttatatcttcggcaggaccccttctttttttcttgaagattgattttgctagaagttatcctgtgatgggactccctaggggaatggaggcaccacgtggttaaggagtttgtgcgttgccgcccacatagtgtgggcagctgaggcgccgcccggatcagagccgcagggcgtctactctgtcactttcccaacctgacttttccggattgctatttcagacggcggttgcagcagccgacctgtctcaactccaccactgtagtcagagaatcaaaagcggtctgagttgcgaggtcattggggaggcccccacccccacattaccagtgaggaaactgagacttaaaaaagtgacctgacctggacacgggattgcctgacatcagagctggattcttaagttcctgttagtgttaaggcgctgctcagacttttagtaaaggtgagcgccatctactgccaagtctcacaaaatattcgcaaaatttgatacggttatcacatggtaaaaattagactttaaaagttgtatttaatgctgtgttttcagctgttgtacacttatgtaattttaattatgcaaagttatcctaataatataggaatattaattgctttcgtgaggtctgtcttgatgtgccacgatgacttttttgatgtgccaaaaaagatgactacatagtgcttttacctttttgctcaaatagaaagattttatttccccttgggatcttttcagtgtcgtccttctgtaccctcaggactatgaacatttgttccaatgactacgctagttggagtagtgttgcttggatgtaaacaaaaagctgatagttttgactgatccagcccagaagcatgagaatgctgtcagggaagtgagctcccaccataagcccttcagagaagtgtctgctcttctctcaggaggcctctctctatatttaacacttgactatctggcacccagaccaaatgaaagcgcaaggcaactttaatttttttttaaggttaagaatgtaaataggggccggacgcggtggctcacgcctgtaatgccagcactttgggaggccaaggcgggtggatcacctgaggtccggagtttgagaccagcttggccaacatggtgtaaaccccgtctctcctaaaaatacaaaaattagccgggcatggtggcacgtgcctgtaatcccagctactagcagggctgaggcaggaggatcgcttgtatccgggaggcggaggttgcagtgagccgagatcacaccactgcactccagcttggggaacagagccagactcgtctcaaaaaaaaaaaaaaaaaaaaaaatgtaaatagaagctctgttctcagagcttggtgtgttatcttctttccaccctaggataaacacactcctctgtgcagaccattgtttaacaatttgtcacctggatgtttaactctagtcctcagatattcctcagtcctgataaagggacatttcacgctcttgttttaagactagaaaaccattggtttattttattttgcatggcaactgtagaggtagatcaagggagttccaaagtcattttcaccatttcagagagacagctttttttttttcagt

SEQ ID NO: 584935 - DNA, 4001 bp, Homo sapiens
cactcccatcctccaaacccgaactgacccaaacaaacgtaccttcttcgcccccgcccccgctagggtctcccaggcccagcccccggtctctctcgccggcgcggtgcatccatacaccctcgaggcagcgctgcgcggccccgggtacccgcacccggggcgaggttccccggatggaggatctagggagaccgcgctggtagcggcgacccgaacaaagcctggcggggactcgggacagaatcgtcccaccatgctgcctccccagaactagccaatctgggctaaaataacatggggatcctaagatgacaagcgatggacgtgaaaggttgcctcgcagagagcgcagcgtcaggagagggtccccgcctcggcttcagcccggaaccggggtttgtttaaaaagggccagatagccgtagcttctccgggatacccaatccaactccgagggtggaggatgggcgtgagccgccctccccgaaagggaccgtcgcctctctttgtgtagagcgcggggagcgcgaagacattcctaggggaaagcgagtcctcagggacccagggacaacgtccccagggagcccgagctctccaggcgctaatccctgcaggcacctcgggcctctgggtgaaagtgggaagtagtcacctggctgcctgggaagggacagcgtggaacctggggtggggcagggtcctctcagcccgcacgcggagctgcattgttcccagggccgtgggaggagggggggcagcacgcaagggaatggaaaaatggggtccacatggccctctcccctggtcagctaagcaagattctctcccggtccctgtccgtggcccgaggcaggagcgcaggacggtcccccgggaccgggtccatctcccctgcccccaccccgggaacggccctcgagccccgccgggcgccagggcctcacctgcgtgggtaggagcagtgccagcagcagcagccccagcccgagcctggccaccattgctctgcccatgtcccctccgtcggtgcgcggcgcgtctagcaggatgctgggtgcttggagaaccgctggctccgggcgggcgcaggcaaggtggggagcgcggcgagccggcgagaccttatataccaggaaagccacaatagccgtgacgtggcgccgcccgcccaccccggctcccctccgccgccgcccgccgcctccccgccttccccgccccgctccgggttccccagcgcccccgccgccgccgccactgccaccgccgctccggccctcgcgggccgggagccccccgggcgggcgccgctgcaggtgggcgggcgccgccggctgctggtacccggctggtatccccgcgccggctgcgggctgcgggcaggctggcacaggcgcccagcgcctccggcacaggacccggggcacacacgcgagccacacacgccgcgctgggggccgggcccaagtttcctttgtttcccgggacctgccatcttaccccccaaaagaaaagtccgcgcctccgctgcggcggggtagccgcctgtcctggagcaagtgcattgccactcagactgcaaaatgcgccccggggacccgagaggggctgcgaattccagtgcgaccgcgtggggggcgggcgccgggacccctcgggcagggttatctctcggcccgccgcagaggaaaggggaacgcggcgggcgtggcgcggacgcgggccggacgctcaccctggccgacgggacccgggcgccgcctagcgcgaacccttcccggctggtcggcgctcctcgcaggcggtgtccgggtccggagcgatctgcgcgctcggccccgcggccgcgccctccccgaagcccttgctttgttctgtgagcgcctcgtgtcagccaggcgcagtgagctcacgggggcgtcccgggtccgcatcttcccaggagctggggagccgctcgctgggcgcagacccgctgcctgacgctgcaaactacagggtttcggtcccccgcgctcctgcctgcggcgggcgaggaggagacggcccaccctgaggggaccccctccgcggccctgaagcccccaccgccctccccgagcggctctgctcccaggttctactcgggggcaggaacctcccctcctggcggtcccactacaattcaccgtccctctcgaattcctggggatacactttttcggtctctgttgcccgtcattcgtttaaagagcagaaccgttcgagataaaggcatttacttatccgtagttgccattaggcaatttaatgaaccggcacaaagaggagattcgtcatcactctttagattttggtggaatacttttttcctatccatcttattgtgaaaactttcaagcatacaacaaaagttgaagtaattttactggtggagtattttgagtttaaattttaattgcaagacttaatctttttattgaaggtttagcccaagtgtttttcagtctttaaagcaaacagcagagaccaaacctagtatggttgtaaatttgtttaaatttcagttttgcagaacactctcgttagtatttttggttcaatttttaattgcaagacttaatacttttatttaaggtttagcccaagcatttttcggtctttaaagtaaaccacagagtagtaagattctaaatttgtctaaatttcacttttgcgtggcagtctcattaaaacaaagtaagtttcagggaagcaaagtgacaatgaaatctgcagtaggtttgttgactgaatagtgactgaattggtttgtgccttcaaggtcagtcactttagctcagtaactttccaagcacgtttaagatgtgcttgggaacacaagaatttctgtcgagcaccagtggactttcctgtttaacagtgtaccacattatatagaaatactttggccgggcgtggtggctcacacctataatcccagcactttaggaggctgaggagggctgatcacctgaggtcaggagttccagaccaacctgaccaacatggtgaaacctaaaatctagtctctactaaaatttagtctctactaaaaatccaaaattagccatgcatggttgctcatacctgtaatcccagctacttgggaggctgaggcaggagaatagcttgaacctgagaggtggaggttgcagtgagcagagatcaggccattgcattccagcctgggcaacaagagcaaaactctgtctcaaaaaaaaaagaaaaaagaaatagtctggcccagcttctccattccttttccgggtgaaaaaaatggactgtttgtgactcaggagtgccgggttccaaggcaaggaacatactatgtcctccacaagctgcttgttgaactaactggtggtattcctaggataagacagcctctaaagacagactgccagagttcaaaccgtggctctgctaattttgctggagacaaaaagcctcagttccttcatctataaaatggagataataacatcattactaattagttattaaagagttattgtatatataagtgttagaatactgcctgcctcagagtagtagctctcacttaatatttgctcttccactgaaggtgccagcaaccagaaggtaattaccttctctgccactgtgtgatacgtgaaagaatatcagtctccaaataattcccaaaactggcaaggcactcagaatctgtgctttgtgaaccatttcatcaccagctaatgagactggataattcacgtagcaaagcccttcacctctgcccaggagttccccctgggcatcctaccgggggtgttgcccaggactttgacaactggaggcccaacacaggtaagatacttctctttacaggtctccaccctacccttttcctgtacagctagaaactcaagaaaactgcctgatttttcctttgcagttcttttggcttgtgattctttcttcctattctttatccacttctcctggttttt

SEQ ID NO: 584936 - DNA, 4001 bp, Homo sapiens
ctccgggttccccagcgcccccgccgccgccgccactgccaccgccgctccggccctcgcgggccgggagccccccgggcgggcgccgctgcaggtgggcgggcgccgccggctgctggtacccggctggtatccccgcgccggctgcgggctgcgggcaggctggcacaggcgcccagcgcctccggcacaggacccggggcacacacgcgagccacacacgccgcgctgggggccgggcccaagtttcctttgtttcccgggacctgccatcttaccccccaaaagaaaagtccgcgcctccgctgcggcggggtagccgcctgtcctggagcaagtgcattgccactcagactgcaaaatgcgccccggggacccgagaggggctgcgaattccagtgcgaccgcgtggggggcgggcgccgggacccctcgggcagggttatctctcggcccgccgcagaggaaaggggaacgcggcgggcgtggcgcggacgcgggccggacgctcaccctggccgacgggacccgggcgccgcctagcgcgaacccttcccggctggtcggcgctcctcgcaggcggtgtccgggtccggagcgatctgcgcgctcggccccgcggccgcgccctccccgaagcccttgctttgttctgtgagcgcctcgtgtcagccaggcgcagtgagctcacgggggcgtcccgggtccgcatcttcccaggagctggggagccgctcgctgggcgcagacccgctgcctgacgctgcaaactacagggtttcggtcccccgcgctcctgcctgcggcgggcgaggaggagacggcccaccctgaggggaccccctccgcggccctgaagcccccaccgccctccccgagcggctctgctcccaggttctactcgggggcaggaacctcccctcctggcggtcccactacaattcaccgtccctctcgaattcctggggatacactttttcggtctctgttgcccgtcattcgtttaaagagcagaaccgttcgagataaaggcatttacttatccgtagttgccattaggcaatttaatgaaccggcacaaagaggagattcgtcatcactctttagattttggtggaatacttttttcctatccatcttattgtgaaaactttcaagcatacaacaaaagttgaagtaattttactggtggagtattttgagtttaaattttaattgcaagacttaatctttttattgaaggtttagcccaagtgtttttcagtctttaaagcaaacagcagagaccaaacctagtatggttgtaaatttgtttaaatttcagttttgcagaacactctcgttagtatttttggttcaatttttaattgcaagacttaatacttttatttaaggtttagcccaagcatttttcggtctttaaagtaaaccacagagtagtaagattctaaatttgtctaaatttcacttttgcgtggcagtctcattaaaacaaagtaagtttcagggaagcaaagtgacaatgaaatctgcagtaggtttgttgactgaatagtgactgaattggtttgtgccttcaaggtcagtcactttagctcagtaactttccaagcacgtttaagatgtgcttgggaacacaagaatttctgtcgagcaccagtggactttcctgtttaacagtgtaccacattatatagaaatactttggccgggcgtggtggctcacacctataatcccagcactttaggaggctgaggagggctgatcacctgaggtcaggagttccagaccaacctgaccaacatggtgaaacctaaaatctagtctctactaaaatttagtctctactaaaaatccaaaattagccatgcatggttgctcatacctgtaatcccagctacttgggaggctgaggcaggagaatagcttgaacctgagaggtggaggttgcagtgagcagagatcaggccattgcattccagcctgggcaacaagagcaaaactctgtctcaaaaaaaaaagaaaaaagaaatagtctggcccagcttctccattccttttccgggtgaaaaaaatggactgtttgtgactcaggagtgccgggttccaaggcaaggaacatactatgtcctccacaagctgcttgttgaactaactggtggtattcctaggataagacagcctctaaagacagactgccagagttcaaaccgtggctctgctaattttgctggagacaaaaagcctcagttccttcatctataaaatggagataataacatcattactaattagttattaaagagttattgtatatataagtgttagaatactgcctgcctcagagtagtagctctcacttaatatttgctcttccactgaaggtgccagcaaccagaaggtaattaccttctctgccactgtgtgatacgtgaaagaatatcagtctccaaataattcccaaaactggcaaggcactcagaatctgtgctttgtgaaccatttcatcaccagctaatgagactggataattcacgtagcaaagcccttcacctctgcccaggagttccccctgggcatcctaccgggggtgttgcccaggactttgacaactggaggcccaacacaggtaagatacttctctttacaggtctccaccctacccttttcctgtacagctagaaactcaagaaaactgcctgatttttcctttgcagttcttttggcttgtgattctttcttcctattctttatccacttctcctggtttttcatagtttgtttgctaataaaacctgagccacggctgggtgcagtggctcacgcctataatcccagcactttgggaggccgaggcaggcagatcacatggtcaggagatcgagaccatcctggctaacatgatgaaaccccgtctctactaaaaatacaaaaaattacctgggcatggtggcacacgcctgtagtcccagctactcgggaggctgaggcaggagaatcgcttgaacccagaaggcggaggttgcagtgacccaagatcgtgccactgcactccagcctggatgacagagcaagactctgtctcaaaaaaaaaaaaaaaaaccttagccaataataactcacgccactaacaaattgagactcttaccagttatcctgaactttttgttgagacacatggccaatttccattttatagagaaagtgtggtatagaatgattttgaaacagattgattgcataaattgatgtatgtgtggaaagttataactttcagttttcatagctttcatgagatagtatgaaaaactccctcatttgatgctggttctcttctgagaatactgagggaggagcaatgcttacaatttcttttcttttttttttttttttggagacgaagtcttgctcttgtttcccaggctggagtgcaatggcacgatctcggctcactgcaacctctgcctcccaggttcaagcgattctcctgcctcagcctcccaagtagctgggattacaggtgcctgccaccatgcctggctaatttttatatttttttagtagagacagggtttcaccatgttgaccaggctggtctcgaactcctggcctcaggtgatccgcccgcctcagtctcccaaagtgctgggattgcatgcatgagccaccgtgcccggaaaatgcctacaatttctaagggcagacctgagaccagactggcatagcacatagtggattctggggtcaaatatggatttgaatcctgcaccaccactttctctttttttttttttttttttgtagacagggcctcactccgtcactcaggacggagtgcagtggctcattgcaaccttcacttccctggttcaagccattctcctgtcttagcctcccgagagactatgtcttgcctacccaatatccactgcacctggcatgcaatcagtccttgctggttgaatggactaatattaaggaaacaggttaatttgctttt

SEQ ID NO: 584937 - DNA, 4001 bp, Homo sapiens
aaaaatgccaagtggcaacaagaacaaaaaagttattcaataactataactcctgtttttatttctttgcaaaggaaaaaaggaccaggttaactaattcagtttccaagattatattgacttaatggcattgcaataaggtctattttcccagaaagggggagattttaaagttgcacaaaaaaatggggatttttaaatattgtaactgagacttatggaactagaattcattgggtcactgtctatcctggatttgctaggtaactttcacatactcaatttaatacagccttggtaacttagccttttccttaagggggaaatgcagtcttatcttctcccttgaaatttgaaatagtaactcttctaaaaaatggccacaatatttgtgttaaattgaaaaagaaaatgagtttttcctttaaggcagaatgacttcaagaaaacaccatgaagtcggaacgatttcacaaaagacaacgagaggttatggtgttaagtttcaccagcagcagcctcactggtcgccaagctcattgctgtggccaagaaccaaggttctcccagtgtcccagcgtctgagtggcatcattcaccactgatttttcaagccacgaaatgcacagtccagtagggcacgtgataatctctcctttgtcatggaacaaaggcagatcggagttttcagccctcactgcaagggagggtttacaagagcttctgattacaggctggagggaggacgtggcaccaggcaagagtctgggccccgtgtacatttggctgcctattaatccaaagataaagccctcctacatcagcaccagctccttttgttgtaaaatccataaggtcattaaacaaatattgactacagaaatgtacaaatcctatccaaaatagattagtgacaacaacaaaaaaatcttgatcaagtcaaatttatttatcgggcacctactgtgtgcaagatttagtgtgtcccatcaggaaacggcactcccaataaagaaaagcattaatatggtaatttacttaaaacagggtgcctgttttggacaccttgtttgggatcccgcaaagtaacctgttctttattcatgcaatgagttttactgcagcaggtgatgttttctttttaaaacctggtgtatcaatctgaggatctaaagatcctctacaccaacaaaaaaattatgtttattaaactgacactaaacaaaattttctctcccaagctagatttattcgcattattaaaacttctcacttacaatgttggaggaaaaaaatctggtcggagagaagatggggcggggagtggagggggccggtttctcgcagccgcgcccctcccccatcaaagaattgaggaaggctcgggagcgcagcggactgggaggaagacaatagggtacggttaccccgccagcggtggggaagcgcgttccacactcaggctgcactcccaggtgagcccggactttcgatgtctggggacggaggacgcagcgcgcccaactttgggggagaagccccagtgacagtcctcgattaaccccaatcgaaggcgctggagagccgtcactcccatcctccaaacccgaactgacccaaacaaacgtaccttcttcgcccccgcccccgctagggtctcccaggcccagcccccggtctctctcgccggcgcggtgcatccatacaccctcgaggcagcgctgcgcggccccgggtacccgcacccggggcgaggttccccggatggaggatctagggagaccgcgctggtagcggcgacccgaacaaagcctggcggggactcgggacagaatcgtcccaccatgctgcctccccagaactagccaatctgggctaaaataacatggggatcctaagatgacaagcgatggacgtgaaaggttgcctcgcagagagcgcagcgtcaggagagggtccccgcctcggcttcagcccggaaccggggtttgtttaaaaagggccagatagccgtagcttctccgggatacccaatccaactccgagggtggaggatgggcgtgagccgccctccccgaaagggaccgtcgcctctctttgtgtagagcgcggggagcgcgaagacattcctaggggaaagcgagtcctcagggacccagggacaacgtccccagggagcccgagctctccaggcgctaatccctgcaggcacctcgggcctctgggtgaaagtgggaagtagtcacctggctgcctgggaagggacagcgtggaacctggggtggggcagggtcctctcagcccgcacgcggagctgcattgttcccagggccgtgggaggagggggggcagcacgcaagggaatggaaaaatggggtccacatggccctctcccctggtcagctaagcaagattctctcccggtccctgtccgtggcccgaggcaggagcgcaggacggtcccccgggaccgggtccatctcccctgcccccaccccgggaacggccctcgagccccgccgggcgccagggcctcacctgcgtgggtaggagcagtgccagcagcagcagccccagcccgagcctggccaccattgctctgcccatgtcccctccgtcggtgcgcggcgcgtctagcaggatgctgggtgcttggagaaccgctggctccgggcgggcgcaggcaaggtggggagcgcggcgagccggcgagaccttatataccaggaaagccacaatagccgtgacgtggcgccgcccgcccaccccggctcccctccgccgccgcccgccgcctccccgccttccccgccccgctccgggttccccagcgcccccgccgccgccgccactgccaccgccgctccggccctcgcgggccgggagccccccgggcgggcgccgctgcaggtgggcgggcgccgccggctgctggtacccggctggtatccccgcgccggctgcgggctgcgggcaggctggcacaggcgcccagcgcctccggcacaggacccggggcacacacgcgagccacacacgccgcgctgggggccgggcccaagtttcctttgtttcccgggacctgccatcttaccccccaaaagaaaagtccgcgcctccgctgcggcggggtagccgcctgtcctggagcaagtgcattgccactcagactgcaaaatgcgccccggggacccgagaggggctgcgaattccagtgcgaccgcgtggggggcgggcgccgggacccctcgggcagggttatctctcggcccgccgcagaggaaaggggaacgcggcgggcgtggcgcggacgcgggccggacgctcaccctggccgacgggacccgggcgccgcctagcgcgaacccttcccggctggtcggcgctcctcgcaggcggtgtccgggtccggagcgatctgcgcgctcggccccgcggccgcgccctccccgaagcccttgctttgttctgtgagcgcctcgtgtcagccaggcgcagtgagctcacgggggcgtcccgggtccgcatcttcccaggagctggggagccgctcgctgggcgcagacccgctgcctgacgctgcaaactacagggtttcggtcccccgcgctcctgcctgcggcgggcgaggaggagacggcccaccctgaggggaccccctccgcggccctgaagcccccaccgccctccccgagcggctctgctcccaggttctactcgggggcaggaacctcccctcctggcggtcccactacaattcaccgtccctctcgaattcctggggatacactttttcggtctctgttgcccgtcattcgtttaaagagcagaaccgttcgagataaaggcatttacttatccgtagttgccattaggcaatttaatgaaccggcacaaagaggagattcgtcatcactctttagattttggtggaatacttttttcctatccatcttattgtgaaaactttcaagcatacaacaaaagttgaagtaatttta

SEQ ID NO: 584938 - DNA, 4001 bp, Homo sapiens
ccccgccagcggtggggaagcgcgttccacactcaggctgcactcccaggtgagcccggactttcgatgtctggggacggaggacgcagcgcgcccaactttgggggagaagccccagtgacagtcctcgattaaccccaatcgaaggcgctggagagccgtcactcccatcctccaaacccgaactgacccaaacaaacgtaccttcttcgcccccgcccccgctagggtctcccaggcccagcccccggtctctctcgccggcgcggtgcatccatacaccctcgaggcagcgctgcgcggccccgggtacccgcacccggggcgaggttccccggatggaggatctagggagaccgcgctggtagcggcgacccgaacaaagcctggcggggactcgggacagaatcgtcccaccatgctgcctccccagaactagccaatctgggctaaaataacatggggatcctaagatgacaagcgatggacgtgaaaggttgcctcgcagagagcgcagcgtcaggagagggtccccgcctcggcttcagcccggaaccggggtttgtttaaaaagggccagatagccgtagcttctccgggatacccaatccaactccgagggtggaggatgggcgtgagccgccctccccgaaagggaccgtcgcctctctttgtgtagagcgcggggagcgcgaagacattcctaggggaaagcgagtcctcagggacccagggacaacgtccccagggagcccgagctctccaggcgctaatccctgcaggcacctcgggcctctgggtgaaagtgggaagtagtcacctggctgcctgggaagggacagcgtggaacctggggtggggcagggtcctctcagcccgcacgcggagctgcattgttcccagggccgtgggaggagggggggcagcacgcaagggaatggaaaaatggggtccacatggccctctcccctggtcagctaagcaagattctctcccggtccctgtccgtggcccgaggcaggagcgcaggacggtcccccgggaccgggtccatctcccctgcccccaccccgggaacggccctcgagccccgccgggcgccagggcctcacctgcgtgggtaggagcagtgccagcagcagcagccccagcccgagcctggccaccattgctctgcccatgtcccctccgtcggtgcgcggcgcgtctagcaggatgctgggtgcttggagaaccgctggctccgggcgggcgcaggcaaggtggggagcgcggcgagccggcgagaccttatataccaggaaagccacaatagccgtgacgtggcgccgcccgcccaccccggctcccctccgccgccgcccgccgcctccccgccttccccgccccgctccgggttccccagcgcccccgccgccgccgccactgccaccgccgctccggccctcgcgggccgggagccccccgggcgggcgccgctgcaggtgggcgggcgccgccggctgctggtacccggctggtatccccgcgccggctgcgggctgcgggcaggctggcacaggcgcccagcgcctccggcacaggacccggggcacacacgcgagccacacacgccgcgctgggggccgggcccaagtttcctttgtttcccgggacctgccatcttaccccccaaaagaaaagtccgcgcctccgctgcggcggggtagccgcctgtcctggagcaagtgcattgccactcagactgcaaaatgcgccccggggacccgagaggggctgcgaattccagtgcgaccgcgtggggggcgggcgccgggacccctcgggcagggttatctctcggcccgccgcagaggaaaggggaacgcggcgggcgtggcgcggacgcgggccggacgctcaccctggccgacgggacccgggcgccgcctagcgcgaacccttcccggctggtcggcgctcctcgcaggcggtgtccgggtccggagcgatctgcgcgctcggccccgcggccgcgccctccccgaagcccttgctttgttctgtgagcgcctcgtgtcagccaggcgcagtgagctcacgggggcgtcccgggtccgcatcttcccaggagctggggagccgctcgctgggcgcagacccgctgcctgacgctgcaaactacagggtttcggtcccccgcgctcctgcctgcggcgggcgaggaggagacggcccaccctgaggggaccccctccgcggccctgaagcccccaccgccctccccgagcggctctgctcccaggttctactcgggggcaggaacctcccctcctggcggtcccactacaattcaccgtccctctcgaattcctggggatacactttttcggtctctgttgcccgtcattcgtttaaagagcagaaccgttcgagataaaggcatttacttatccgtagttgccattaggcaatttaatgaaccggcacaaagaggagattcgtcatcactctttagattttggtggaatacttttttcctatccatcttattgtgaaaactttcaagcatacaacaaaagttgaagtaattttactggtggagtattttgagtttaaattttaattgcaagacttaatctttttattgaaggtttagcccaagtgtttttcagtctttaaagcaaacagcagagaccaaacctagtatggttgtaaatttgtttaaatttcagttttgcagaacactctcgttagtatttttggttcaatttttaattgcaagacttaatacttttatttaaggtttagcccaagcatttttcggtctttaaagtaaaccacagagtagtaagattctaaatttgtctaaatttcacttttgcgtggcagtctcattaaaacaaagtaagtttcagggaagcaaagtgacaatgaaatctgcagtaggtttgttgactgaatagtgactgaattggtttgtgccttcaaggtcagtcactttagctcagtaactttccaagcacgtttaagatgtgcttgggaacacaagaatttctgtcgagcaccagtggactttcctgtttaacagtgtaccacattatatagaaatactttggccgggcgtggtggctcacacctataatcccagcactttaggaggctgaggagggctgatcacctgaggtcaggagttccagaccaacctgaccaacatggtgaaacctaaaatctagtctctactaaaatttagtctctactaaaaatccaaaattagccatgcatggttgctcatacctgtaatcccagctacttgggaggctgaggcaggagaatagcttgaacctgagaggtggaggttgcagtgagcagagatcaggccattgcattccagcctgggcaacaagagcaaaactctgtctcaaaaaaaaaagaaaaaagaaatagtctggcccagcttctccattccttttccgggtgaaaaaaatggactgtttgtgactcaggagtgccgggttccaaggcaaggaacatactatgtcctccacaagctgcttgttgaactaactggtggtattcctaggataagacagcctctaaagacagactgccagagttcaaaccgtggctctgctaattttgctggagacaaaaagcctcagttccttcatctataaaatggagataataacatcattactaattagttattaaagagttattgtatatataagtgttagaatactgcctgcctcagagtagtagctctcacttaatatttgctcttccactgaaggtgccagcaaccagaaggtaattaccttctctgccactgtgtgatacgtgaaagaatatcagtctccaaataattcccaaaactggcaaggcactcagaatctgtgctttgtgaaccatttcatcaccagctaatgagactggataattcacgtagcaaagcccttcacctctgcccaggagttccccctgggcatcctaccgggggtgttgcccaggactttgac

SEQ ID NO: 584939 - DNA, 4001 bp, Homo sapiens
attatttagaatttagctcaaaagccctatatgcaaaacaagactgcatccccaggtcatccaaagtagtttaattttattctgcatcccatttaagacagaaaagaactgtgtaattaactttagtattatcttaatccaaagcagttaaagtgattttataatttcatacttaaaagaatatgcccacaattgccctgcaagctcaactaatcaattataaaataattcatttgaaaattccaaatagcaaatgttttatttcactgtttttgagctcaagagcacttttgagtatgaaagttacctgaaaggagggaggtggagaagggaacataaaattagaaaagtctaagaaaacagaggatagctaggcgagtgtctataaacaatatgctcaaaacatcccccacaaagcaaagtgtggacagagggtgccacatcagcagtagtctgtattcgtcctgcttctaaatcatttgttaattacatgaattattcatttcggtgatcgtttgttgatatgaagcagtaccaactctcaactgcaaaaagtgatagggtcctcctgatttgctctacaaaaatcaaacttgggtttactcttacagaacacgttctgccttatagagacacagggtgttttgttttttgtaagctattcttaagttgcttttaatttttaaaggattgagggagttagtttaatgcctagcccacaccgaactttgttatcaaaagaaattgttacaccacttaacaaaactccttttcaacccggactgccacacattctgccttctctaacttcaaacaaaactataaagcacatagtaaataacatataaggccttgtatttttctctcctccggcaaggaagtctaactccaaacaggaaactgctcctcaaaggatccaacactgaagtccaaacccagtcctcgggagcacactgaatgcttaggtgccaacacacttgcctaggtagaacccgagtaaaacaaatactcaagctttcctgtccttgaggcaccccttgcgagtttcagcaggaaaaaaaaaaagtttttgaacaaatttatctctctccttaaacgtattcaaagcctcgcagaaaataaagaagttgaaagtgctactttatcaagtttttcgatcgccctcccccatcccacgaggagggggagggaagcaaggggatgaggaagggaaggaaggtcaggtctgattttagctgggcaaggggttagcagaggtggccaggcgcccccgccccccatcccgcacctttctggtgaacaggaaaagaggcggagaagggagagcgagggaaagcacccgcgagctctcccaccagtttctccgtgagaagagcaaggtggaaggcagggcaagaaggggcggtggggagaatggagagggtggggtgctgccgctcaggggctgaccgcagtcgcctccccagaaggccgagaaagggcacagcctccccgggtctggaaggtccggacgggcggcgggaagcgcccgagtctcttacccatgctgggggctcccgcggggagaagccgacgtccgctcctcctcctcctcctccagtggtggctcgcgcggccgctcccgcggctggaggcgggacccgcgctccgcgctagcccctcctgagctcaggcggggcgaagagtcgcctccatccgcccgcggcgctctcctaccagtctcttcagcgcggccctcgaggcagaggcaaaggcggcgacagctcctcacccctggcctccccaggagccacggcggcgggagggccctaccccgcccgcccgaccgcggttttcccaccctggccgctcccgcagtggggagggacccaccggtttgcccagaccctcggctccaaccccgagcgcccgcctagcctcggagcccgcccctcgcctcttccttagcactcgcagttagaaaaggcgacaccgtagactaaggtggggacccagacagaggccgagaaggtgcggggagctgggaccgggaggaggcaaatctcgcgagaacgccctcgttctccccgccccaccccgccccgtcgcgttcgggctctctcccggtccccacggctgctgccaggtgcggtgacgtcacggccgggggtcgcgcgccgaccgcgtccaggtgcagcgagcggatgaggaagcggtgcagaggagcttgggctcgctctccccccggaggctcggaacagcttgggcgggcgtttggtctggtttgtcgcctcagatggatcaaaaggtttctgctgataggcaaagttgccccactttccgcggcggcgacgcggagttactttctgcagcgaagcagcctcgaggaccttaaagggaaaaggcggacagaaggagggcgagcgcacttgatttcgacctttaagggaggcccagatgctgccaggcccctcagtttaccttgcgaagttacttacggatcagcagcatttggtcttcgtcgggtgagggagaaacctaggcatcaaataaattctgtttcacagattcctttagtctcttgtcagctgaatgcaactttataatttgctttttttctttttaaagtataatttgagttgttacttgatcgagagaaaaataggcatcatgatttgaaatactgccaggcattttttctagcgtcaatgtgaaggagggcataggattactatagtcagtcaaacatgagcttggtagttacgaagaagtataattatttcagcaagctttttttcccccttctgtttaagtagacccaattccagggcagatgtgtgtgtgagcgtttgttgaacgccaactattgtgcctagtgctttttcaagaaattttgtaattctcagtcatccagcactgaaactgacttgccctttggatccaggcagacatgggtccttgaaactcagcacagccatttactttttgtgggaccttggataaattaacctgtctgaacttcaatttcttgagtatgttcaaacaaatcttgcaatgcagagcacagtggcccatagtagtaaccttggacgtatccattaccactatttcctataggcctgcttttgccatcttttaattcttctaatgcttctcaaaaggttacatgtggtaattttataacaagaatgatcaaactcacaaacagcagccaaaaaggataaaagaaaaaagttgaatatactcacctaaacaagattacattgacatcatggaacatgtgccttttttaggtaacaaatatgtgttcagcattatgttcgttgtcccctaccaagcaaaaaaataaaaagctaaagtacagcgctaatcctcagagattttgcattcttctaggggggtgagatacgaacacaaagttaattaacagtatgaggtagtgagggtcaaatgcttgagaatttaaaggaaaataaattactgtgggcaaagcaagctgtaaagagaaggtatgagttgaacgaaagcttggggaaggcaataattcagtctggaggagtcctagaactgaggaatggaagtggatatgcaaacagagtatttctgagcctttaagaaatgtgtgtggctcaagcagcccataaggaaggccatttacgatttggaagaatgaggctggtgatgggctaagaaggattcatgaaaggagacaaaaatataagctattggaagcacatacataggtagtaaattcaaggcccagagcccttaagtttctagagactaaatttctaggtctctagaatccttaatatttaaagaagaaaggccaatgaatagaatggaaaagaagttaagtaaaacagaagggggaataaagactatcagatttgataataagggcatctttgaaaatataatttcagaatatatataatagaatatataatatataactacatattcagaatatatatataatagaaaattcagattaaaggttttatcaattgaatgataag

SEQ ID NO: 584940 - DNA, 4001 bp, Homo sapiens
ctaacaactcaggatttggaatcagactgcttcgttcaaatcccaactccaccatttagctagctgtgcaaaagtggacaagttatttccctccctaaggctcagtttcctcacctgtaaagtaggaatagtaacagtactaatccctaagtccattcttccgatggatggaaatggataatgtatgtaaatatttaccttggagcttggcacgtggtgagcattcaaaaattgtttttacaatatttttaaaaatactattgttttgactatgagaacaatttcggaattgttgtgttctctgatcccacagtaagtaaggtaccaatgaagtaggaatatttaacaccttacttttatacacaatacaatgctctgaggcagcagcaccatccccgtcatgcataactcatgaagtgctgggctgaattcacagagcacctttgcaatttatagggcaaaaattaggtgccgtgaagaatacacagaagtatggatacagccactgccccccagggaactgaccatccagttaggagacacacacacaaagagatcaccgcaatgatgccttgtactgttaagtggccaaagacgtacagtttcttatagtatcttttatggtgggcagaagaacgccctgcattttggggaaagctacaagtgcagagatttgcccccgtggtaagacagcaaatcagtgagagctacagagtaaggttgtaatatcatattcatttgggttaaaatggaggtgctgtggtagcagtggcctgacttaaagaaggaccagtgatatcaaacagtagctgcttggctttggaatgacaccatcattgccatcttagaatctgagaatgtttcagtcaagaggaaaccttgaaaaagcctccttgtcactcagtccacttacagtaggagcagcaaggcctgttcttacacatgcgggctccggctcatgcatccacctgatgctctcaaggctgccagaggaaggaggaggagggctaggggaggaagccaagggtatcccacaaaggagatgaccactgataactaccatggatgaaatggcctaagtcacttctgtgtcttagcctttcctttcaaattgccccctccccctcccatgtatcatgggcatcacagtcacaaaacacaagaaatcagaagtctggagacattccccctgtccaatgcccaaatctaggtccctgttgctttcttcctgacctgctggcccacaaccacaggtggcctccagaattaatccaaatgagagtctctgcccttccaaaacatcttaagtggatcattcatctcaggccaccttcagtgacaggaaggggattgaggtctgcggagagcaaaacctaattcggccctgtacctggatgcggatggggtgggggaggcgcgacgggaggctgggtactccaagttcagctgcgggagacgcccctcgcccccacctggcagccacagagggtcgccagcctaggggagatggttcctgctgtcttcaaatgagcccaccaaaccccagcccgtgggtatcgcagcacctaccttgacccaggagaccgtgtagggaacctgcggatcccagggggcggtgcagggcaagtccacatcttcggagcaagccaccttcacctccggcgtcgcgggagccaggctgtaggctacaagaaagagagagcgcgtcgtgagcaagcgaccgacgggagggggtgtcgtggaggggcggggggcgacaggcgagacaggcgctcgcgagccctaccgcagctcaggagcagaagctggaggccgcgcgacatggctggagcgctgcgccgctgccacgagctgcagagctgtggcgcgcgggcgccggctgcccttttatgcccgcgcgttcgggaacttccctgcgcgccagcccgggggattccccggcgggcagcggaagcgggtggcgcgccctcctagtcccgcttaggccggggcgcccccgtccccgcccccttcgcccccgtccccgcccccgtccccgcccccgtcgcacccgccgccctcgccgcgtgcgcgtccccgcccccgcgcgcccgggccgggcgccccgagttcgcgtcgctgctgcggctggcagcggcgacagcaatccccgcgtgacgcccagcgctgggggctttgcagaccgcgctcgcgcgcgtgacgctgccgttgacccgcaaaaggaagccgggaaccgggccatccgagcgggatctgcccattttacggaggccaaaccagattccgagagggtgggcaacttcctcagaagcccagcctgtccttgggaacgcactggtgaacccaagtcctcactcttctccagaatctgtgataatcaaaggcgcgttagatttccatggaaacatacaagtctgtagtacttggctccctgccttccccgggaggttatcagtcagtaccgtcctgtttaaattatatcaccaaaggagagtgtctcctattaaaataataattacacgcatacacaacatttttggaaaagaaaattctagaagacaatgaaatcacctgtaattcatccaggaagtaacttcagttaacatttttttatattataaaatgtttataacataacataacgtaaaatatttataacatttgtcagtgcacagattggtatttttaatggtttattcttcctgctatcttgtaacctactttcttttagcttaataatttgcaagcggttccacatcattaaaaacttccaacagcatcattttggtccattgttcagttgcaccataaattagaatcgattagtgttagacatacaggttgtttctttttgtattactaatattagaaacaatactgtgattgctatgggaaacttcagtgtagataaatctttgctctaaaattgcttattttcttagaataaatacctcaaggaaattgtgctaggtgaaggggagtttccaattttgtcaaatattgccaaaaaattacctgcaaggaggtgtcttcaatctatattcccatctgcaaagagagtgcctgtttgccaacacaaactgttatccaacctttctatctttgtccatccaagaggttaaaaagagtggcatcactataccaccagttctaatctgctcttggaagtagttatatcaattgacagtcccgccagcttgtgtgagtaccttttctccagcagcctcaccaaattaattttttaattgtgaaaatgttaagcatacaaaataagtatagaaaatatggaattgaacacatctgtatacaatttattcttgagaaataaaacagtactaacattttcgagaccctctttttttttttttttttttttttttgagacggagtctcgatctgtctcccaggctggagtgcagtggccgtgatctgagcttactgcaagctccgcctcccgggttcacgccattctcctgcctcagcctcccgagtagctgggactacaggagcccgccaccacgcccgactaatttttttgtgtgtgtatttttagacggggtttcaccgtgttagccaggatggtcttttgagacccactatgtgtcctctgccagatctcatacctagccatttatgcttcttttcagtttttcctgattataaacaatgttgcaggggagctgaaagtcttccaacactctagctcagtaattacactgcattgttaaatattgccgtcttattatccaaaatgcacatgcccatttacactcccctcagcaggtcttagcatgatcagatttttttctttaaagatagggtctcactatgttgctcaggctggtctcaaattcctgggctcaagagatcctcctaccttggcctcccaaggtactgggattacaggtgtgagccacgtgcccagccagatctttttaaatttctgcctatctaatgagtgtgaaatattagatcctttttgcttaatttatgttacattg

SEQ ID NO: 584941 - DNA, 4001 bp, Homo sapiens
aggcagcagcaccatccccgtcatgcataactcatgaagtgctgggctgaattcacagagcacctttgcaatttatagggcaaaaattaggtgccgtgaagaatacacagaagtatggatacagccactgccccccagggaactgaccatccagttaggagacacacacacaaagagatcaccgcaatgatgccttgtactgttaagtggccaaagacgtacagtttcttatagtatcttttatggtgggcagaagaacgccctgcattttggggaaagctacaagtgcagagatttgcccccgtggtaagacagcaaatcagtgagagctacagagtaaggttgtaatatcatattcatttgggttaaaatggaggtgctgtggtagcagtggcctgacttaaagaaggaccagtgatatcaaacagtagctgcttggctttggaatgacaccatcattgccatcttagaatctgagaatgtttcagtcaagaggaaaccttgaaaaagcctccttgtcactcagtccacttacagtaggagcagcaaggcctgttcttacacatgcgggctccggctcatgcatccacctgatgctctcaaggctgccagaggaaggaggaggagggctaggggaggaagccaagggtatcccacaaaggagatgaccactgataactaccatggatgaaatggcctaagtcacttctgtgtcttagcctttcctttcaaattgccccctccccctcccatgtatcatgggcatcacagtcacaaaacacaagaaatcagaagtctggagacattccccctgtccaatgcccaaatctaggtccctgttgctttcttcctgacctgctggcccacaaccacaggtggcctccagaattaatccaaatgagagtctctgcccttccaaaacatcttaagtggatcattcatctcaggccaccttcagtgacaggaaggggattgaggtctgcggagagcaaaacctaattcggccctgtacctggatgcggatggggtgggggaggcgcgacgggaggctgggtactccaagttcagctgcgggagacgcccctcgcccccacctggcagccacagagggtcgccagcctaggggagatggttcctgctgtcttcaaatgagcccaccaaaccccagcccgtgggtatcgcagcacctaccttgacccaggagaccgtgtagggaacctgcggatcccagggggcggtgcagggcaagtccacatcttcggagcaagccaccttcacctccggcgtcgcgggagccaggctgtaggctacaagaaagagagagcgcgtcgtgagcaagcgaccgacgggagggggtgtcgtggaggggcggggggcgacaggcgagacaggcgctcgcgagccctaccgcagctcaggagcagaagctggaggccgcgcgacatggctggagcgctgcgccgctgccacgagctgcagagctgtggcgcgcgggcgccggctgcccttttatgcccgcgcgttcgggaacttccctgcgcgccagcccgggggattccccggcgggcagcggaagcgggtggcgcgccctcctagtcccgcttaggccggggcgcccccgtccccgcccccttcgcccccgtccccgcccccgtccccgcccccgtcgcacccgccgccctcgccgcgtgcgcgtccccgcccccgcgcgcccgggccgggcgccccgagttcgcgtcgctgctgcggctggcagcggcgacagcaatccccgcgtgacgcccagcgctgggggctttgcagaccgcgctcgcgcgcgtgacgctgccgttgacccgcaaaaggaagccgggaaccgggccatccgagcgggatctgcccattttacggaggccaaaccagattccgagagggtgggcaacttcctcagaagcccagcctgtccttgggaacgcactggtgaacccaagtcctcactcttctccagaatctgtgataatcaaaggcgcgttagatttccatggaaacatacaagtctgtagtacttggctccctgccttccccgggaggttatcagtcagtaccgtcctgtttaaattatatcaccaaaggagagtgtctcctattaaaataataattacacgcatacacaacatttttggaaaagaaaattctagaagacaatgaaatcacctgtaattcatccaggaagtaacttcagttaacatttttttatattataaaatgtttataacataacataacgtaaaatatttataacatttgtcagtgcacagattggtatttttaatggtttattcttcctgctatcttgtaacctactttcttttagcttaataatttgcaagcggttccacatcattaaaaacttccaacagcatcattttggtccattgttcagttgcaccataaattagaatcgattagtgttagacatacaggttgtttctttttgtattactaatattagaaacaatactgtgattgctatgggaaacttcagtgtagataaatctttgctctaaaattgcttattttcttagaataaatacctcaaggaaattgtgctaggtgaaggggagtttccaattttgtcaaatattgccaaaaaattacctgcaaggaggtgtcttcaatctatattcccatctgcaaagagagtgcctgtttgccaacacaaactgttatccaacctttctatctttgtccatccaagaggttaaaaagagtggcatcactataccaccagttctaatctgctcttggaagtagttatatcaattgacagtcccgccagcttgtgtgagtaccttttctccagcagcctcaccaaattaattttttaattgtgaaaatgttaagcatacaaaataagtatagaaaatatggaattgaacacatctgtatacaatttattcttgagaaataaaacagtactaacattttcgagaccctctttttttttttttttttttttttttgagacggagtctcgatctgtctcccaggctggagtgcagtggccgtgatctgagcttactgcaagctccgcctcccgggttcacgccattctcctgcctcagcctcccgagtagctgggactacaggagcccgccaccacgcccgactaatttttttgtgtgtgtatttttagacggggtttcaccgtgttagccaggatggtcttttgagacccactatgtgtcctctgccagatctcatacctagccatttatgcttcttttcagtttttcctgattataaacaatgttgcaggggagctgaaagtcttccaacactctagctcagtaattacactgcattgttaaatattgccgtcttattatccaaaatgcacatgcccatttacactcccctcagcaggtcttagcatgatcagatttttttctttaaagatagggtctcactatgttgctcaggctggtctcaaattcctgggctcaagagatcctcctaccttggcctcccaaggtactgggattacaggtgtgagccacgtgcccagccagatctttttaaatttctgcctatctaatgagtgtgaaatattagatcctttttgcttaatttatgttacattgataacatatgcttcaagaacattggatatttctgagcattgtcattcatatcctttggccttttccatgagcgctgtttataaaatctgggccaaatcctttcttggttatatccatgccaaatctcttctccaagtttaagatttgtattttccattttgtttatgatatctttaatttaccaaagagtttttaaaaaatattttcatgtggtcaaatttactgatcttttggtttatgatttgtgcttctggtattgtgtttaagaaatcttttcctgacctgagatcataaaaacattctccttcatttccttccaaaacttttaaagtcatgctttttcatatgttggtctttaatccatttaaatatggtttg

SEQ ID NO: 584942 - DNA, 4001 bp, Homo sapiens
atttttcgacacactgaattggaggtggctgagcgccaacctgcaaaagacaaatgtacaattactgtgggagatttttatatacctctcaagatcgtaagctagcaaggaggatagaactggaaataaaaggatagcaagcatttaattagtgttcattgtgtgtggcactgttaaaagggctttacatcttttatgacaattattataattctgttagataggtactactgttattcctactttacagatcagcaaaaattaggtacagagcatttaagtaacttatccaaggtccccaggtgggtaagtgctggaggcaggatttgaattacagtcttaattccagagcctgtgctaaccatttcacggtgttcaccttgagctagaagcagcacagcctgaggttgaaggtatgggagaatatgtggaatgcaaagaggactaagagcagagtcctgggaaacaccagtattgaaaagggagagtaaaataattggaacagaatgctgagtagagccccatggaagcgaaacggagagaaagtttcaagaaagaggaactaatgaacagtgtcatttgatgcagacatttaagtcagatggctgaacttgacaactggaaggcctgggacatcactcacagacagtagtttcccaagaggatagggccagactgcattgggttgaggagaaaatgagacgaagacaaaaagagagctccaaaaagctgagctgtgaaaggagaagactcaggaggttactggaggggcttaagtttggaaagttttgttttgataggaagttaggaggattctaagcattctttcatgacagatgtccatttttaaaaagtaaaattcacatacagcttgttaaaaacctgtaaaacacttcttaagtcattaaactagacttggggacatgatacaaaggaatttttggacaccgcctcccctcttcacatcttgagctgatcacctacctcgggctctactgggcctacactaccaattggtagatgctctcatcaggctccagacacatcagcttttcctcagttcttcaaacccactaggctctttgcgttctcaggcttgcctgtcacctctgcctggaaactcttgccttattaatcagcttcctccattgagatcatgcagctgtttctcaaatccaaggcctttttctcactgtattaacacacacaatcataaaacatttactgcactctcactagttggctctgtgctatatgctttatttgtgtaatttcactcaattttcacactcatcttttcatgtagacagatgttttgaaaatgatctccactgtacaggtgaggaaagaaaggaggctgcataacttgtccaagttcacacaagtggtggtgccaggattagaacctagttcttcaaaaataagacaaatcgaggccactgctcacacaatactctagtttgggaagtcctgatctaatttcacttatgttccgagattacacctgcactttccaggctatgtccctaatccacaaattcaaatttcatcccctccttccacttgctttctgatggcgggaggcaagggcagagagcatcggagggctattccgaacttccaattctgcctctcccgaggatgcatgtgggaaggagaagaaattcaaacgttagcaacttatctctgagcactgagaaagaggtaacccggtacctaacaagcggctggcagttctggagctgaagccaacaattcccacactgcattagtagcaaaagtgcttaccttaactgccacctccggagccgagtccactgccactgctagagacggctttgatgaaggcgatttagtcaagtgcatgagggagtcggcggctggcagcggacaccgactgctctcactgtccgagtccgattcggaccctgaacccgaaccataggaagcggccagagctgcaatcgcagccgacatgacggcaacaaatcttctgcggagaccctgccagggcggaagaagaagaggctcccaggtcctgacagattgcaatggaacacatcattaactttctttgctaagaaataatgtcttacattttgaaacaataagctaattattattagaataactactgtcgagctgagagcttaaaaaagtttatctagggaaaaagggagaattataatagtttataacatttaggacctagttgactaaagaatatgagttccaaaataccttgaggcctcgcggtcctgcactcccagcgtgcagcgcggcaggaagcgcgagagggcacaatgggaagtgtagtttgcaacgagggggcggaacgggggcgtgtccccctttgaccccgcccccgaatggatgttccattcaattggctatcatcttccctcattccctagccaagcagtgttctcttcgtccccctcccccaaactgaggattgggcaataccacagaacctcaggaaaggggggaagagcgagcttcggccccactaatgggggagtgggcggaggctggatttcccacctcggctgcacctgggcactggaggctgaagaggaaagtgagaatctgaagttttgagacctctgactggccaggaatagctcctggggcggggggcaaggatgggaccataggcggaaagagtctcgcggtcccccctgcttctggcgcgggtccctgcgcccggttgtggagcgtctcgcgcggggagggggcggggggaacggcagctcgcggtgttgttcactcgcgcgtcgagcacacggtgggtccggcggcgggttggcgccccaggcggcgttccctgtggcctggcgcctgggccgctgccctgagcgggttccgccccagagcccgaccctcctgggggctctaggcggagtcccgcgagccgagggggaccggcgaccgctgccgaagcatgaagaaggggtaaggcgtgagcccccaagatttcacggtgagcgcgagtccctgaggaattgcttttttcggggagggggtgttgggagaggaactcttccttactggccggagcagaccgagtggtgtgtggcccgcaaaggtgacggggatggatgggcgcgccttccccgccccggcccccacccccatccgcgggttttccgagcgcccaccgcccacccgccagcggggctgggtgccgagggagacggcggcgggcgcgcctggggcttggctgcagggaccgccccggggctgctctcgctggagagactgtgggtgtcacctgaggtgccaccgcccgggcttccctgcccacccgcgcccgcggtccgccccgtgcctctttccgggggaggcggtagccccgggcgacagagaatcccctgctcgccctacgtgcgcgaggctcggtaaagcgagctcgtgcgtttgcgtgtttgctccgcgagtcggtgtctgaaaacataacggtaaagcgagtgcgggcatccttttcttcgttggaaggggaggcgaagcggtgctgtcgcttctggtgcctgttcatgggggctgccttgggcagagttacggagccgctcactcagcgctcatgtcggcaggactcgcccattgtgccacccagataattattcaactatgcagcatccattgcacctttcccatttttcttttccccttgctacagcatgccccctagcttcggtactctgacaccttctcttgcacttgcggatgatgaactggaataacgatgaaagaaagcacatccgatctcaacattcacgtcctgccctataaccgattaattaattgatccccagctagactaggtacttaaatacgacttactctaatcatttccttttctatgtaataagatgtgcggtggattcgacttaaattttttctttggtgttagattcacgattagctaaggtcttttttctgttcactaattgatgtaattgacttattggttattcaatccgtctaatgttcttaaattt

SEQ ID NO: 584943 - DNA, 4001 bp, Homo sapiens
agccaaagacaagaaagttaatggagccatagatgcatgcacttaggcgattttacttctaggctttttttcccacattggatttgaggtacgtgcctcttgagataccccactccatcctctacatctcccatgatcaaagatactttttaaaaagactgcagagctttgaccactgcataggaatcctactgttacttgattttatatctgtctctccctcagaagtcatctcttctccaatttaaacagtctggttccctcggtggaagctgaggcagttttcattgtcttttttgtaacttggttgcagtacaactacacttaaacacattttcaattaaatagatacagcagatacctactctacttgattcattctgcaaatacctgtcgagcaacctacttcatgttggttactgtcctaggtcctagggataccaagacctggtcctctcgccatgctgtctggtgaggtgaaagagcaactagctcttactcagaggctactatgtgccctactctgatctaaatattccaaacgtattaactcgtgtaatcctcaagagaggttaagtattattatcccaatttagaaaaagtagaaaactgaggctttcagaagttaagaaacttaccgagtaccacacagaggatgtgatgcttacaaaaagacaaagcaagttttaacaaacggaagaaaaaggtatcatgagaatatcgggggtgcaattaattcttacagagattccaagaagtgtttccgaactaggtttgaaggatgatcagaaagatgtcaagcgctaggaaggcaaaagatgtaaaaaaaaaaaaaaaaagaagccataaaatgtaacgaaaaaaagacacagagcatgaaaagacatgatgtgctccagaaactgataaattcggtacactctgaacacaaaacgcactaaaatctaatttctatttcactcccactctactgccctttggctcaccaatggcactatccactacgtttctggaaacagagactatcctaggccagtttttcctttctggcttctatctaggcaaaggcagtgacagaaagagacagaccttgggatctgtcgagatggcagacaggttatgccctgataacagataaccagagagatgcgggcataaacgggctctctgaacctggcactcaaactgcttcccctctgcaaggaagtcaatggagacacaaagttgtggccacggcaacttctttatttctgagtatgagacagagtcgtggtgcctggactaagagtggatggtgccccgggggaccaactctggctgagttggaactctgagttcttcccggggccggggggggcgggggggcggggtgggagggggcgtattcaagtcaacaaatgttcactcagggcctaacaagtgagcttggagccgagtagccaggtggtgacatcacggtccctgtcctactggcgctcgcacaacacggggccagacacacggaaagggccccaagggtcagcccccgggctgccctccacgcagaccccacagggtctcctcgtcgcccccccgacctccgcgcgcgtgcgcacaagctgctagagggagcggcgggcagcggacggcgggaaaaggagacttacctcggtattcctccatacgccccccttgatcataattcgaggcatcttggcggcagggtgtctcggcaagcagccgagaggagcttcagagaagtagtaacagcgattgggccaccggactcaaagccgccacttcctccaagcgcgaccttctgctttgaagatctgcgcaagcgcaaggtgggagggggcgcagaatagcaagtctcgcgagatattgggtggctgaaagggaaaaagtgtcttgtggaagctcagctgcaggaagactaacacaaaaccatcaaaccactctggccaaagcgccttacgccccgcgcatgtccaaaacagaatggaagaaactacggctctcgcgagatagcggcggtagcgcttggctgggaacttagtggtgggattgatcgtgacgtcaccgagtggcagagggtgggaacgtcacgcgtacggaatttcagcacagttgctccgaagaaggctttgttaatttattaatctagccctttcaagtatttcagtaataggaatttattcacagaatactcaggaaaatccagtagtttatttaaggctcagtttcctaacctgtaaaatagagatcatagtaatgccaacctcacaggattgtcgtaagggctaaatgagatcatagacccagcacagtatctgatccataataactgctgcaaaacaatagcagctattactgcaaggagggcaacgccaacttcaccccgtccccaggtgatccaggcttcttccagaaacctgcagaaacgtcacgtcagagtttttaattcatcgcccagtctggattaataatgccattggtacgcactggtattagacaaagtcgagttgggttgaaatattgtgaaatcttggctttctcataagtttgggtaataaccttactgaatctcagtatcctcatctgaaaagtggagctaacaatacccgcctcgtaaatgaggaggcagattaactgaaacataactaaaacccagtgaggtagggattggcaaactctctgctaccccaccccaattactcatgcagtctccttcatccttccagaacatctctggctccatccctggaaaatatcaaaatatttagtgggttgggaaatgccctatttatagtacttagtatttatatagtgcctatctctttatatttcttcatttctccgtttgcctcttctggaagagctacagaattttctttttccttttagcttttatttacacacattctgtgcaattatggtcagcaagagggcattttccatggccaccctggtagtgtttgccactcaaaggtttatgctggcgggcagcccgcccttgagctgtttacccactgtgtggtgtataagaaaccattggacctgtggccagttaaactcaaacaaaatgttttcatttggacctctcctgtaatggggcggtttttttttaatttgttatatttaatttttgtgggtacatagtacacacatatttatggggtacatgagatattttgatactggcatacaacacataataatcacatcagggtaaatggggtatccatcatctcaagtgtttatcttttgttttacaaacaatccaattataatcttttagttaatttaaatgtacaattaaattattttttactatagtcaccctgttgtgctatcaaatactaggtcttcgagattttaacactggagcatagaggaggtcagtctctactgactgctgaacatccaacacgtgacacccaggagttgtctaccaccatgttttggactaagggaaaaaagcaggtaaagagagagatgtaagtcctgaccatgtcagagtacctggatccagcatgttcctgagtcccagctgcattcctgtccttgcattctgattattagtttcctatttgtgttagccacttggaattgggtttctattatttgtaaggaagagtcctaacaattccagagatggaccaatactctgtcagaggcctttcagatctcacattccaagagttgatgaaggcttctccctcccactcagggccacctctttaccatatgttacttttgtgagaactagaaaaaggtgccccttcctcaagacactttatgccacatgctggaaaattgtcacaaaatactggtgttctgagaacagggcactctattacaagaaaattggatctaccatctccactatgtgaattccacccctagagacatgcattgtacaacttactcatccaggtaaaacagccctgtcaactgtccctcatttcacctttgaacatgcagattgtatattccctttcagaattcagaaaaatgca

SEQ ID NO: 584944 - DNA, 4001 bp, Homo sapiens
aacaaaaaaaacactaagatacattttttaaaaccaaaagtataccacaaagttagcatgaggagtatgggaaaaacccacctcagatttattaacaatgtccaaacggaaaactggatgtgctttccccaaatataactgataaaattcccacaagaacactagtataacaggtggagtggatattccaaaaccaaaatatgttaattatagtatctcacattccatgataagcattcaaggacacctggtaattaaaggaattatgagaaacaactgagtaccttaaggcctgttcagttacaaaagaaaaaaaaaattctgcaataataataatcctttacacttggatagcactttgcaattttcacgataccttatgacaaaacactttataatagagttgttttatgaagttagtgcatacgcacacaacgtactttagtcctagagttcatataccaaccacatcaaattataacagcacgcacaaagataagcggcacttcaaattttactaatgtcattgtggctgatcatcactttattcagaaatggtccgttacaatcctcttccgtagagtttgactctctttaaagtctatgctggacagggcatcttcctgggtccctagctttgggggagggtaattcctgccaggaagctggttccaccagtcctgctgtagctgctgtctgccctccaggaccaagaaaggacaggtattctcagtacattatccagctcttcttaagaggacaaccagtaaaggcttcccaaggtgttcctacagttctccctcaactcctaggaaaacaaaggttcaggcccagctctgtcacttcgtattccgttcttgataatataggtactccataagccccagcccacagtcatctggcagaggatggagtggaggacataatacccaagatacccaaggggctgcaaggtaaagggtgggtagcagagaattcagccaactcttaagttgccgcttgcgaaacgcagctagcccatcaggtctccttcgaagggggaaggtacgcaattcagaatgtgagaatgagaaacccgggacgccgggcatacaacagggatgggaggactgcatagagaagccaacgggccggccagcccgaagggcggagatcgctgctgggggcggcggtgcccagcgggtcagagccgtggggctggcgaggaccccaggccgcgttcgcccgacaggctccccggcgaggtttcaaaccgccgcccccgcgaggcgctcagccgattggaagttccacaacgaccgtcactacccagggccggagcggcaactccgcagcggagctctgcctgcccgctgcgttcccccaagagactagaccccacaaactcctcctccaccgcggtcccaactcgagtccccccgccgtctccgagcactcggagggcgcccctctgggacgggaccgacgcctcggaccgggctgcgccgcgggagttcgaggtacgcgacggggccgcgcgggggaggcgggcggaacgggcgcccctcggagtcggtgtccggacgcaaccccgcgaccccctccgcctcgcccctcgggcacggcccgactgggatccgacccacccatcccgccaggtcgcgggcagggcgaggacccgagcgagcctactcctcccgcccctgctcttacccatctttccgcctcgccttgtagacgtgaccgtaggtgccgcgtcccactttgcacccttcgtactcaaacaaatcctccacccgctcccgctccgccgccagcttcgccttgaaatcataatccattgtctgcttcccccatagaggcacgggacgcgggggccgccgccgctcagtccctcctcctcctccccccgcgaccgccgctccacttctccaacagccgcctctcgcgcgcgcgcgcgcgccgcccgccgcccgccgctccgcggtccgccttcagcaagggactcctcggcggccacagcagccacctcctccacctcttcctcctcctcctccgcgacggcggcggcggctcccgcaggcacccccagtcccgcctccctccttcatttccttgttttggaacctggtgggccgcgccgtggcttcctcgagctcattagcgaactcactggcccgccccatggtcgcggaggctcctgggaaatgaagtcgcgaaggcctcagcggcctgggcggttttgccggcgtaagaaatacagctcccaggttacctcgggccaccacagcctcgcccccacaaagcatgcgcgcctgcgtaccagggccgcccctccccctcaggtagcgcacggctcccggttcctgtgaaggtagaaagctcgaagttccagtgtgctttctgcggttctcggggagacactggaaagaagtgccttactctagtgggaaggggatacttcactgtaactagccccacgcagagagtatggaaagcattaaatcagcaccttgctgaagggttggctgcagtgactcgggaggcgagggctggtgaggacagttgtaccgcagcttgtttcttttctagggcagtgggtccgcctattgccccgccccccgtcccgctgctcattggcgggggctggagaatgacgtcctcgttggtgcgtgggtatccccaggctttggcttctttcccgctcttgattggtgattggatgtgctcggttcttcctgataggttgatcttttttctttacgatgcaaaaaccgtatttcaaaaactgaaccttcagcagtttcctagagcctgccttggccagaggagaacatgcaacttctgagccccagcagccaatcatcattttcttggcgctgtagtcagctttctcttagcatatgcggttcccataaccaggctttggccatctgtctaaggacaattaaaagtgcctggaggaagccgcgtttacgatcctttgggttgaattgtaaaggattttttatggtctatgcatgatgtgaggttctagaatgtttaagaaagcccctttagttagggtgaacgttgattgatttcattgtgttggggctcaggacacactaccccaaattataactgaaggagtccagaatatgccaccccaaaatacgccactctggcatattgatgtcttttagcaaaataaattaagatccagccaacacaggaaaatgcttcacttatcccactactgcctaaaataaagaataactcttcctttgtaaagagaaatttacatttctaaaggaaattttcgtaattaaaggaatcttaccagaaagagagctgctgctagtcaacttgtatcatctgagatacttttatctgcataaaagtcaacctttattcaccttagacattttttcctcttatcctctcttaacttgtctccaccactcctggaagccccaaaccccacttttgttttgaagagactggccttgctgtgttgcccaggctggcgtccaactcctgagctcaaggatcctcctgcctcagactcctgagtagctgggattacaggtccgtgccaccatgccgggccccacttcctttttgaggtcaggatgtaatataagtgtcaaacatctggcccttctttgagtctcatattttgtgggactcttgtgcatacatacgtaattaaaactttttctcctgttaacctgactggtatcaatttagtttatagaccagctgaagaacctaagagggtttcctcccctgtaatggtgagcctaatgtcccaaatgtttgggatacacacttaaacatgattggtgctaggataggacataacacattcattaggaggacaaagaagggaattgtcaattctacccaaagtggtagataaggaaagaatagtgaactgcctgctaggttttgaaagaaacttggaaaactagtgggagggggaatgatttaccttatttgctacatcacccactcctggaaaacttccttagaccttg

SEQ ID NO: 584945 - DNA, 4001 bp, Homo sapiens
aaattctgcaataataataatcctttacacttggatagcactttgcaattttcacgataccttatgacaaaacactttataatagagttgttttatgaagttagtgcatacgcacacaacgtactttagtcctagagttcatataccaaccacatcaaattataacagcacgcacaaagataagcggcacttcaaattttactaatgtcattgtggctgatcatcactttattcagaaatggtccgttacaatcctcttccgtagagtttgactctctttaaagtctatgctggacagggcatcttcctgggtccctagctttgggggagggtaattcctgccaggaagctggttccaccagtcctgctgtagctgctgtctgccctccaggaccaagaaaggacaggtattctcagtacattatccagctcttcttaagaggacaaccagtaaaggcttcccaaggtgttcctacagttctccctcaactcctaggaaaacaaaggttcaggcccagctctgtcacttcgtattccgttcttgataatataggtactccataagccccagcccacagtcatctggcagaggatggagtggaggacataatacccaagatacccaaggggctgcaaggtaaagggtgggtagcagagaattcagccaactcttaagttgccgcttgcgaaacgcagctagcccatcaggtctccttcgaagggggaaggtacgcaattcagaatgtgagaatgagaaacccgggacgccgggcatacaacagggatgggaggactgcatagagaagccaacgggccggccagcccgaagggcggagatcgctgctgggggcggcggtgcccagcgggtcagagccgtggggctggcgaggaccccaggccgcgttcgcccgacaggctccccggcgaggtttcaaaccgccgcccccgcgaggcgctcagccgattggaagttccacaacgaccgtcactacccagggccggagcggcaactccgcagcggagctctgcctgcccgctgcgttcccccaagagactagaccccacaaactcctcctccaccgcggtcccaactcgagtccccccgccgtctccgagcactcggagggcgcccctctgggacgggaccgacgcctcggaccgggctgcgccgcgggagttcgaggtacgcgacggggccgcgcgggggaggcgggcggaacgggcgcccctcggagtcggtgtccggacgcaaccccgcgaccccctccgcctcgcccctcgggcacggcccgactgggatccgacccacccatcccgccaggtcgcgggcagggcgaggacccgagcgagcctactcctcccgcccctgctcttacccatctttccgcctcgccttgtagacgtgaccgtaggtgccgcgtcccactttgcacccttcgtactcaaacaaatcctccacccgctcccgctccgccgccagcttcgccttgaaatcataatccattgtctgcttcccccatagaggcacgggacgcgggggccgccgccgctcagtccctcctcctcctccccccgcgaccgccgctccacttctccaacagccgcctctcgcgcgcgcgcgcgcgccgcccgccgcccgccgctccgcggtccgccttcagcaagggactcctcggcggccacagcagccacctcctccacctcttcctcctcctcctccgcgacggcggcggcggctcccgcaggcacccccagtcccgcctccctccttcatttccttgttttggaacctggtgggccgcgccgtggcttcctcgagctcattagcgaactcactggcccgccccatggtcgcggaggctcctgggaaatgaagtcgcgaaggcctcagcggcctgggcggttttgccggcgtaagaaatacagctcccaggttacctcgggccaccacagcctcgcccccacaaagcatgcgcgcctgcgtaccagggccgcccctccccctcaggtagcgcacggctcccggttcctgtgaaggtagaaagctcgaagttccagtgtgctttctgcggttctcggggagacactggaaagaagtgccttactctagtgggaaggggatacttcactgtaactagccccacgcagagagtatggaaagcattaaatcagcaccttgctgaagggttggctgcagtgactcgggaggcgagggctggtgaggacagttgtaccgcagcttgtttcttttctagggcagtgggtccgcctattgccccgccccccgtcccgctgctcattggcgggggctggagaatgacgtcctcgttggtgcgtgggtatccccaggctttggcttctttcccgctcttgattggtgattggatgtgctcggttcttcctgataggttgatcttttttctttacgatgcaaaaaccgtatttcaaaaactgaaccttcagcagtttcctagagcctgccttggccagaggagaacatgcaacttctgagccccagcagccaatcatcattttcttggcgctgtagtcagctttctcttagcatatgcggttcccataaccaggctttggccatctgtctaaggacaattaaaagtgcctggaggaagccgcgtttacgatcctttgggttgaattgtaaaggattttttatggtctatgcatgatgtgaggttctagaatgtttaagaaagcccctttagttagggtgaacgttgattgatttcattgtgttggggctcaggacacactaccccaaattataactgaaggagtccagaatatgccaccccaaaatacgccactctggcatattgatgtcttttagcaaaataaattaagatccagccaacacaggaaaatgcttcacttatcccactactgcctaaaataaagaataactcttcctttgtaaagagaaatttacatttctaaaggaaattttcgtaattaaaggaatcttaccagaaagagagctgctgctagtcaacttgtatcatctgagatacttttatctgcataaaagtcaacctttattcaccttagacattttttcctcttatcctctcttaacttgtctccaccactcctggaagccccaaaccccacttttgttttgaagagactggccttgctgtgttgcccaggctggcgtccaactcctgagctcaaggatcctcctgcctcagactcctgagtagctgggattacaggtccgtgccaccatgccgggccccacttcctttttgaggtcaggatgtaatataagtgtcaaacatctggcccttctttgagtctcatattttgtgggactcttgtgcatacatacgtaattaaaactttttctcctgttaacctgactggtatcaatttagtttatagaccagctgaagaacctaagagggtttcctcccctgtaatggtgagcctaatgtcccaaatgtttgggatacacacttaaacatgattggtgctaggataggacataacacattcattaggaggacaaagaagggaattgtcaattctacccaaagtggtagataaggaaagaatagtgaactgcctgctaggttttgaaagaaacttggaaaactagtgggagggggaatgatttaccttatttgctacatcacccactcctggaaaacttccttagaccttgagtctcttcaggctgggtgcagtggctcacacctgtaatcccagcactttgggaggccaaggcgggtggatcacgaggtctggagttcaagaccagcctggccaagacagtgaaaccctgcctcttattaaaaatgcaaaaattagccaggtgtggtagcatgtgtctgtagtcccatttactcgggaggctgaggcaggagaatcccttgaacccgggaggcagaagttgcagtgagctgagaccatgccactgcactccagcctgggcaacagagcaagaccccgactcaaaaaaaaatggtatctttaatcaa

SEQ ID NO: 584946 - DNA, 4001 bp, Homo sapiens
cctcttccgtagagtttgactctctttaaagtctatgctggacagggcatcttcctgggtccctagctttgggggagggtaattcctgccaggaagctggttccaccagtcctgctgtagctgctgtctgccctccaggaccaagaaaggacaggtattctcagtacattatccagctcttcttaagaggacaaccagtaaaggcttcccaaggtgttcctacagttctccctcaactcctaggaaaacaaaggttcaggcccagctctgtcacttcgtattccgttcttgataatataggtactccataagccccagcccacagtcatctggcagaggatggagtggaggacataatacccaagatacccaaggggctgcaaggtaaagggtgggtagcagagaattcagccaactcttaagttgccgcttgcgaaacgcagctagcccatcaggtctccttcgaagggggaaggtacgcaattcagaatgtgagaatgagaaacccgggacgccgggcatacaacagggatgggaggactgcatagagaagccaacgggccggccagcccgaagggcggagatcgctgctgggggcggcggtgcccagcgggtcagagccgtggggctggcgaggaccccaggccgcgttcgcccgacaggctccccggcgaggtttcaaaccgccgcccccgcgaggcgctcagccgattggaagttccacaacgaccgtcactacccagggccggagcggcaactccgcagcggagctctgcctgcccgctgcgttcccccaagagactagaccccacaaactcctcctccaccgcggtcccaactcgagtccccccgccgtctccgagcactcggagggcgcccctctgggacgggaccgacgcctcggaccgggctgcgccgcgggagttcgaggtacgcgacggggccgcgcgggggaggcgggcggaacgggcgcccctcggagtcggtgtccggacgcaaccccgcgaccccctccgcctcgcccctcgggcacggcccgactgggatccgacccacccatcccgccaggtcgcgggcagggcgaggacccgagcgagcctactcctcccgcccctgctcttacccatctttccgcctcgccttgtagacgtgaccgtaggtgccgcgtcccactttgcacccttcgtactcaaacaaatcctccacccgctcccgctccgccgccagcttcgccttgaaatcataatccattgtctgcttcccccatagaggcacgggacgcgggggccgccgccgctcagtccctcctcctcctccccccgcgaccgccgctccacttctccaacagccgcctctcgcgcgcgcgcgcgcgccgcccgccgcccgccgctccgcggtccgccttcagcaagggactcctcggcggccacagcagccacctcctccacctcttcctcctcctcctccgcgacggcggcggcggctcccgcaggcacccccagtcccgcctccctccttcatttccttgttttggaacctggtgggccgcgccgtggcttcctcgagctcattagcgaactcactggcccgccccatggtcgcggaggctcctgggaaatgaagtcgcgaaggcctcagcggcctgggcggttttgccggcgtaagaaatacagctcccaggttacctcgggccaccacagcctcgcccccacaaagcatgcgcgcctgcgtaccagggccgcccctccccctcaggtagcgcacggctcccggttcctgtgaaggtagaaagctcgaagttccagtgtgctttctgcggttctcggggagacactggaaagaagtgccttactctagtgggaaggggatacttcactgtaactagccccacgcagagagtatggaaagcattaaatcagcaccttgctgaagggttggctgcagtgactcgggaggcgagggctggtgaggacagttgtaccgcagcttgtttcttttctagggcagtgggtccgcctattgccccgccccccgtcccgctgctcattggcgggggctggagaatgacgtcctcgttggtgcgtgggtatccccaggctttggcttctttcccgctcttgattggtgattggatgtgctcggttcttcctgataggttgatcttttttctttacgatgcaaaaaccgtatttcaaaaactgaaccttcagcagtttcctagagcctgccttggccagaggagaacatgcaacttctgagccccagcagccaatcatcattttcttggcgctgtagtcagctttctcttagcatatgcggttcccataaccaggctttggccatctgtctaaggacaattaaaagtgcctggaggaagccgcgtttacgatcctttgggttgaattgtaaaggattttttatggtctatgcatgatgtgaggttctagaatgtttaagaaagcccctttagttagggtgaacgttgattgatttcattgtgttggggctcaggacacactaccccaaattataactgaaggagtccagaatatgccaccccaaaatacgccactctggcatattgatgtcttttagcaaaataaattaagatccagccaacacaggaaaatgcttcacttatcccactactgcctaaaataaagaataactcttcctttgtaaagagaaatttacatttctaaaggaaattttcgtaattaaaggaatcttaccagaaagagagctgctgctagtcaacttgtatcatctgagatacttttatctgcataaaagtcaacctttattcaccttagacattttttcctcttatcctctcttaacttgtctccaccactcctggaagccccaaaccccacttttgttttgaagagactggccttgctgtgttgcccaggctggcgtccaactcctgagctcaaggatcctcctgcctcagactcctgagtagctgggattacaggtccgtgccaccatgccgggccccacttcctttttgaggtcaggatgtaatataagtgtcaaacatctggcccttctttgagtctcatattttgtgggactcttgtgcatacatacgtaattaaaactttttctcctgttaacctgactggtatcaatttagtttatagaccagctgaagaacctaagagggtttcctcccctgtaatggtgagcctaatgtcccaaatgtttgggatacacacttaaacatgattggtgctaggataggacataacacattcattaggaggacaaagaagggaattgtcaattctacccaaagtggtagataaggaaagaatagtgaactgcctgctaggttttgaaagaaacttggaaaactagtgggagggggaatgatttaccttatttgctacatcacccactcctggaaaacttccttagaccttgagtctcttcaggctgggtgcagtggctcacacctgtaatcccagcactttgggaggccaaggcgggtggatcacgaggtctggagttcaagaccagcctggccaagacagtgaaaccctgcctcttattaaaaatgcaaaaattagccaggtgtggtagcatgtgtctgtagtcccatttactcgggaggctgaggcaggagaatcccttgaacccgggaggcagaagttgcagtgagctgagaccatgccactgcactccagcctgggcaacagagcaagaccccgactcaaaaaaaaatggtatctttaatcaagaaaaatctcagttgctcttgttgccatgcactataataactgctggagatagcaggaaaaaaattagtctttttccattggggaattaaacctgaaaaaacaaatatgcaagcaaattaaaaataaactgtggtttaaaagagcactggtagaataggcggggttctaagtgagtcagggtagacttcatgaagtaggtaggtttgagccaaatttttttttcactccagccccatctgctgagtgagagcc

SEQ ID NO: 584947 - DNA, 4001 bp, Homo sapiens
aaaaaataaagttggagccctatttcacatttcacatcatatacaaaaattaaccgaaaatggatcatagacctaaatttaggagctaacattatgaaactcttagaaaaaaacataagcacaaatctttatgatgttagagtaggcccttctttcttagctaagaaatgaaaagcacaagcaacaaaaggaaaaacagattagatgaagaagatacagaaatgggccaggtgcagaggctcatgcctataatcccaacactgggaagccaaggtggcaggatcacttcaggccaggagtacaaggccagagcctaggcaacacggaccctatcgctacaaaaaaaaaaaaaaaagtaaaatttagccgggcatggtggcatgcacctgtagtcccagctacttgggaggctgaagtgggatcacttgagaccaggtggtcaaggctgcagtgagccgtaatcgagccactgcactctggcctgggtggcatagggaagccgtgtctcaaaaacacacacatacaaatggctgataagcacatgaaaagatgtcaacatcatgagccatcagggaaatggaaatccaaaccacaataatacaccacttcatacccattaggatgggtagaatcaaaaagacaaataactgttgacaggcatgtggattacatcacccagaggggaagaaaaagagaacagaggtaggagaaggtacaagaccacgacttgagagactccaaatttaactgccagataaaggaaaatcagcttataatggattccaagaagcagccaccagacaaggaaaaaaatccatgggccatggaaggcaaatgaaaagggcatctcaaaaaagtggacatggtcaatgctggtgaatgaaaatgaaaggttaagtaaaataaatgaaaatatctcttcgatttaatgctatgtaaagcacaatgtttccataacatgatagtggcaaatagctaaaacattaggctacctctctgcattttctaacatgcagaaatacgcacagcactcaaacataaaaggtttaaaataaatcagtaccttaattatctgcaattagtctaaagtcctcttgaaagatgagtctggaaaataaaaattgattaggaaaagtaagcacccaaaaagttcacaaaaccactgtaaggattctttacttaaaaggaatcagactccataaaagactgctttatacagcaggattaatgatgctccatactacttgtaacttcttactgattacaacaggtgtgctgacatctgccgtgacggtgatccagtgtctggctttagtaataaatgttgtattcagcaccgcaacacgtctgcatagtgcgagtaaccaaccactacaaaacaggattaagtcaataaggtagatagacatccagatcacgttccatccgaaagataactgtcgtcccgagattcagaaaaaggttttatgagcaaagaagaacgaaaagtgaaaaagcaagacacctgcttttctcaataacttctgcttaaattcttaacatactgatctgggaaagctatataactgcgaaagccttgtcacatctacaaattcactaaggtataaagtgggagaacaaatgaagttaaacctgacaataaggaacgaggtgcctaaaatactcctaactggagagcggcacctgaggccaacgaccctatcctcgctcctggaagccccatctgcctcccaattcccccatcccagctggcaaatccccttttaactgcgaaacaaatttgcaaacagcccaagaaaaactgaaactggagaaacaaggcttggccataaaaggagctgtggccacactctgccccacatggacccatcggccacccttacccagaagtcgggaagtaaaaaccagtccaaagtgagaaaatcaacccgccactctccggaagctgcacagactttagatggagagcgccatgacacatacgtcccgccacgtttatttgcgcatgctcagcgacggtggcccgaagagatcaaattacatcattgctgaaagcgctagttctggtttaacttagtttaggaatgactacgcttcaagttcctttgattccaagaactaaaataacaaccctgagtcctcgggttcctagaaatgcttaatagccaacttctcctaagcttttatgtgttagacactgtgctaagtactttgcataaatattattcactatttatttattattattattattcccagtttacaaaagaggacactggaagtttaaggacttaatctaagttactctactagtcgtgctgcgctctgggctggatccgatgctgtctgactcccaaagaacttgctcttttcactgcattttactagcctcctcaatcatttgtgaaaagaggtctcttctttaatattaaaaaaacaggaaggaaaggataaaggtcagttggtaggtttcacttaatatacatcattgagcaccacacaagtgtttttgttttttgttttggaaaacttagatggcagtttagcagacacctatggaaagaaaatacttttatggagtacggattctcacccgctttctctacatatgttatctcactttactattcgttacccaagacactgtatttgaccatgtgtttaccagaagaatatctttacttgaaaaagtaaaggtaataggaggcaataggccatgaagaagggtcagaaatcgtgagttttatgcctgacttagggtttcatagtgatttggggcaattactttgttttgcaaatgcctttcctagtacaatttcatctaattaaaatgccatccatctactcaagaggctgatgtgggaggatcacttgagctcagaagtttgaaaacagcctgggcaacacagtgagacccagtctctaaaatagatttaaaaaaaaaaaaaaaaaccacccttttctctgtttatccatatccataaaataatctaaactgtgccctggggtccactgttgtctttacccacctaaattaaaattgtgtatttatgttgccctactttttttttttttttttttttttttttagatagggtcttcttctgtcacccaggctggagtacagtgttaccatcacagctcactgcaacctctccctcctagcctcaagagattctcatgccttagcctcccaagtagctgggactacaggtgcacaccaccatacccatctaattccatctctttcactagaccaaaagtaggccctgggttatcttcttggttgtaatcgcactacctagcacataaccttgtgcctatgtttatagcttctcaataaacatatgttgaatgaatgaatgaatgaatgaatgactccaccccttttcccccaagatctagttgagttcagtaaaagatattttactgagtatgtaccccatgaccacaagcactgtgatagatgctagagctaaaaagaaagaaaaaaagtactgcctattgcaattgcaggctattttgaaaaaattcatttcagtagagaatagcaatcactatgaaagatgaatgcacaggaacacaaaggtgaagtaagggaaatggatgaaggcattccaagctggagagtcagccagagcaaaagcaaggaggcctgaaatgatgaattattccacagtgtaaaagcaaagagagtgaagctggtgatgggagaagtctaccagagaaagggaagcacagggactagatcaaggtgaaccttgtgtattcaaaggcattagacttaatcctggatgtatgtagtaggcaacatgaatgtgttcgagcagattattctctcaggacaatgggtttgaggacgatatttcagacatgaagaaatagtaaaagcctaaattgagttgttggctgggaggaatgggaaggaaggacagatttaaacaaattgaggaggtaacagcagcaagacttggtgattgataggtacgaaaaaagaggaa

SEQ ID NO: 584948 - DNA, 4001 bp, Homo sapiens
tcgcgccggccagccccactccgcgggaaagcctgtgtgctattcccgccagggccgggagggggcgccggcctccaggaaatcacgcgcggagtgggaggtgcgtgggcagagcctcggaccgctggagggagtagtgatgagtcagtttcctgcaaggcgctgctcgcccgccaaaactgcttccactccggctgcgcgtcaccctggggtggggagggggagaatgggaggggaccggggggccgcgaacacgtcacgctgagccggccaggcttccgaaactcccgccgctgttgggaaaccgcgcgctcttgtgccgtctctgacacagacacacacacacacacacacacacacacacacacacacgcccgcgcagacacgcacgcgcgcgcgcgccgggagccggcccctccaccttatctccacgcccaaagcacgggatgagtcagatccctggaaaataaaaatagacgggagcaacgaaaacaaaaccgctcgcaagtcctcccagaaacgcgacgtggagggaggcaaggagaggggaagctgcctgggcgccccaagttcctaacccagctccaagatgcttttcctcacgaagagggcgcaagtgtcccccaggggtttgggacggagaggacgcgctgtggtccgcgccaggcggcggcgccccagggggcgactcgcccccctgctccgctcagccctgtagctttcggagagggaatctgggctaggtcgggaagccctgagcccccgaggcagctgatagaggccctgagcagcgtcgtgccccccagaccccccacccctcaaagacatgaaccctccccgcctcccatccaggcgtgggctccgctcccgccccggagtccagcgccccgacccgaggacaggctgggccgcgattctcccggccgcggtgggaaagaggtagaggagacccttgcccttccccgactgacaggctggttagagcccgcccagagcagggccgtgactccccgacccctacagcgcgccgcggagcggggacccgacgcggtgtcccggacctccagtgcccggcttccttgggaacaaactgttccagccaaataggtcactgtgccgatgggaggacggagaccgcgaaggggcaggggagagggcttctggagtcccgctgtaccccatcccgggcggggttctgacctcatacagtccgttccctggggtctccttgtcacagtgagtcacctcctcgctagtccttaggggacgggtcctggcacattcccaagggccaggaaacagcccgcgctgacctcagcgctcagccaggtggtggacacagtggcgtaaaggacctgaacctgggacctgggccagggcggcgcagattggatcccagagccacccgggaccgatcctagacgaacttactccactccgctttcctcgcccttcctgggcccctccagggacacggacttcatccccacgccgcgagcaaactgcgcctggggcctggagccaaccgcagccaaaggcgagctcccagaacggtcccgtccacgccctccctcgccccagctgggtttccaggggcggggagcgtgaccagggattcctgtacttgtaatcccgctctccgccccggggtctccggcacatcccgactctcgtcacccgcgcacttagagacaccgtgtgcgcaagccgagcgcgcaccgacccacgcccgtcattcacctgccgcagaaacacctgtgaacgcagcacacacccgcgaacacgcatcctcgcggacacgcagggacacacgcgggcacgcttggctcggctctgggccgccggcccggggtcccctgttgtctgccgccgctctctcacctcctctgagtgcctcggtgcctcggcgaatccgcgcccagctccggctccacaaggaactgacttcggcagctgctcacacctcagctggcgcagctcagcgcggccctgatatacaaccgccccgcccgggcccgcctcaaggaggcgggacccgcgctcggcccaccgcgccgcccgggaccgccctccccggggcccaggctcctggctgcccagcgccgagccagctgagcctggccgagttccagcaggccagccggtcccggaacctcgcgtgctgcaggagggcacttccctcctcccccagtccctcgcctgcgttggtgcgctggacacatttccccacgaagtgagccacaaatctggctttttttacttggagaatgagttggcactctccaggaggacacagcactgttagaatgagccccctttctggctcaccgctgacccactctggcaggcaaggatttacccaatgcagctgaaaagatcaggaggatgacattaatacataaaaattcataaattataaaaacgatgcacctctctgcaatttccagaaaagccccacaatatcacctctattcccactgatccctcactaggtcacctctcccagaagcacctggagcacctagacaccccaacaaagcatcttgaggccagaatgatttttcagtcccgtttatttcacagatgaggaaattgaggtccactgaacttaagtatacaaagttgttgattgtcacatgcttccgggaaggagggaattggagagactaccaaaaaagggcaacctgatctccagggaaacagaagaattggacattgaaccaatctccctacaccctacactcacctgaacagaagaaatccctgtggttgcagcagctttgttggccaggaaggggaggatttgacgagtgagttgtctgtctcctgaatactccccacatagcccgtatacactgctggggaaactggggctcagagaagtctggtgacctaactcagatcatgcagcaaagaaatgactatagttggaacacaggacttttgcctcctgcccggggctctctgcttgtcatcctttatttctgtggctccaaaatgacaaaaatgccaaataaccctcatttgcagatggtttatggagatgacataaataaaggacaattctggaagtgtctactggttcttctgacagacacagaaatgagtgatgtgtctatccgctcccatctacctcacacccctgacctcccctggacttcacctttgcctcctttctgtgcctgaaacatttgcagttttgcttttaaaaaattgcagaggatggattgttcatctgaacagaaatcccactaaaaaacagaacccaggcttggagcagctacaattactgacatctcaggctgctcagagtctggaaatctctgcccagacatgcccagtcttcttcctctaacgcagctgacctcggggaggacaggcttctttctcctctgctgtggggatgggagcccaggtaggggtgggaggacacagtagcagacccccttggcctgcctcgccctggagtcaggccaggattgtggctaaaccccagaaaggccacggcacagcctcaggaccccactctaagccccactgctgtctgcaccttcgctcctatacatccaaaccatccaaagggctggttgtcaaatgtccagcagaggacaggcaccttctcccactgccttgaagcccctctgctttcaggcatttcaaatagactagacattgtctgtctgtttactttggggagaaaattttttttaataaaggcttgtaatgaattatttaaatttttgtggtactgagcttcacaatgaaataattctttttgttgttgtttttgggaaagaattttttttataacttctagctcaccaccaccacgacattcaatatttcttaagtacctactaagtgtctagtactattcagtgctttaaaaaaaaaagtttgcaaccatgcacttgaatgtgtacccagacacactctaagggaggacttctgccctgaaaaaggcaagggagcaggctgttaaaagtcacacacagaatctg

SEQ ID NO: 584949 - DNA, 4001 bp, Homo sapiens
catttccccacgaagtgagccacaaatctggctttttttacttggagaatgagttggcactctccaggaggacacagcactgttagaatgagccccctttctggctcaccgctgacccactctggcaggcaaggatttacccaatgcagctgaaaagatcaggaggatgacattaatacataaaaattcataaattataaaaacgatgcacctctctgcaatttccagaaaagccccacaatatcacctctattcccactgatccctcactaggtcacctctcccagaagcacctggagcacctagacaccccaacaaagcatcttgaggccagaatgatttttcagtcccgtttatttcacagatgaggaaattgaggtccactgaacttaagtatacaaagttgttgattgtcacatgcttccgggaaggagggaattggagagactaccaaaaaagggcaacctgatctccagggaaacagaagaattggacattgaaccaatctccctacaccctacactcacctgaacagaagaaatccctgtggttgcagcagctttgttggccaggaaggggaggatttgacgagtgagttgtctgtctcctgaatactccccacatagcccgtatacactgctggggaaactggggctcagagaagtctggtgacctaactcagatcatgcagcaaagaaatgactatagttggaacacaggacttttgcctcctgcccggggctctctgcttgtcatcctttatttctgtggctccaaaatgacaaaaatgccaaataaccctcatttgcagatggtttatggagatgacataaataaaggacaattctggaagtgtctactggttcttctgacagacacagaaatgagtgatgtgtctatccgctcccatctacctcacacccctgacctcccctggacttcacctttgcctcctttctgtgcctgaaacatttgcagttttgcttttaaaaaattgcagaggatggattgttcatctgaacagaaatcccactaaaaaacagaacccaggcttggagcagctacaattactgacatctcaggctgctcagagtctggaaatctctgcccagacatgcccagtcttcttcctctaacgcagctgacctcggggaggacaggcttctttctcctctgctgtggggatgggagcccaggtaggggtgggaggacacagtagcagacccccttggcctgcctcgccctggagtcaggccaggattgtggctaaaccccagaaaggccacggcacagcctcaggaccccactctaagccccactgctgtctgcaccttcgctcctatacatccaaaccatccaaagggctggttgtcaaatgtccagcagaggacaggcaccttctcccactgccttgaagcccctctgctttcaggcatttcaaatagactagacattgtctgtctgtttactttggggagaaaattttttttaataaaggcttgtaatgaattatttaaatttttgtggtactgagcttcacaatgaaataattctttttgttgttgtttttgggaaagaattttttttataacttctagctcaccaccaccacgacattcaatatttcttaagtacctactaagtgtctagtactattcagtgctttaaaaaaaaaagtttgcaaccatgcacttgaatgtgtacccagacacactctaagggaggacttctgccctgaaaaaggcaagggagcaggctgttaaaagtcacacacagaatctgactcccagcacacactcacacaagcacacatgcatcagatcccagccctgtcgcaaggatctgctggcagatcacataccctgttcagagtaacaggctaaggtttacctggggtctttagaggtctcctgtctcctaccatccccttcctcacctgaaaacaggcagcccaaggacaaaatagccaccagcctcttctatgccagagctcaacatgttgggacatgttcctgacggccagaaagccaatcagagccacagcctgctgcccaagcatgttcctgggaagcaggcagcatagggatggagggaggctcagcctgggggacaagagtgcccagtccagccccctccccagagtgcggtggagcagcatggggtaggggaatggtgaaaggtggaaagcccaagcctgaagaaggaggatgtgaggaaggctcagtggtggctgcagaagctgcctaggaagggagaggaagtgctgggaacaatgtcaccatttctcagaaagagactggggagtcccaaataggggcagtcagctttcagaggaattcaccttcacacaggctcccaagaagtgagaccccagagaagaggcggaacaaagatagaacattattgagcagaggcagccctggctttttgttttcattttgtttttttgttttgttttgttttttgagacaaagtcagcagtggcacaatctcagctcactgcagtctccgcctcccaggttcaagcaattctgcctcagcctcccgagtagctgggattacaggcatgcaccaccatgcccagctaatatttgtatttttttttttgcacaaaaagttggatttattgtttctgacaagtggttagtaattttcagtttgctcatgttcctagcatcacaaatctgaagtacaattttgcttctcaattaaaaatatatactggccgggcgtggtggcttacgcctgtaatcccagcactttgggaggccgaggcgggcagatcacagggtcaggagttttgagaccagcctggccaatatggtgaaaccccgtctccattaaaaatacaaaaatcagccgggcatggtggtgggcacctgtagtcccaggtattcaggtggctgaggtgggagaatcgcttgaacctaggaggcggaggttgcagtgagctgagatcatgccacctgcactccagcctgggtgacagagtgagactccgtctcaaaaaaaaaatatataaatctttgtgtaaaatgaaaaaaaaatcaaggcataaaaatttcattgtgttctacatttttaaatataaattgcctcctttaaaatattttcatccattcattcaaaaaccttttaacttcaactgtccaatttaagatagagtgaagacatttttgagtatctgaactaagcattgtcttgactgaaacgaagtaagaactctatgagagtccttgtgggcctcccggtcatgcctttccatagatagggaacctcatctttgttggtcatcacacctgctatgtctaaatgtgcccacttaggatgagtcacgaattctttcaggaatgccgcagatgtacatgctcccgcagatctatattttccaatgttgttaacatcagccagctggcaatctacaacctgtcttgtacaatgtttgaagagaggcatcctccagacacggtcccctgtttcaatgctggcctcgaagagcttgttccagagccaggatgaattggtaaagaccccagtggcacctgaccccaaagctacatctatgacacctgttaaggtggtggcattgaggatgaccttcgggttaaatgtgtgcacgtaacagagcgcatcagccagtatgagcctcccctcagcatcagtgttaccaacctggatggtcttcctgttcctggctctaacaacatcccccagcttgttggccttgccgctgggcatgttttcacagaggggccagacctataatattaatgggcaaactgagatttgcagcagacacaatggctgagcatatagttgtagctcctcccatgtcggccctcatgaggtccatatttgcagaagccttgatggagataccaccactgtcaaaggtaattcctttcccaacaaacaaggggtggtttgtctgcattggggctgcctatgtagtgaatttccaagaagactgagggctcgtcagatcctttggccacactgag

SEQ ID NO: 584950 - DNA, 4001 bp, Homo sapiens
ctcggatgagcccaggagtagccgcggcggttcgcgccggccagccccactccgcgggaaagcctgtgtgctattcccgccagggccgggagggggcgccggcctccaggaaatcacgcgcggagtgggaggtgcgtgggcagagcctcggaccgctggagggagtagtgatgagtcagtttcctgcaaggcgctgctcgcccgccaaaactgcttccactccggctgcgcgtcaccctggggtggggagggggagaatgggaggggaccggggggccgcgaacacgtcacgctgagccggccaggcttccgaaactcccgccgctgttgggaaaccgcgcgctcttgtgccgtctctgacacagacacacacacacacacacacacacacacacacacacacgcccgcgcagacacgcacgcgcgcgcgcgccgggagccggcccctccaccttatctccacgcccaaagcacgggatgagtcagatccctggaaaataaaaatagacgggagcaacgaaaacaaaaccgctcgcaagtcctcccagaaacgcgacgtggagggaggcaaggagaggggaagctgcctgggcgccccaagttcctaacccagctccaagatgcttttcctcacgaagagggcgcaagtgtcccccaggggtttgggacggagaggacgcgctgtggtccgcgccaggcggcggcgccccagggggcgactcgcccccctgctccgctcagccctgtagctttcggagagggaatctgggctaggtcgggaagccctgagcccccgaggcagctgatagaggccctgagcagcgtcgtgccccccagaccccccacccctcaaagacatgaaccctccccgcctcccatccaggcgtgggctccgctcccgccccggagtccagcgccccgacccgaggacaggctgggccgcgattctcccggccgcggtgggaaagaggtagaggagacccttgcccttccccgactgacaggctggttagagcccgcccagagcagggccgtgactccccgacccctacagcgcgccgcggagcggggacccgacgcggtgtcccggacctccagtgcccggcttccttgggaacaaactgttccagccaaataggtcactgtgccgatgggaggacggagaccgcgaaggggcaggggagagggcttctggagtcccgctgtaccccatcccgggcggggttctgacctcatacagtccgttccctggggtctccttgtcacagtgagtcacctcctcgctagtccttaggggacgggtcctggcacattcccaagggccaggaaacagcccgcgctgacctcagcgctcagccaggtggtggacacagtggcgtaaaggacctgaacctgggacctgggccagggcggcgcagattggatcccagagccacccgggaccgatcctagacgaacttactccactccgctttcctcgcccttcctgggcccctccagggacacggacttcatccccacgccgcgagcaaactgcgcctggggcctggagccaaccgcagccaaaggcgagctcccagaacggtcccgtccacgccctccctcgccccagctgggtttccaggggcggggagcgtgaccagggattcctgtacttgtaatcccgctctccgccccggggtctccggcacatcccgactctcgtcacccgcgcacttagagacaccgtgtgcgcaagccgagcgcgcaccgacccacgcccgtcattcacctgccgcagaaacacctgtgaacgcagcacacacccgcgaacacgcatcctcgcggacacgcagggacacacgcgggcacgcttggctcggctctgggccgccggcccggggtcccctgttgtctgccgccgctctctcacctcctctgagtgcctcggtgcctcggcgaatccgcgcccagctccggctccacaaggaactgacttcggcagctgctcacacctcagctggcgcagctcagcgcggccctgatatacaaccgccccgcccgggcccgcctcaaggaggcgggacccgcgctcggcccaccgcgccgcccgggaccgccctccccggggcccaggctcctggctgcccagcgccgagccagctgagcctggccgagttccagcaggccagccggtcccggaacctcgcgtgctgcaggagggcacttccctcctcccccagtccctcgcctgcgttggtgcgctggacacatttccccacgaagtgagccacaaatctggctttttttacttggagaatgagttggcactctccaggaggacacagcactgttagaatgagccccctttctggctcaccgctgacccactctggcaggcaaggatttacccaatgcagctgaaaagatcaggaggatgacattaatacataaaaattcataaattataaaaacgatgcacctctctgcaatttccagaaaagccccacaatatcacctctattcccactgatccctcactaggtcacctctcccagaagcacctggagcacctagacaccccaacaaagcatcttgaggccagaatgatttttcagtcccgtttatttcacagatgaggaaattgaggtccactgaacttaagtatacaaagttgttgattgtcacatgcttccgggaaggagggaattggagagactaccaaaaaagggcaacctgatctccagggaaacagaagaattggacattgaaccaatctccctacaccctacactcacctgaacagaagaaatccctgtggttgcagcagctttgttggccaggaaggggaggatttgacgagtgagttgtctgtctcctgaatactccccacatagcccgtatacactgctggggaaactggggctcagagaagtctggtgacctaactcagatcatgcagcaaagaaatgactatagttggaacacaggacttttgcctcctgcccggggctctctgcttgtcatcctttatttctgtggctccaaaatgacaaaaatgccaaataaccctcatttgcagatggtttatggagatgacataaataaaggacaattctggaagtgtctactggttcttctgacagacacagaaatgagtgatgtgtctatccgctcccatctacctcacacccctgacctcccctggacttcacctttgcctcctttctgtgcctgaaacatttgcagttttgcttttaaaaaattgcagaggatggattgttcatctgaacagaaatcccactaaaaaacagaacccaggcttggagcagctacaattactgacatctcaggctgctcagagtctggaaatctctgcccagacatgcccagtcttcttcctctaacgcagctgacctcggggaggacaggcttctttctcctctgctgtggggatgggagcccaggtaggggtgggaggacacagtagcagacccccttggcctgcctcgccctggagtcaggccaggattgtggctaaaccccagaaaggccacggcacagcctcaggaccccactctaagccccactgctgtctgcaccttcgctcctatacatccaaaccatccaaagggctggttgtcaaatgtccagcagaggacaggcaccttctcccactgccttgaagcccctctgctttcaggcatttcaaatagactagacattgtctgtctgtttactttggggagaaaattttttttaataaaggcttgtaatgaattatttaaatttttgtggtactgagcttcacaatgaaataattctttttgttgttgtttttgggaaagaattttttttataacttctagctcaccaccaccacgacattcaatatttcttaagtacctactaagtgtctagtactattcagtgctttaaaaaaaaaagtttgcaaccatgcacttgaatgtgtacccagacacactctaagggaggacttctgccctgaaaaaggcaaggga

SEQ ID NO: 584951 - DNA, 4001 bp, Homo sapiens
ggtcccggaacctcgcgtgctgcaggagggcacttccctcctcccccagtccctcgcctgcgttggtgcgctggacacatttccccacgaagtgagccacaaatctggctttttttacttggagaatgagttggcactctccaggaggacacagcactgttagaatgagccccctttctggctcaccgctgacccactctggcaggcaaggatttacccaatgcagctgaaaagatcaggaggatgacattaatacataaaaattcataaattataaaaacgatgcacctctctgcaatttccagaaaagccccacaatatcacctctattcccactgatccctcactaggtcacctctcccagaagcacctggagcacctagacaccccaacaaagcatcttgaggccagaatgatttttcagtcccgtttatttcacagatgaggaaattgaggtccactgaacttaagtatacaaagttgttgattgtcacatgcttccgggaaggagggaattggagagactaccaaaaaagggcaacctgatctccagggaaacagaagaattggacattgaaccaatctccctacaccctacactcacctgaacagaagaaatccctgtggttgcagcagctttgttggccaggaaggggaggatttgacgagtgagttgtctgtctcctgaatactccccacatagcccgtatacactgctggggaaactggggctcagagaagtctggtgacctaactcagatcatgcagcaaagaaatgactatagttggaacacaggacttttgcctcctgcccggggctctctgcttgtcatcctttatttctgtggctccaaaatgacaaaaatgccaaataaccctcatttgcagatggtttatggagatgacataaataaaggacaattctggaagtgtctactggttcttctgacagacacagaaatgagtgatgtgtctatccgctcccatctacctcacacccctgacctcccctggacttcacctttgcctcctttctgtgcctgaaacatttgcagttttgcttttaaaaaattgcagaggatggattgttcatctgaacagaaatcccactaaaaaacagaacccaggcttggagcagctacaattactgacatctcaggctgctcagagtctggaaatctctgcccagacatgcccagtcttcttcctctaacgcagctgacctcggggaggacaggcttctttctcctctgctgtggggatgggagcccaggtaggggtgggaggacacagtagcagacccccttggcctgcctcgccctggagtcaggccaggattgtggctaaaccccagaaaggccacggcacagcctcaggaccccactctaagccccactgctgtctgcaccttcgctcctatacatccaaaccatccaaagggctggttgtcaaatgtccagcagaggacaggcaccttctcccactgccttgaagcccctctgctttcaggcatttcaaatagactagacattgtctgtctgtttactttggggagaaaattttttttaataaaggcttgtaatgaattatttaaatttttgtggtactgagcttcacaatgaaataattctttttgttgttgtttttgggaaagaattttttttataacttctagctcaccaccaccacgacattcaatatttcttaagtacctactaagtgtctagtactattcagtgctttaaaaaaaaaagtttgcaaccatgcacttgaatgtgtacccagacacactctaagggaggacttctgccctgaaaaaggcaagggagcaggctgttaaaagtcacacacagaatctgactcccagcacacactcacacaagcacacatgcatcagatcccagccctgtcgcaaggatctgctggcagatcacataccctgttcagagtaacaggctaaggtttacctggggtctttagaggtctcctgtctcctaccatccccttcctcacctgaaaacaggcagcccaaggacaaaatagccaccagcctcttctatgccagagctcaacatgttgggacatgttcctgacggccagaaagccaatcagagccacagcctgctgcccaagcatgttcctgggaagcaggcagcatagggatggagggaggctcagcctgggggacaagagtgcccagtccagccccctccccagagtgcggtggagcagcatggggtaggggaatggtgaaaggtggaaagcccaagcctgaagaaggaggatgtgaggaaggctcagtggtggctgcagaagctgcctaggaagggagaggaagtgctgggaacaatgtcaccatttctcagaaagagactggggagtcccaaataggggcagtcagctttcagaggaattcaccttcacacaggctcccaagaagtgagaccccagagaagaggcggaacaaagatagaacattattgagcagaggcagccctggctttttgttttcattttgtttttttgttttgttttgttttttgagacaaagtcagcagtggcacaatctcagctcactgcagtctccgcctcccaggttcaagcaattctgcctcagcctcccgagtagctgggattacaggcatgcaccaccatgcccagctaatatttgtatttttttttttgcacaaaaagttggatttattgtttctgacaagtggttagtaattttcagtttgctcatgttcctagcatcacaaatctgaagtacaattttgcttctcaattaaaaatatatactggccgggcgtggtggcttacgcctgtaatcccagcactttgggaggccgaggcgggcagatcacagggtcaggagttttgagaccagcctggccaatatggtgaaaccccgtctccattaaaaatacaaaaatcagccgggcatggtggtgggcacctgtagtcccaggtattcaggtggctgaggtgggagaatcgcttgaacctaggaggcggaggttgcagtgagctgagatcatgccacctgcactccagcctgggtgacagagtgagactccgtctcaaaaaaaaaatatataaatctttgtgtaaaatgaaaaaaaaatcaaggcataaaaatttcattgtgttctacatttttaaatataaattgcctcctttaaaatattttcatccattcattcaaaaaccttttaacttcaactgtccaatttaagatagagtgaagacatttttgagtatctgaactaagcattgtcttgactgaaacgaagtaagaactctatgagagtccttgtgggcctcccggtcatgcctttccatagatagggaacctcatctttgttggtcatcacacctgctatgtctaaatgtgcccacttaggatgagtcacgaattctttcaggaatgccgcagatgtacatgctcccgcagatctatattttccaatgttgttaacatcagccagctggcaatctacaacctgtcttgtacaatgtttgaagagaggcatcctccagacacggtcccctgtttcaatgctggcctcgaagagcttgttccagagccaggatgaattggtaaagaccccagtggcacctgaccccaaagctacatctatgacacctgttaaggtggtggcattgaggatgaccttcgggttaaatgtgtgcacgtaacagagcgcatcagccagtatgagcctcccctcagcatcagtgttaccaacctggatggtcttcctgttcctggctctaacaacatcccccagcttgttggccttgccgctgggcatgttttcacagaggggccagacctataatattaatgggcaaactgagatttgcagcagacacaatggctgagcatatagttgtagctcctcccatgtcggccctcatgaggtccatatttgcagaagccttgatggagataccaccactgtcaaaggtaattcctttcccaacaaacaaggggtggt

SEQ ID NO: 584952 - DNA, 4001 bp, Homo sapiens
agtccctcgcctgcgttggtgcgctggacacatttccccacgaagtgagccacaaatctggctttttttacttggagaatgagttggcactctccaggaggacacagcactgttagaatgagccccctttctggctcaccgctgacccactctggcaggcaaggatttacccaatgcagctgaaaagatcaggaggatgacattaatacataaaaattcataaattataaaaacgatgcacctctctgcaatttccagaaaagccccacaatatcacctctattcccactgatccctcactaggtcacctctcccagaagcacctggagcacctagacaccccaacaaagcatcttgaggccagaatgatttttcagtcccgtttatttcacagatgaggaaattgaggtccactgaacttaagtatacaaagttgttgattgtcacatgcttccgggaaggagggaattggagagactaccaaaaaagggcaacctgatctccagggaaacagaagaattggacattgaaccaatctccctacaccctacactcacctgaacagaagaaatccctgtggttgcagcagctttgttggccaggaaggggaggatttgacgagtgagttgtctgtctcctgaatactccccacatagcccgtatacactgctggggaaactggggctcagagaagtctggtgacctaactcagatcatgcagcaaagaaatgactatagttggaacacaggacttttgcctcctgcccggggctctctgcttgtcatcctttatttctgtggctccaaaatgacaaaaatgccaaataaccctcatttgcagatggtttatggagatgacataaataaaggacaattctggaagtgtctactggttcttctgacagacacagaaatgagtgatgtgtctatccgctcccatctacctcacacccctgacctcccctggacttcacctttgcctcctttctgtgcctgaaacatttgcagttttgcttttaaaaaattgcagaggatggattgttcatctgaacagaaatcccactaaaaaacagaacccaggcttggagcagctacaattactgacatctcaggctgctcagagtctggaaatctctgcccagacatgcccagtcttcttcctctaacgcagctgacctcggggaggacaggcttctttctcctctgctgtggggatgggagcccaggtaggggtgggaggacacagtagcagacccccttggcctgcctcgccctggagtcaggccaggattgtggctaaaccccagaaaggccacggcacagcctcaggaccccactctaagccccactgctgtctgcaccttcgctcctatacatccaaaccatccaaagggctggttgtcaaatgtccagcagaggacaggcaccttctcccactgccttgaagcccctctgctttcaggcatttcaaatagactagacattgtctgtctgtttactttggggagaaaattttttttaataaaggcttgtaatgaattatttaaatttttgtggtactgagcttcacaatgaaataattctttttgttgttgtttttgggaaagaattttttttataacttctagctcaccaccaccacgacattcaatatttcttaagtacctactaagtgtctagtactattcagtgctttaaaaaaaaaagtttgcaaccatgcacttgaatgtgtacccagacacactctaagggaggacttctgccctgaaaaaggcaagggagcaggctgttaaaagtcacacacagaatctgactcccagcacacactcacacaagcacacatgcatcagatcccagccctgtcgcaaggatctgctggcagatcacataccctgttcagagtaacaggctaaggtttacctggggtctttagaggtctcctgtctcctaccatccccttcctcacctgaaaacaggcagcccaaggacaaaatagccaccagcctcttctatgccagagctcaacatgttgggacatgttcctgacggccagaaagccaatcagagccacagcctgctgcccaagcatgttcctgggaagcaggcagcatagggatggagggaggctcagcctgggggacaagagtgcccagtccagccccctccccagagtgcggtggagcagcatggggtaggggaatggtgaaaggtggaaagcccaagcctgaagaaggaggatgtgaggaaggctcagtggtggctgcagaagctgcctaggaagggagaggaagtgctgggaacaatgtcaccatttctcagaaagagactggggagtcccaaataggggcagtcagctttcagaggaattcaccttcacacaggctcccaagaagtgagaccccagagaagaggcggaacaaagatagaacattattgagcagaggcagccctggctttttgttttcattttgtttttttgttttgttttgttttttgagacaaagtcagcagtggcacaatctcagctcactgcagtctccgcctcccaggttcaagcaattctgcctcagcctcccgagtagctgggattacaggcatgcaccaccatgcccagctaatatttgtatttttttttttgcacaaaaagttggatttattgtttctgacaagtggttagtaattttcagtttgctcatgttcctagcatcacaaatctgaagtacaattttgcttctcaattaaaaatatatactggccgggcgtggtggcttacgcctgtaatcccagcactttgggaggccgaggcgggcagatcacagggtcaggagttttgagaccagcctggccaatatggtgaaaccccgtctccattaaaaatacaaaaatcagccgggcatggtggtgggcacctgtagtcccaggtattcaggtggctgaggtgggagaatcgcttgaacctaggaggcggaggttgcagtgagctgagatcatgccacctgcactccagcctgggtgacagagtgagactccgtctcaaaaaaaaaatatataaatctttgtgtaaaatgaaaaaaaaatcaaggcataaaaatttcattgtgttctacatttttaaatataaattgcctcctttaaaatattttcatccattcattcaaaaaccttttaacttcaactgtccaatttaagatagagtgaagacatttttgagtatctgaactaagcattgtcttgactgaaacgaagtaagaactctatgagagtccttgtgggcctcccggtcatgcctttccatagatagggaacctcatctttgttggtcatcacacctgctatgtctaaatgtgcccacttaggatgagtcacgaattctttcaggaatgccgcagatgtacatgctcccgcagatctatattttccaatgttgttaacatcagccagctggcaatctacaacctgtcttgtacaatgtttgaagagaggcatcctccagacacggtcccctgtttcaatgctggcctcgaagagcttgttccagagccaggatgaattggtaaagaccccagtggcacctgaccccaaagctacatctatgacacctgttaaggtggtggcattgaggatgaccttcgggttaaatgtgtgcacgtaacagagcgcatcagccagtatgagcctcccctcagcatcagtgttaccaacctggatggtcttcctgttcctggctctaacaacatcccccagcttgttggccttgccgctgggcatgttttcacagaggggccagacctataatattaatgggcaaactgagatttgcagcagacacaatggctgagcatatagttgtagctcctcccatgtcggccctcatgaggtccatatttgcagaagccttgatggagataccaccactgtcaaaggtaattcctttcccaacaaacaaggggtggtttgtctgcattggggctgcctatgtagtgaatttccaagaagactga

SEQ ID NO: 584953 - DNA, 4001 bp, Homo sapiens
gccacaatcagcttccctctctgagcacacctgcctctgtccagcccctcatctgacttctgctgccttgacttccctcagggatgtggagccacatctttccttatctttcctttcctttgctcaaaaccccaggcccaacttaccccgtggttcctccatgactctttcacctgcgttccttctgccttccctagcccctccaggtcccacgtgttacaaacagagccacatactagcaagttactgaacctctctgagctttagtttatacattcagaggggccaaattttccctgccttcccacagcattactatgaagaaaactaaatgagatcatccacctggaagttttttcttcttcttcttttttttttttttttttgtgagatggagtttcttgttgcccaggctaaagtgcaataacacggtctcagctcactgtaacctctgcctccttggtgcaagcgattctcctgcctcagcctcccaagtagctgggaccacaggtgcccgccaccacacccagctaattttttgtatttttagtagagagggggtttcaccatcttggccaggctggtcttgaactcctaacctcaggcgattcacctgccttggcctcctgaaatgttgggattacaggcacaagctatcatgtgcggccagatgttttagaaagtgtaaagcattatatattatgaattattactgccactcatcctgatccctccaccaacaaccagactgccatcctctgtgatgtccctgttctctcctcagaaagaaattctctgcatgcacctccacgccgaaccccagctgtgccaattcccttcagtcctctgcacgaatccaccatgcattgcctctctctttcgctattccctcagacaccaaccacccactagaccatgggaaggtcgcagaaattcctcaagggctataagtacccggtggtcaacaacacaggtccaggggttgcccggcctggggttgaaatcttggctttgctgccttctaatgcatgatcttgagctactttcctaacttctctgagcctcagtgtcctcatctgtagagtggaaatagcaaatctcctttcataccgttcttgtaatgatcaaaagtgctaatataggccgggtgtggtggctcatgcctgtaatcccagcaccttgggaggctgaggcgagcggatcacttgagtcaggagttcaagaccagcttgaccaaaatggtgaaaccctgtttctactaaaaatacaaaaaaaagaaaattagccaggtgtggtgatgggcacctgtagtcccagctactctagaggctgaggcatgagagtcgcttgaacctgagaggtggaagttgcagtgagccgagattacgccactgcactccagccttggagacagagtgggactccatctcacaaaaaaaaataaaaataaaagttctaatatataatccaaatgtgcttaaaacagagtctagcatataaaaaggctctaaaaatgatattattactattaaatgtccaatcattatcttgtagtgctcccataataaaaatcaccaccaccatttatataaacctctagaatttccaaagtacatatcacatacattatttaatttgagacacacagactagagttaggtgtcattaaccccacttcagagtttcagaaactggggctcaggaagtttaagaaacttacctgaggcgaccatacagtgaggagcaacccccagactcaaaaggcagattccagagcccctgcctgtccccttcgctgggtcctctcccggagtctccctcccgcctccctcctgttcccagggcccccagcctcctacctggcaggaggagaccagccagcagcagtgccatcatcccgtgcccacccacacgccccatccagggtgcccgagacgagcccatctcggactgcacggcctcctgactgatggcagctcaaggacacccgggtcctttatgccagagctggacattccctgggcaggagtcactgtggggagaggaggagaggtggagggggtgggtgccccaggggaagttggtgtggccgggaggagcgtggtaatcagcccggtgcatctgcctactcagcagcagcagtggctgcagtgtggggtacccatggccacggggctctaacgatcctgccacctgacaggcctggccccggctcctcattgcctaacccggaaccaggcgctctgccccacggccacccactctggggcggccactcttgccacgggacccagctgcctggctccttaactctcctgcctaccgtagcttggcctgtctctccatctgccctccactcgcagtcgtgggtgtttcagctttttcttccacacttgggtgcccgctccagccccacccacccaaccccaatgaggtcccattcacagcccctgatctgctccttccttaggaccccatcactccacctccactttcctccttcaaatatgagttctgcccccatcccccaggctccccctcccaccactccccaagtaccaggccagccacatacctattacgtgttccatcacctggggaactttctccttctcagaaatggggcaccacattcccaaaaccaactccctgacctgtcgcttctgggggcctctggggacggcatggtggcgggggtgggggggtgctgggagccagggctcagccaggggaggggcctgggctgatgacctctgtcaaagctgggccttggttactcacagggcactcacagcccctccccatggctggtaacccagacctcaagggtgagcaagaggctaagaaggctaattgggaaggtggtggccccatagcccatctgctggccctgggctggatgagcgagcaggaagcagcagccagctctgggcaggtcgaggagggccaggcaggctcccgggtcctcaaaggatgaaaggaggccaggagaaccggagccctgccatctgctgagagggtggtggcttctcctccattgcgttggcctccctcctgctctggcccctgccccgccccagccaattaattgctcactagtattgcgggagtatcagtatcggagggaggtgcctgggagtccagcaagctgccctctcctcccccaggcctcagacacccctgctcccctcacccaaactcacttcccaaacctcatctcctcacaaaggcagctctgtccctgggccccttggcctggtctctcccattccctctacctcctgaccgccctttaagttcagaccagcaggaggatggaaatgtttcctgtctgtgctgtccgatacggtagccactggccacatggagcaagtttaaccaccaaagatttggagctttaattttaattaattgtaatgatgtggttggccacgtgcagctagtggctgccatctagtcttgctcttgacttgctagtgacactcagaatgggagtgggaggaaagaggggctgagggagctgtggagagaggaagggataggacagggtcccctgaagggggctaatgccttgggaaaaacaaacaaacaaaaaacactggcttcagaatgaagatgacgtgggttcaagtcccagctaacctcttggctttgggcggctcttcaaacctttctgaacttccatctcctcatctgtgaaatgggggtattttaaataacacttatttcacaaggtttttgtgaacatcaaatgggaaattatcaaaaaggttaaatgggacaaggggtgcagtcccccagtaggaagcccagcaaatggagccctgcaggtgctcctgtcttcatccttccactgggggagacaaataggccagcttcacccccacagccccaggctccctttcctgagtctccagcccagccaatgctagcagagtgtcttctgctcccttcctgccttgtatagaggtgcaggcacaaatgtgagacagagataccat

SEQ ID NO: 584954 - DNA, 4001 bp, Homo sapiens
aaatgtatcaagaatatttacagcctggtgtgatagctcacaagtgtaatctcagcacttttgaaggatgaggaaagcggattgcttgagcccaggagttcgagatgagcctgggtaacatggcaaaaccccatctctatttaaaaaaaaaaaaaaaattagctgggtttgttggtgcacgcctgtagtcctagatactggagaggatgaggtattgggatcacttgagcctgggaggcagaggctgcagtgagccatgtgcatgccactgcactccagcctgggcgacagagcaagactctgtcttaaaccaacgggaaaagaaaaaataagaggccgggcgcggtggctcatgtgcctgtaagcccagcactttgggaggctgaggtgggtggatcacgaggtcaggagttcgagagcagcctgaccaacatgatgaaacctcgtctctactaaaaatacaaaaattagccaggcatggtaacactcgcctgtaatcccagaaactcatgaggctgaggcaggagaatcgcttgaacccgggaggtggaggttgcactgagccaagatcgtgccactgcactccagcctgggcgacagagcaagactctgtctccaaaaaaaaaaaaaaacaacgacaacaaaaaaaagagtatttactaatttttgtaatgtacaggtgatccctttattgtaacgcactgacgtttacttcataattttttgaaaatttttttaataaaactactttatgtctatcactacaacaaatgtattggtcaaaaaaaattccaaaagattgtataacaattttcagtcctccttttgctttcatgtgcctccatttgaatgataaattatattgtcactcaagttgtaacactgtgaggaatgtacacagaagcaaattagtaaaataaaacaaattgccaattcatatccctgaacatgtaatacccactgactcaggtctatgcctttaacaatgattgacctatcttatctggatcctcatttattcagcaagagagtgtctgctatgtataaggcactgtacgaggtactggggatatacaggtgaacaccactgctgccctcactctcatgagagagacttccacccagcagaggtgggagcagacacacatacctgcacccacacccatcactccattccagggcactcacataattccattttgttccatcaaacttctgtatccccaattctgtaaccaggcgcaaggtctacaagtgataggaccatctccatcaaggtgccagaatcagaaatgtactcactgcccttcctcgcactcagtcccagcattttttccttcagccacactagagaccagcataccaaggcctgaaacagcccctaaattcaatataaacagttcttttctgcctcttttcctttgcacatttttccttgctgcatggtggtcagcatagaaataaggctgtaattatctattgctaacagattttaaaaatattctaatgagcaatcttttaaaggactttagaaggacaaagtactgactgcaaaaacaggagaggggagaggctggtgagagccatgctctcgaatggacacacagtggcaagtggtatcacaggaaggaaagccgaagtctcaattcccagaacccataagggaaaggaaaaaaataaaaagtaaactgaagcaaacagaaaatgtatcacactggtttaaaatcccaactcctctagggggttggaattctgaaagcacacgtataaaataaataattaaaactcactttttggttctatgcaacttttttcttctttatgtagttttgggtagcatttgtggctgacttagaaacctaagccttggggaggagccaagatggccgaataggaacagctccggtctacagctcccagcgtgagcgacgcagaagacaggtgatttcagcatttccatctgaggtaccaggttcatctcactagggagtgccagacagtgggcacaggtcagtgggtgcagcgcaccgtgcgcaagccgaagcagggcgaggcattgcctcactcaggaagtgcaaggggtcagggagttccctttcctagtcaaagaaaggggtgacagacggcacctggaaaattgggtcactcccacccgaatactgcgcttttctgacgggcttaaaaaatggcgcaccaggagattatatcccgcacctggctcggagggtcctgcgcccacggagtctcgctgactgctagcacagcagtctgagatcaaactgcaaggcggcaacgaggctgggagagggacgccggccagtgcccaggcttgcttaggtaaacaaagcagcctggaagctccaactgggtggagcccaccacagctcaaggaggattgcctgcctgcctctgtaggctccacctctgggggcagggcacagacaaacaaaaagacagcagtaagctctgcagacttaaatgtccctgtctgacagctttgaagagagcagtggttctcccagcacgcagctggagatctgagaactggcagactgcctcctcaagtgggtccctgacccctgacccctgagcagcctaactgggaggcactccccagtaggggcggactgacatctcacatggccgggtactcctctgagacaaaacttccaggggaacgatcagacagcagcattcgtggttcatgataaaccactgttctgcagacaccactgctgatacccaggcaaacagggtctggagtggacctctagcaaactccaacagacctgcagctgagggtcctgtctgttagaaagaaaactaacaaacagaaaggacatccacaccaaaaacccatctgtatatcaccatcatcaaagtccaaaagtagataaaaccacaaagatggggaaaaaacagagcacaaaaactggaaactctaaaaagcagagcacctctcctcctccaaaggatcgcagttcctcaccagcaatggaacaaagctggacggagaatgactttgacgagttgagaaaagaaggcttcagacgatcaaactacgagctacaggaggaaattcaaaccaaaggcaaagaagttaaaaacttcaaaaaaaatttagacgaatgtataactagaataaccaatacagagaagtgcttaaaggggctgatggagctgaaagccaaggctcgagaactacgtgaagaatacagaagcctcaggagccgatgtgatcaactggaagaaagggtatcagcgatggaagatgaaatgaatgaaatgaagcgagaaaggaagtttagagaaaaaaaaataaaaagaaatgaacaaagcctccaagaaatatgggactatgtgaaaagaccaaatctacgtctgactggtgtacctgaaagtgacagggagaatggaatcaagttggaaaacactctgcaggatattatccaggagaacttccccaatctagcaaggcaggccaacattcagattcaggaaatacagagaacgccacaaagatactcctcgagaagagcaactccaagacacataattgtcagattcaccaaagttgaaatgaaggaaaaaatgttaagggcagccagagagaaaggtcgggttacccacaaagggaagcccatcagactaacagcggatctctcggcagaaactctacaagccagaagagagtgggggccaatattcaacattcttaaagaaaagaattttcaacccagaatttcatatccagccaaactaagcttcataagtgaaggagaaataaaatactttacagacaagcaaatgctgagagattttgtcaccaccaggcctgtcctaaaagagctcctgaaagaagcactaaacatggaaaggaacaactggtaccagccgctgcaaaatcatgccaaaatgtaaagaccatcaagactaggaagaaactgcatcaactaatgagcaaaataaccagctaacatcataatgacaggatcaaattc

SEQ ID NO: 584955 - DNA, 4001 bp, Homo sapiens
caatcacgagtgccttaggagaggtcttagaaaagttgctgttggtggatctggagatttgtttcctagcattgttgggagaggtcctgtttgttctggtcaatgtgctctccttctgcttctccgtgtggcgtctgttgaagtcgtggatgtattcctcacagttcacgaggtgctgttccggctcccaagtgtcgtcctcgctgtcatagcctttccaccgaaccaaatactctgtcttcccttttttatttttccttttgtcaacaatcctttcaacctgttcataaaaggaaaaaaatagttttaaaaaaatcaaaatttggggggaaaagtgcaagtttcattaggaaacatcaaaaatagcaaaaaccacaatagatgataaaatgatctcttctgcaacctcaataaaatagtaataggccatttgggttgtggacaatttccctgaaagtaagtcaaacaagatgctaaatttttatgctgagaacgtgtggatatgcattaggtgacttatgtttcttgtgactgaaaggggctctctgctatttctgtgttgaagcctgaccaccgagttggtttccacactcatggctggagcagctcgaggcatctgcagctgtgcctggtcatcccagggttccagcagcgggcacccaggcaacagcctggagtggtgacagcaatgagctacaaggcgctgagaaccttctgtggtgtgaaactgccatcaaagaaacatatgatctgtatcacaagtatcattcagaagcactcaattaaaactaaaaaggtcaacagagaacatcatacttgattgtaataaaacagtctagagcgatcaggttattttcaaatcttggttttaattaattttacactaacatctttcaatggagatgctgttaatcattgaaatggatgaccaatacattttggatcaaatttatcaattcacacaaccctgccttgtaagcacgttttatcaccgtgacaaattctactaccttaacatctgaagcgtaaatggaagagagatcttccgctactcacatgaacgagagttatgtgacacagtgcctccatacgttactgaagaaatacctagaatctgttattacatctgcagttactataaaagcatcagcttgcatcctgggggcagcatgtgactctgtatcttgtgggcagaggcctacagccacggagtggctctttaattaagaacgcaaaggtctgcacctatcaattattaagaacgtcagtacatttctggcagttagaggtaggtcaggcgaaactgtggcatgcctggttctctaacatccccaaatactcgagcctaatgagtagaagtgctgatgatcgtagagaacgggagaataccccatccccatcattttctctgctctcaaagaaataaaaaactctccagtatatctacttgagatatagaaaactgaagcccttaactactgaacagcctaaaattaaatacatattattgcttctgagaaaaaaggattaggaacagcaagaccttagctcatcacagggccgatttcacgtctgacagatctccacagagtcagaattaacgtcaggtcaccaagggcgagtccacgcggtccgtatcatagcagggaaagctcttgaaagcgatttttcccttgctccttcacttgtgaatagttgtgtatgagggtgtatttcaatttaagtaaaagacatatttctggaaaagtccacatagatgacgtttttgcagaaatagtttaagagttttaaaagaaaaggggcaatgagattatgtcttgtaggaaagctatgtttaatgttccccctgcctcctgcccaacccaccttaaatcaatgtccactccagaagcgggcagtatactaaaccagagtattcccgtttgctttcctctgtttccttagagccgaggcaggagcctggtggagcacactgcttttgtttcccctccctccttaaccatgtaccactggttcccccagggccagcatccctggggacctgctgctgccaggccccaggcagatcctgtccctccctcctcaggaaattgagcaaagaggaagagcaacagtagcctccgcagctaacggtaggtgtgtgctccgtttttaggcatactcagtggccagactgagtatacataaggaagtcatagtggacacattagaccaggagttggcaaactttacataaactgccaaagagtaaatgttttaggcttatgggtcatctggtctcccaatcacttaaccctgttcttatagcaaggaagtagcgagacacaatatgtaatgaatgaaatggcattaaacaaagacaaaaacaaaaaaaccctctatctatggacactaaaatttgaattttataactcacacatcataaaatattattattcttttgatcttttccagctagtaaaaaaatgtgggccgggcacggtggctcacgcctgtaattccagcactttgggaggccaaggcgggcggatcacgaggtcaggagtttgagaccagcctggacaacatggtgaaaccccgtctctactaaaaatacacaaaattagctgggcatggtggtgcacacctgtagtcccagctactcaggaggctgaagcaggagaattgcttgaaccaggaggtggaggttgcggtgagccaagatcgagccactgcactccagcctgggcgacagtgcaagactccgtctcaaaaaaaagaaaaaaaaaaaggtatgaaaaccattctttgagttaaccggcaggcagccatagcttgagatctcagcatcagactgtgaaggagcaataagacatccaggggcaggcaaactgctccattaattattgtgatggaaacattatgcaagtctgacaaggagataactctgcacccaacaacagcagaatatacattcttctcaagcacacacaggatactcgccagcacagaccatatgctaagtcttaagataagctcagtacatttaaaaggattgcaatcatgcaagttctatctccaaatggggatgatactgaaaataacaaagaagttgggaaaattcataaatatgcagaaattaacccatgctaaataatcaatgggccacctccccccaaaatgtctcaagagaagttggaaaccacaacataccaaaacttatggaatacagcaaaagcagtgatgggagggaaatttctaccagtgaacacctacactaaaaagaagaaagacctcaaatcaataacctaaccctttatcttaggacactggcaaaaaaggaaactaaacccaaggcaagcaggagaaaagaaacaatttagaacttaataaactgaaaagcaatattttaaaagcaacacaaccaaaagtttcttttaaaaaaattaacaaaattgacaaacttttacttattttgattaagaaaaataaacatccacatttctaataccaggaattaaagagggaacattactacaaaccatatggaaataaaaataattaaaatactatgaacaactatatgccaataattttaacaactcagatgaaataaacaaattcctagaaatatacaaactagtcaaaatgaaccaagaaaatctaaacaggcctatataagactgatcatcaaaacctcccttaaaaaaagcataggattagatagcttcactggtgaattctaccaaaatttttaaaaatacctgttcttcataaactcttccagtaattagaaaacaatttaccacactttatatgaggccactatttacctaataccaaaacaaaagacatcacaagaaagctatagacctatacctcttttatgaatatagacacaaaaatcctcaacaaaacattcgcaaattgaattccgcaatatacaaaaatgaccatgaccaagaaggatttattccaaaaatgcaaggctggtttaatatgtgaaagtcaattaacattca

SEQ ID NO: 584956 - DNA, 4001 bp, Homo sapiens
agatatagaataagcacagaaggaactaaacttagttcataatatactaatgggaaatgtgctgtcttcagaatcattcttacacacataggatacaacttacgtataaggtgctactctcatccactgatggaactgattatgtaatcatactcataaaagcaaatgccaagagtgaacactcatgactaaacaaccaaagaatgatctaatgtagaaactaaaatcccccataccctcatgctatgtacttccccctgtacagacttcacctggaagacctcaacctcaaacatcctagcctccatttctgtgtcttccagacacacaacactttccttcctagaaggaaagctcctgagaacagggagatttttcttcttttacatccccaaatgacctaaaatagtatcctgaatacagcggggcacagctaatgtgtaaaatggttgaaaagaatggaacattttcagtaccagctaaggtatactgaccacatacaatgtaaggagaagcaacaaccttacccttaattctacagatggcagcttcctcctgagaacttctgcaaacacttgctcttaaaaagcaacaaaaaagttgctagaagactaacatcgcagacaacaaagctctattctatgccaacagcaataatacgcccataagagaagacaactgaaaggatccctggggccacagggctctacttgttacagatgcttccttaagtccctcaacacccaggtccctaaacgcatcataaaggtgagtctagagagtcttcgcaagttttaagtctcttaggaacttatttataaatacatgtgaaacaagagaatcatttatccagaagaacagaaagccttccaaacttctgtactcccaggaagtctactttgaaatacgtcaaaagaagttacatggagacatacaaaacatgtctaaagatccaaattggtaactctcaaacttgaagctggtttaaacccatcgaccagaacttacagttctggctatgcccttctcatttgcaacgctgcggcgcaaatgaatgacggtgtatcagcgttaaatttaaatttcctggctctggccacaatgctaacctaattaaagcatgtggtcaacgtttagcattttcggtgcgagattttgcatcgctttggcgaacagcaaagtcgaaagcgtttgcaccggtcttctccccgccaccccccgaccaggggcaaaaccctctcccaaatgctttatcaaatgatccagaaacccccccacaccccaccccccgtaccgcccacggtccccgccgagcggcaacggaggcaccacttccacgacccacgccaagagcactttgagctcagtccgagcaagtcacttgtgtcagcaccacttccccacggctgggacccccccccccaccccacgcccggcaacttcaggaccccccggccggggcccctcggaacggaggctcgggctcccctcacacacatttcccgtccagcaaactgcggccgcggcgggggaggggacgcggcgggcgcgggcggcgagcggggccgtcgggcggcgcggccgggccgggaggggcggcgggcggggggcggcccgaggccggggggaggggaggtacctcgtacagctcctcggaagccatggtgggcggcggagttgcgggcgggaggggcagggtcggggcgggcgccggcgccgggcggccgacactttgtttcagttgggtcctgcgtggcctgcgcttcctgctcccgcggccggccgggcgctgggcacggacgagcctcttgcactccgcggccagtgcgggccggcggcgcggcggggttgtgcgcaggagcagctacgcaacgcgccctgggcgccccgcgctcactccccggcgggccggctcgcgctcgggctcatcgcgccccgccgcggggccgggcgggctggggcgggcgcggcggcgtgcgggcggcgcggccggatcgcggctcccctctccggtgtagtgcagaaagcttcctacttgcgaccaaaaaacctgccccggctactgagcatgcccagtgcggccgcccggccctgcggagccgcgctcccgcgctccgggttttcgggccgcccgcgcgggaggggcggggcggcggcggggcggggcagccgaggggagcagtgggctccgctcggggccgaggcgggcggccggcggggccgggagcgagccggcaggaaggggaggagcggggcagtcgggggcggggccgcgagcgcggggggcggggtggtgggcggggctccgacttccccagtcccgcttgcggggtcggcctggcccgcggcaccgccccccagcccgcctcgacgtgggcgcttgcggcccggcccagggcaggcgggacctggacctcgaggttcgaggcgcagcgcggttgtgcacaccaggacgggcagcgacggacccgagatggggcagggaaccatgcgagcgagccggcccgcgtctggagcccaccgccccgacggcagcggccgcgccgtctaccgcgcgcctccctccaggaggagcccaagaggcggcctccgtgcgcccgcccgtccggggccgggccagcccgcgaagggccggcggcgtggccaggtggagcacccaccccaccccatgcccgccccaccggccgccgccaagacccggagcccgggccgcgcgccccgcggggtggcccggcgagctccggctggcacgctggctccgcggcaggccgggggtgggatccggggggcgggagccgggcgcggcggagggcggcgcgagggcgcggctgcctccgctctgcccgcagctccccccacgccaggcctctgggttcctctcggagcgtccgcctcctccgaagcgcagctgggaagggaccgagtctggattccagggaggtccgggttctaatcgaacgaggctgtcaatggtggttcctttcgcggaacggtgtggactacacgacaggccctcgctcagaacagcgagggctggcccgcgctccacttcccagggaagatctactgccagggcacacctgccgggccctggacgtgccccatcggtggcgaaagaaggggcttcctgacccaactcccccagacagccgccaactccgatcactctggccgagtatgcggaacttccccacggggcactgcagaggcattagttcaccctctcccccaggccctgcatcgggaagccctcgccagttcctccatgtctccccgggcatccttcgggccgcctcactcctccgtgctccatctcgctccagttcctaacctaccttggagccacaaggctcctcccaccagttttcttcctaaagccctattcgtttgtgccccccaacagcgtttcaacaaccacggggcgtctcacagaccccgcggtttcctgtcctccccacgcccaggaacaagcaccacgccaacccttaagtcactgcgagtcgaatcgccgttccccttaagcggtgcttctacctgcggtccccaccgtttgaaacaaactcccagctcagggatcaccttaaaaggatagccttcctgacttccagggccaaatcggtaactccctcttcaagcgctgcctaagcactcacgcgtgctcactgcagcactcgtctctgtattttaaggtttgtctactcttcaccccaccccaactccaaacgatgaccttcagtcagacttcatcttcaaatttgacgctggcccctagcaccattctctatacaggaaataaggtgttgttcaatgaatggaatttcagtgtccacgagaaagcccaatacctacacatccaattcccattatcaaatgtttgcacaagaatcgcaaattaaagccaccacttcatcaactggtcaaggcgcctcaagctctgcctctttccctgatggcccagccaattccctctccctcctccaaacagcgcctctttcctctca

SEQ ID NO: 584957 - DNA, 4001 bp, Homo sapiens
ccaatgctcattgaccattctgaaatatcctagggctcttattcttttaaatctactctgtctgtgctctggaaatggaagaacaaagcatgagtgacagcacatctgtttacagcacggtttactgagtattttaagcccatctttgagacctacagctcacaaaaagattcctttcaaaataatactgctcaatgaccacgtacttggtcacccaagagctctgatagagatgtacaaggagattaatgctgttttcatgtctgctaacacaacatccattctgcagcccatgaatcaaagaataattttgactttcaagttatattatttaagaaatacattttgtaaagctatagctgccctagacagtgattcctctgatggatctgggcaaaataaattgaaaacttctggaaatgattcaccatcccaaatgctagtaagaacattcatgattcacgggaggaggtcaaaatatcaacattaacaggagtctggaaaaagttgattccaaccctcatggatgactttgtaaaggtcatgactttgttcaagacttcagtggaggaagtgatgaaagatctggtggcaatagcaagagaaatagtggagcctgaagatgtacctgaattgctgcaatctcatgataaaactagtggaaaagaagttgcttcttatgaatgagcgaagttcttgagatggaatctacccctggtgaagatgctgtgaatattcttgaaatatcaacaaagaattcagaatatcacaaaaccttagttgctaaagcaatggtaggggttaagaggatttactctaattttgaaagaagttctacagtgggtaaaatgctttcaaacagcatcacatgctacagagaaatctttagtgaatggaagagtcaactgctgtacaaaattcattattttgttattttaagaaactgccacagcaactccaatcttcagcaaccatcaccctgattggtcaacagccatcaacatcaagcaagaccctccaccagcaaaaagattaggacttgctgaaggctgagatgattagtagcattttttagcaataaaatattttaaaattacagcatgtaatttttttttacacataatgctattgcacacttaataggttacaatacagtgtaaatacaactgttatatgcactgggaaaccaaaaaaatcgtgtgacaggctttattggtctggaaccgaccccgcaatatctcggaagtatgtttgtacattattcatagaaaaagtattattctaataacattttgaaatatttagccaaaaagtagaaaaatgaagcatccaagggaaaacagtaaaactcggacggcaggaaagctcggaaaaaacacaaaaaacctggcgtgttcagggacaggataatccagcgaggcttttaatgtgtataggagaagtgaaaagaaataaggctggtacagtagtttgccgccagactatatgctttaggagagagggaggcattctaggttgtcttgtttttcttaccagcttgttgatactcatgggactcaattacctcaatttagacctctatgtgggcacaagagtgagtaggactcctggagaaacacagacactaatgtccaaggctgcacttgacttcactagtgcccgcgggagaaatttagcaatgaggatgagccatgaggatgattcgggagaaataggaagtattcatggctttgctccctcccccctaatcaaacatctcaatctcaggatcctaagggcagatcttttaggacatcgggcatttccccgtaagcaatcccccctcgctatcctcaaatgcaaactgcggagtctgccacaaacgcgttggctttaaaactcatccctgaactttagatccacccagccggttaaggatatcacgactcaccactgattcttcttgcacccttctgagagccgcgcttagagtaattcgcgcccaaacattcgtaaacagaggagacccggaagtgggtgggaagaaagcggaaacgggcatctaaccctacccctaaacgtcatcaggaatgcgcccatgagagcgctattagattggctggagggagggcggtgtcggcctacgcccccagagtcgtccggctgacgctggcggtggcgcggtttgtgtgggcttggtgagggcggggaggcctggctgtgtggatgtctgacaggtgaggcgggggacgcagaagtgcagccgccctctcccacagcggagtccaaaacaggcctaccagtgagtaggacgtacacctttcagatcgctccattcttctggctcctgtccctcctctacccctgtattttgaacttttgtcctttctctcccgctctgtcctttacttctgtcttctttaccttcctactgtgacgggatcccactctctgccttctccttaggtttagattttcacttcgaccaacctctagttttgggcgaagtccctggcaattcggaggtacttctggaaagaaggtgcttttaatactttaggggccatgtcggtatcttctttggccacttaagcaccctgaactgttcccgttggcagaggtcactttttgtatggttccaaagggatgcgcctgcttcatggctgcctcccttctaggttgtgggttatgttattgtcagggtttttctaagagttttcgggaataaaagtgattttctgtgtgtaaacaggattaagagtgtaaacagtgttaagagtgagaggtagaatagaaaagacaggtctaaattgacataaaagcttacattactaactcgttctcagttttatctagaaagaaggtggtcttagggaagctcgaagccctggataacgtatgtgtgtaaagttttaaaccacttgatgattttctgccaatataattttgtgtttaatgatgtacttatgctaatatcaaatataattttcatgccctatgtttccatctccaaacccaactagttgaacatcaaagtaccttcttgaagtattaatgtgcaatcatacgtcagcagccaaagcttgaaacttattggttcaagaaatctttttctcactgatttgtttttgaggtgtgggggtgggattaatcattgctctttaactcattttagttgtcagtaacatatttgctttgcatgttgcttctttgaatgcttgaggcctctcttgatggtcttctgagaaaattcagaggtcgtattgccatccgcagtagttgtgtttttatctaaaaatggtgtctgtttccagcctccaccaattcacatgtgattttcaggaagtcacttaaacggggctctttcctattagttgttcagatttaggaaagcccacgtgaaatgagtgtgatatttcctgccaacagtttagtctcaggtggttttcaaattaccttttacaggattactattgaaacagtttagttgttgcttcattatttttttcatccaccttttaagctagtaaatgtagtggatggcttgcaaaaagatggatgacaaggaccccatggatttaaagaataaaaatcgtgctagtattaaaaaaatggaaggtttttttgttttgttttgagacggggtctctctctgttgcccaggttggagtgcagtggcacgatctctgctcactgcaacctctgcttcccgggttgaagtgattctcatgcctcagcctcctgagtacctgggattactggtgtgcgccaccatgcccagctaatttttgtatttttagtagagactgggtttcaccgtgttggccaggctggtcttgaacccctgacctcaggtgatccacctgcctcggcctcctgaagtgctgggattccaggcgtgaaccaccatgcccagccttttttgttatgtttccatttagactttgttctatgtactttttacatagttgaacctgttgcacttacaattacgtgtcttgagtcttttacttactactttt

SEQ ID NO: 584958 - DNA, 4001 bp, Homo sapiens
tcttggatatctttgatcaggtacatttcctctccctccatttagaagccccagtgaaagctccataatatactacgtaaaaatgttttgcaagtgaatttcatttgaattccgttcatttgtgccacctctatcaccagcatgggatagttaattggggtcggggcacaagacagcctgtattgcctcttcttacaagatttaagaaagtaacaaaaataagggcagaagatagaagtaatacttttctgggggaaaatgtgtttttgttgtgttttggcttcagagaccaaataaggggaaaggggcgataattctatagtagtttagaaaaggaagcaacagatggggtggcagtggagaagtccaggaagcaaaagagtaaagaggaggtagaaaaaccaatgtcgtttaagaacagctaggatgattcatgcagtatgctcttattatccacaattctgtaccttgatctcctggaaattatgtgtccatttataatggctcctttactcaaagagccaaggacaagctaccgaacatgcctccagtggtttaaacctagagaaatagtgttcattgtgccagaggaatatgtgttccaggtattcaacacacaaactgaatttatttcaagacagaaacattattatacagtggtttgattggggcttcttattaggagaacattatgcttcaggtattatgggtcagataagcaggctttagtagtctagcttaaaaactgactaggtgttctattacttgtctagcgaaatgaattaacagttgagaggactcttcctacaaataaactttcccatcagggtcctttagtaagcaccctcacctagaggaaataaggcaatgtttggttaaatgcgtaaatagaggagagacggagggagccaagggaggaaagaggagacagggagggaggcaagaagggaggcccttaaaaggcatgtgagcaatgccttttacaatagctaaataaaaatgacccagactgaattccaaaatctattttttaaagggtgattctttcataccctttgcaagtacattaatcacggtgccagattgtgttcctaaacagcaatatttaaaactgtaagcagtaactgtacgttaagctcatgtgactaacagtctccctttaaaaagatccagatatttacttttcggcgcggcccggtacaactgagcgccaggaatatgaactgacatgccagggtggggcatacgttccctgtcattgttggaactgccttaaacaggggcctgaaagagctataaattggctcggggcggaaaaacaaaggcttaaggttattgcccttacctctcccgtgccccattcccagcccgagaagggatggaatctcaccaataagtcaccacttttctccagacgaagttgaggcttctttcgcttgaagactcgctttagaaagccacggggagccttccgctttatctgcttcctctgggagactatggtcgacagcgccatcctctctgtcaagtaccagctgcctcagcttccgaggtgctctctgtatcgcacacaagctccggggacactgggccagcgaaaacaatccggtccgtatgacgcttcttcaggcagaaaaacctcagtccgaacgttcgaatccgccgccaacggaacgcgcccggcgctcagtagtgacgttaaccctgagcaagccccgcccccggagacgcctgcctgtaggtggaaaacgcccacggtgggcgggtcccgggaatacctgacgtcattgagagcctgcgtcctcctttcatcactttctgtattataacttttgctctgtggaagtgtttctgctaggttccctagagatgattggaagttgtggagagagagattggtaagccaaggcagttcttcaagcactcactctatactgtccctaataccaacgaacagaagtttgtgatgttttatcaggattccgacagcactaatgccatgccttcctagcaaggaatgcatgattttcagatactaacagttaagaattttacacttctacgtaatttcatttgatcttatcttaggtcttttcatgattctagcttttctttacaaatgctgctccctttaattttaaggttcctctcacttaaccttgcaataactttcaggtatagtttcatgctaactcactgaactttttgttatttcttcaagctgttaatttctctattatctgtgctattatagaagtattaatagttatcaaaccttaatgtgcatcaaaatcacctgggggacttgttaaactactgttcgcagggcccagctcccagtttctcattcactagatctaggagatactcaaaatttgcaattctaacaagtcagggacattggcatttgctagtctgcagaccaatctttgagatccgctgtgattttaattataattatctctaatactatctctattgagatttcaatattatgttattgtgatctcacgcacacaagtgatccttctactatctggcctcccatttctgagacctcctctctgccagtcatcttctacacccttgagttattcatgcatgtggtcataccctaggcggtgtcattactaaatacctttaccttcggtttgatctgccactttcaatttagttgtctctcttcaaccgtatcttctatcttttgaatttactccctccaacaattcttcgatgctactgggactactgtcctatctttttcagttcctctcaccacaccccccagctctgccaccccactctatgccttatcttccctcctgtagtccattatgcatcgatcatcataatactgccctgtatttctccacaactttatagccattctcttttatcctcacactaacctggcaatattccaactctgcttaagttaaaatctcaatctattcaacacttgtatctgtgtattaatattggcataagaaaacaacactcacaggtatatgtctgatctcaattcaaattcatgaccactcatgtgggctctaagtactgctacaatcctttgatatttcctaaagccattcattcatttactcattctcttacatagctatgtcatgccttctatttcttacctaccccattctcaatctccagtgatgacattgcttcaacaacaaaataaaatttaaaaaaatccatggagactttctgtatgctttcaccaccccatctatccatcagtctccacctgctcccatggatgagatgccaactactccacttgtgcccgagatcaagccctttcccctttcttaaggacatttctgtagcaattctccttgctcctctgcttcatgaattttccttctttgccaatttttttccatcagcacccacacagcttataatatctccaggcttttgaaaaccctctcttaatcctaccttttgctgttgtccttctacagaacaaaacaaaactagaaaccgttggctaaattcagtgtctccaaatactcttcgcttattctctgttaaatccagtacaatcagacttttctagctatctcttcaccaaaattgttttggccaacgtgaccaatagcatcatagttgcaaatcctatggccaattttcaggcttcagtttattcatcaaaccagaagtatttgttgagtttcatgatttttccttccataaaacaacatatttaattggatatgattctcttttgtttttctttgtacttgatagcacctcagtctccttttctggttcttccttttctttttgatctctaaattttagagtaccccacaaccacatcctgagatttctcctctatctacattcataccccatgtgatcttctccagtataaaggttttaaataccaaatttacatctccagctgattctcccctaaacttcaggcatgtatatccatttctctgatggattagaattctaaaagtcatcctaacaccatg

SEQ ID NO: 584959 - DNA, 4001 bp, Homo sapiens
tagagtcatcacattacagaccatacattcttataatgggaagcagaaaacagacccatacaagaaaaataattaatgtgctaagtgctataaaaagaattaaatacataccagattaagaagtgactttgtgtttaccttttactggataaacagaagaagcctctctgaagtggtgatatttaagttaagattttcaccagccaggtaaagagtaagggaggagcattattggcagagggaacagtgagtgcaaagctcctaaggtgaaatgagcttgcaatgtctgggaaagaaaaaaggccactgtggaataaataaagtgggtgaaagagggatatgaaggcagtgagatatgtaagagtgaaatcatgaaaggctttaaaaccatggtaaggaggagttgtttgtttttttttttctacatgtgatgggagaccaatagagtcttttactggggaggaacagagtctgactgcagtgtggtgaaaggaatgctggaccatgagttgagaactgctgccatagcccagttgagatgatggcactgaactagcagtggcagaaaagggacagggctagagggatgatgggaattcagagtttggtgatggactaactgtatcttcgagatgacagaattgaaggatgagtcttttgagacaaatttgacaatatagcttttaaaaatataaacttacctctttcataaactgttcaaactcttcatctagctcttcttgggaacagttagccatagtcaacaattttgacctcccaaagtaaacattctaaagtacctcaaacattggaaacactaaatgacaagagacataaacatcttttgaggaaatccatcagatcatgaacacgaccagacttaaacttcggacatttgttatgattcagtatatatgcacaattttttttaaccagtaagagctggtcaagagattcctaattcattaagcaaactgatttggaaaagcagctttgacaggatgtcttgtactcaacgttcagaattatgttttcatctgttaacatccaattgttaaagagtggtctctacaatatttcccaaacctatgtttgtgtgcatgtgttaattagtacctctcaaacacaaaccaggtcctcacagggaatcttaaaaactgtaagttagcaaatccaaaggactgtttctttcttgcaaagcacacgacagtttgtgctgccttatcactcggctcgttattttaccaatccatagtaatagtttcgtaaagcagactgcatagtttcgtaaagcagactgtatccagatacggggatgtttcaaaatatacacaaatagaatttagtaagaattagtaatttagtcaaaatacttaaagaatacttaaagttaatggagtacacaaatcagtactatgtttcttttgaagcgagggaagaccgacaaaaattatgtgctgaacacaagcagaatccagtgatttgcaacggaaagcgttcccctagacacctaatgaacccaaccttgggtcgacccccagctcctgaactccctagagcagctcaaatcccagctttcttctgtagagatgggggaggggaagagggcttgcagacccggacaataccctccccatcgtgcagagtaacacctcttcccctcatttgcactttcgatcagttcagggtaagtgcggttaaggtcttggcctgaatagcttggtcaggggtgagctccactaaaagcttctcaagcctggctgcgaccccgtccccagaagcgcgggttcgggaattggagggaagacaaagacgcatttgccgtgggctccgggcggagaaggggaatgacctggaaaattaaagcccttcgctcgagtatgaagcacggcctcgaccagggcgatttgggtgggaaaccagcgttcacaccttaccacctacctctgcctctgaattccgcgctttcccggaaggtctgtgcgggtccaccagttgtcagggtaacagacttcagctgccgggttctggagtcacatgacccgggctggtcacgtgggccgtgggtttcccaatgcctttacaagcgaaggtcggaataaccacggctgagaaagacactctagtggctaaaccttcgctgctgcagtaaaatgcctttccttccctggctttctctacgttccttagaaaaggggacagcggcaaaccggttactggagaagcgagacggaggcttccagcaggcttggagggcgcggtggttgtaggccagcccgtggctttctgggaaatgtagtttagctcccctggtccttgtgtttccgcactccgcatcgtcgcctcccgccttccccacacttgtcattcgagcgctctgtttttccaaggggcaattttgaagagattgaatttcttggatttctttggcctgcaaagacctgtgtaggcattgtgagagaaacacaaacctgtgaggaaaaaaactgtcgtttagatggggactctgttccaccacctagtgggcaagaaatcgaaaatacgcaaacagcaagattcttattaagttattgctcctcccgctacccctacttttcaaaactgcattctttactggcatttcacaattactgacttggattttgttttctatttcttttctttttttcaaagcatgcaacattagctggagtttcagaggacaacatttagcatagtgtaagtaaaatctacaacagctgcaggttttgctgatggtagacttagttcaggacctcatctttagctagaactgtttattcatcaagtctttcttgcaatacaaatatgtacaaaccaggagctgtggactatgatgcaaatatgaataataaaagaaatatcttaagctaccatttattgagaagttgacttcctgccaccttctatcaaagacttaccttcccacatatgatctagagcctttacccattcttcttctcactgatcttgttccactggtcatttcccttaatcctgtatcttcgacttctggctggctgtgggatttttcctaacagcatttgaacatgccttgagatccccacctaaaacatcacttctgacacattctcttcatgctattatttcccagtggttgaaatgatctgtctcctcaccttacttgccaatcttttctgaggaattatttccactttacctcccttttgtcagaccttttaatcctgtctctgtgtgtgtaagtgtacatatatgacagcgctttatttgatctcccaatactatttgatacacttgtctcctctctttcttggtttttctttcacatttatagcctcccctcaagggttttcactgtctctgtctatcctagctgacctctaaatgttagaatttcttttcttttcttctttttctttttttcttttctttctttctttttttttaatttctatttttttgagacggagtcttgctctgtcacccaggctggagtacaatagtgcgatctcggctcactgcaacctccacctcctgggttcaactgattctcctgcctcagcctcccgagtaactgggattacaggtgcccaccaccacacctggctaattttgtgtttttagtagagacagagtttcaccatgttagtcaggctagtcttgaactcctgatctgcccaccttggcctcccaaagtgttgggattacaggtgtgagccaccgcgcctggccaatgttagaatttcttagggcttatttctggactcttattctgtcacacttcatggtacttccatacacctactcattcaagacagaaatctgggagttccctctctcccatattttattcgtcaagacttgttggtgctacctccaaaatgtgtctctattctgttcattttacatcttaattactaatgatagaggcatcttttcctcttgtctgagctgcttcattagccttctaacaagtttctctatttctactcctatcctcg

SEQ ID NO: 584960 - DNA, 4001 bp, Homo sapiens
caagaagaaataaagaataatgtttagctttcaaattttcacaagtagatggatagtagtgtcctttgctgaaataaggaacactgaaaaagaattagattcataagagataactatgcatttggttttaggtatgttgagtttgagatgcttttgagatatccaagaagaaatatccaagagatattgtgaaagctgagaggtgaagctgaatggagctattcatttgagagtcataggtgttggtgaagccatgggtatacatgagatcatatttaactacggcataaaaaggcacccagccttaagaaactacccgaccctttatgggctggatagagaatgaagatcccaaaaaggagatgaaaacggaatggtttttgttttgctttttcaatcacactcataagttattccctttttaaaattcagattcaaactagaagtgtcagaatgtaacaaggcttttgaaattagaccaattcatcagaactatgcatctattcaaaaatagctcacttacagaaacgatgtaaagaattcacaatacctgtctctttgtagcttctaagtgcatcaatacacaaaaagcacccttcccgtcccaccccacaccgccaagtatgcatgatttggcttactgacgtttcctgaaagtaccctatctctcactctgggccttagcatatgctgttcttttggtcttcatttcccctgggatgaagatttccctgactttccaagattgggctaagtcatctccttctagacatcccagtgatatcatgtattattgtaaccgtatgtctaacaactagttcctctaactagtaagactgtctttttcattgttgtatactcagtgcctagcaagacgaaatttttagaatttagtgcaatgcaattctgcaatgtaaagaattaaaatctacaccgattatcagtccactgatggccgttcaaacctcgacttttctcaaataataactttttaaaagcaaactaattttaagcaaatgactgaatcttttgaaaaagtcgactaagttttggagacttttacggttttgctttctttttcctgctgtatccttaaagcctgcaagaattcctatctaggaatactggggattcttttacgagatggatttgacaacttgctttcaaagccctgcctaggatttcatttgactgagcaaataaagcccagaacatccctaagcaaaggcaaacaaaggtgcaaatgcgcggagatcccaaatccaccccgcgtgtgtccacaaaaaagggcggaatcagaggcagcagcgcgaagctccagtttccacagcatccttccttcttggccttacttaggccgctccctgcgacccttgggatcaggatcccaaatccttgcctcacccaccacaccccgcgcttgggcagctggactagtccttcccacgcaagtcactggaaaaagtccttggactaagggaggccaccctagatggctttgtctccaaaatcccagaggaaatggaggaaggaaaaaccctgtcaaggaaaggtgacaacccagcttacagtgcttaccaagcagacgctctcagtcagcccctgccaccgctaaccgttggttcgcgggcacccacaggcaacgtcgcggtggcccctgggggttgtagtttctgtcgcaaacaaaacgcgccggcagcatcgaaactacattccccacaagtcaacgcgaagacgtcctaccgacttaaatctggggtttggagtaatgaagaggccgtcactacttttagggtgatcttaaatgtagactcaatttcttccaggagtcccttcgcgccctctttctttgtcgtgcttgttttatgtgtgacgaagtctcagtgtacttctacgtcttactttttccttccccttctccaggacagagtccaaacgtccgggaacggaaaccgcctcagggcgcaagcttagcgcctccgggggcgcttggcccagttcgcagtcacgcatgcgtagcagccggcagtggctggcagccgcgcgcggcgcacttggggtccggagggtagcctgccagagggcggggctttttcctaaggctttgcctcggcgggtcgcgtctgcctgggcggggaagaaggcgctggggccggggcggctcccggtttgtgccgggcggagaaaggggaggggctgggggtgaggaccccgtctccactccctgctcccgccctctgggctgatccccaccgatggggctgggcgaagggcgggctttgcgcctcgggccccgccgccccgccagctccgcggcccagcctggcgctcgaggattgccagggccgccctgtgccctctggctcggcggtggtgggcgagggctcagggatcggagaagtagcgtcttcccgggggtgccgaattggcggggctgggggacgctttttttcaccgccgcccgccgagactacggctgcccgagactgccgccctccgacagcgcccaagcctccggccgctgcggccagtgggccagggttcggcgagccttccctgccggcgccggccggctgctgaggcgctgggaggagctgcggagggcggggactggtgtcggagaaggggcggggtgggaacgccggagagaacccggtggctgcacagacaaaaaagccccgaatggctggagggcgttcagctgttaacagccttttggggcagagcacggatttgacagctccacaacgtgaggatatccactgaccccgcgagacggaggagaacgcttccccgaaattctctgcccaccaaagccagcgctgcaaggttgcaactttcaaactttgtttttccagaaagaagactgccctttcgtgtacaaggagagggtgagagggtgacctagcttgtagatcggctgaaggcaccagtggttccaaatgtcacccagatgtgtgttttcatgacgatttgatttctctgattttatttttacatttttcattttaaaaatacaaagcaatttttttggggcatgctgaaaggtaactgaagaccgcaaaggaaaaactattgtcatggctgaaggagagaatgaagtgagatgggatggactctgcagcagagattcaactactagggagacagcattggaaaacattaggcaaaccattttgaggaaaaccgagtatcttcgttcggtgaaagaaacacctcatcgtccatcagacgggctttcaaataccgagtcttcggatgggttgaataagctacttgctcatctgcttatgctttctaagaggtgtcccttcaaagatgtgagagagaaaagtgagtttattctgaagagcatccaggtaaggaagagcattttaaatacaactatgtctctactacagttaaattttacttgccgttattcacgttgtgtttgtttctattaggttgttatgtaaacttttattatgagtttacatctttagagtgttctgtaagtaaacaagtagtgtttttctagagttttaggcagaaactgctttgctcctggaagaatatatgaaaactacagttaattccaagtaaatacttgtttttccttatatttctttttacatgttgttggaaaatgtagccagtgtttttttttcacattgtcacagtgttctgagtgtaaaggctcacatttaaaagcctctaaaatgataaaggatattaaatgtttcctagtcagcctgttcaagataattggtggaacaattttctcttatttttaaaaacaaaacaaaccaggatgtgttctctaaatgcaacctctcttttttcaagaagagaattatataaaataataaaaacctatcttaaaagaagctaatatcttcatgttgaaaaggtggacccaggtggggtatttgatagaaacacttttatggcaaattgctcaactagctttctctgtgtttgcctgaattgtttctttttcacatgtgtagctatttaag

SEQ ID NO: 584961 - DNA, 4001 bp, Homo sapiens
taattcaggtcttaggcactatatattcaacattaaaaatatgcaatgactttataggaatactatagtaaccatcaaatccagaaatttagaagcagtttaagtattattatacttcaatgacattcatgtataatgtattaacagtagcagcaaatcttacatttaatatactgatcttttgacattcgaattgatctacttaatgtaatttataattaacttaaaaaacattccttgatagatatgaaaaatcatcattttgtaaccatcacaataaaggctgatttaggcaagaagcatcaatagctgctaaatccaggggatacagtttaatgaggagcaggatatttgcatggtcctaaagtgtatttcccatagagtgcttataagatgcaaggaaaaactagtaactttatagtagaaagacaaacaacactctgataggatgattaaaattaacatcacctgtgagaggtagaaggccaccatgtgcctctggatatgaaacctggagaaggacgcaacatcacctatgcagtattctggccagaaagcataacctgaatctcaacatgagagacaccacataaacaacaaatgaaaagtgttctatttttctttaaaaaaaaaaaaaaaaacaaaaccagcagagagggggttgttttctttaaaaatgtcaatttcacaaaaaaaaaaaagacaatcacacttctgcatatgtattcagaagaaccgaaagcagggtctcaaagaggtatttgtatacctatgttcgtagaagcacaattcaccataaccaaaaggcagaaggaaaccaaatgcccattgataggtaaacaaaatgtgatatatacaagcaatggaatattaatcagccttaaaaaggaaggaaactctgacagaggcttcaattttgatgaaccttgaagatatgatgctaagtgaaataaaccaatcacagaaaagacaaacatatgatgtttgtcttatgtaagtttgtcatatatgtgtttccacttatatgaagtatctaaagtagtcgaacttacagaaacagaaggtagaatggtggttgctgggggggagtgaaatgagttacagagtttcagttttgccagatgaaaaagttttagagattggttgcataacaatgcgtagtaggggagacaaatatgataaaaacaatctttgattcgatgggcttggttccataacaaaagcatatgcagaaagccatgggaacacaaaggagagattaacactctctgattgatggggtgataactaacttcagaatataatctgaatataatcaaaatataatcagaaataatctgaaattacgaacagttttgaaagagaagtttaggttaatatggcagagtgaacatacatacttacttttgctcccacttggaaactcactaaaataatattaaaacaatttttaaagaaattttaaattttaaattttaaattaaaaaaaaaattttaaagaaagatataaacctgcgaagagaaagataagtagaggtgacaacaacaaaactttggaaaatggaaaacagatgtatgagtagtaacaggcttagctaatgcaaaaaggcagactcctaacccaagtaagaaatgtgactttttaaattttacccaataggatcctcgaatggctcaggaattagccacacctctgtaagcagtaggtaagattgagctggaaactagagaacaggttgaaaatttaatgtagaagtaaattatatgcccaaataccctctgtctttccatgcagccagaagagtactctaccttcatctgggaagatcagaattttgttttgtttctttctgaggaagaaattacagaatatctctggattgggggacactcagcacaattgagggagggcaccacactggaagctggaagactgatcagttcccagaatgtcggcagtctatattattatatccaagtgaagaagtgaggatccattttctaggaaatatgaatagcttaagttaataaagatactaaaggcgataaaatgaattgattggatagatttggagtttccagttagtttttttggtttttgtttagagatggagtctctctctgtcgcccaggctggagtgcagtggtgcgatctcagcttactgcaacctctgcctcccaggttcaagcgattctgctgcctcagcctcccgagtagctgggattacaggcgcccgccaccatgcctggctaattttttgtatttttagtagagacagagtttcaccatgttggccaggctggtctcgaactcctgacctcaggtgatccacctgcctcggcctcccaaagtgctgggattacaggcatgagccactgtgcccggccttcagttagtttttcagtgctccactcttacatataagctatctaaccaaggcttaccagaccttaggagagacagacaccaaagcaaacaaacaataagaggtttagcaggaacacgaaaactggaaatataccattagtgaagacagaatgtataatcattgagaacgatgatagatcctagtgaatttgtttggagtatagtgaataaatgttggcagtaaaaaacaggctaaaaatgcataagggccatgccacaaaggattttgtatatcacatcaaggagtttataatttatttgattagaccatagggaggtaattaaggacataaaagggaataacatgaccaggtttgcattttgacaagttcattcagacggctttaaggtgaacagacaaaaggaggaagaaattataggcagatggacaaattaagaggttaccaaaataattcaaacacgaaaaatataggtctaaaataggactggagtagatgagataaatatgaaagatgctgagaagatataatcaaaagaacttacgaatctgctacaaatatgtaataggagagaggaaagactcagaaatactcctcaaaatttttggttgggcaaatgggtagatagtggtgaattaatggaaatatggaataatataaaaggggctacaagtcttagggaaataatgaattctgttttagacatgtcaaatatgaggtgcttacagacacagaactgcccagcaagcagactgaaatatgaatctggaggttaggtgagcatttaggctagatctagagatagagatttggttatcaattagatcacccaaggacagtataaagaacagcaattttcagtgtgtgcattgtgtgcatgacaaaagaggtagctgagactcactgcctttgtccattagggaaccattgttagtcctcctcagatgtgttgagacaaaattttataaaaggttaagaatcacaggtttggtcggccgcagtggctcatgtctgtaatcccagcactttgggaggccgaggcgggcggatcacgaggtcagcagattgagaccatcctggccaacatggtgaaacctcgtctctactaaaaattaaaaaaaaaaaaaaattagccaggcgtggtggcacgtgcctgtaatcccagctactcgggaggctgaggcaggagaatcgcttgaacccaggaggcggaggttgcagcaagccgagactgcgccactgcactccagcctgggtgacagaggagactcagtctccaaaaaaacaaaacaaaacaaacaaacaaaaaaagattaagtataacagatttgggagacaagtgaaggaaaaaaaaaactctcaaaggagattaaaaaaaaggaatgttaagagaagtggggaaaaagcaggagaaagtggtaacaaaggagtaaaagtgagaacaagtatttactattttctaatacactatgcctccctgaaatataaagaacacaggacatggcttctgctatctgactgaatttgcaattacactgttgaaaaaagactcacacaagacgatgagatggagaaaaaagaaaagggaagggggtgagtcaacagtatatcaa

SEQ ID NO: 584962 - DNA, 4001 bp, Homo sapiens
aaacttaagtgaatgattcaaatctaactctggctttttaaaatgtacatatgtctttttaaaaaccacacatcacaaatatctaaactatcaaagaattgcattattcgaaatttcaatagcctgatactagtgactcggtcagtgcctgattttttttaaatagcagaaaatattaccatcaaaagacccctttccaaatgctgcttctgcttttttgttttgtaaataacagctttggaaatgtatgcaaaaatatctctaagttacacaagtcgagctcaaacactttgtggagcaaggttacttaacaggagtcccagaaacagctaaaattgtagggaaaattttgcgtatgtatatatggcattgttttttctgcgcagaatgtccatataactcagtttctcaaaaggcctcaaaactcaagattaaaagtgcctggaaagaccatcatctttagagaacatatcacaggcaacccaagacttattttttatcccaagttaggggaggatttatcctaattttgtggctcctacacaacttctgagcgacgcaagcatgaaatggctgtccgatacaaacagaccccttcagatacggaatgcagcaaacccctaattttccttgaaggggccacggaaagccaaacggattcgtaacccggttgctcaatggtccattggctactgcaggacgcgccctcctcttacgccgcaggggctgcggggcggcgaccaggttcctccgaggggctgaagttcccttgggggtggctgagagcggccgcatctctggcagcatcctccctcccgaaaacgcgccctaaaagtagcggctgcgggcgtgggcacagccaaccccagcctgcgcctaccagaagtcgggagggcgcggaactgcggcccctccgagacgcgcccgggccgccgccgcagcactgtcgcagcgaccttcccgcccgggtccccgcgagcaaacgggcaagccccgttatcacgcaggtcacacaccccacgagtaaaaggaaaaaaccgggcagacaataaagcccaacccgcgggggcccaagcgagctggaagttgggggcgctggggctgcagcccaaggaggagcggcggggacgacgggatgcggggctgatgcgcctgggacgcggcaagccatatgtcagcccgggtgctgacagcggggaggacactgggcacgcggcggcgtcggggaggcggccggggtaagacaggcctgaggcgggaggggagcggcggcgaggtcccgaggcgccgcggtcggccgtgacccccaccccagccggggcgctgtcccgttccttaccggcagggaagctgcgggctccgccggggctatcccggccgctggcctccggagccaggaagcgcccccacatcgcgggcgagagggccgggtgggccagggacgcccgactcctcacgtccgtcctcctgcttcttcggcggcggaaacttgcgcggagcgtgggcctcggcgacacgggcaggaggaaaggcgggatggctggttaacggctgctcagctacgggcggggagcgcaggggccagattcgccgcactgccggcgcctgccatggccaagccggctgggctgaggcccgcgccggggaagcggcgactcggcggtgacggctgctagatccccggctgagcccaggctcaaaggctccaggcgaagttgcagctgcgggttctctccgccccctccgccggcagagccagagccggggctggggccgcgagggggcggggcctcgggcaatgacttcaggcgtgcgcggcgccgcgcggggcggggactgcggggggcggggactgcggggggcgggtgagctaccccgaccccgcttcgcctccttggcggcgactgggctgtcccgccctcccgccgcatccctctgtctccatcctcccgccctgcgagttgagtagagggcagcgacttggcctattttgcgatactcgcccctcccttgggtaatccctcacgccctccctccgggcacctctgtgaagacacgtggaagacctgcccctggcgtcacaaccgctcgagatgaaaaagccaagccagggcgcggctgagggggcttccagcctcccttggaattaggattgggatttaaatcctcatctgtattccttcgtttatagattactttaggggcagaaaaggggtggttttcctttactaatttaatgggggcgtgggggcaacacaggcaccagaatatagcaccgggatgtgcaccggaaaaggcccgggggtaattagtacccgagggggagaggggccgtcattgtaatcgcacaacgtttcagattagcaagcagaaagtaaaaatggcaccaaagtctgtaaagggagccctttcctccttgccccctactccttcacgttcttcctcttcttggccagtttccacccttcacctgaacccttagtgcaggaggagacgtcctaaggaagggcgaaaagggacagcatcgttttatttttaaatcttacttctcactggcaatatggtgatgcttccaacgtttagttacgaactagttcgtataaaaaattctgggccagcactgtggtgggaggcgggctctgcagtaggcccatcactcagaggtaagtcggaacgcaggtcgcttaactagagaggctttgagttccgcttttcctgttctggaatcttgctaacaaaggcctcatatttgcatttttcccttaaagacattttaattgggaaatactacttaaaattcttggaagttaaattagatttaggtgtgtgttctatcacttaccacatccgtgttgtaatttatctgattggagttttacatttagtctccctgtggtagacttccaattatttctccaaatcatgtaatgttagccaagggtcagctgtttctgatgataaaaagatacagaaacatgaaagacgaatgtgattggttcctttttattattttaatgtgcactagctcgttttatctaacacttgaagaggatagatttttttaagtcccaaaaagaaaattagcagaagctatagcactatgtatagatttttttttcatgctttgtagttaccacagtctcaggaacagaatttttgaaattcatttgtgatgcagttctaagaagtgtataaaatattacagaaatatcttggcctttgcgagtttaaaatacacttattatttcaaaactgccaatttcctaattctaaacagtgtttaaagaaaatcgtttactcgggttttctacatctttttatcaatataaagggcatgctactacacacaaaaaaagtacatgcgaaggtgaaagtatctaaaatatttcaatatctattacagagtaaaagcaaacagtaaaaacatgttgctcttttggcacttggcaccaaatatgaaatttttgtgtccctagtaattaaacttgggaggatagagggctaatgcaattagaactaattgaaatactaagtgagaatattatgttgctaaagtatccatttcttttaatcatatgaattctgagtatatactgaactaatgcttccccccaaatccatgatacatggatgatatgtacatggtatgatacagccatggttttcagaatgattaaaatttatcataacacaagttggagaacctaaggactatctaaccattactaaaccccatgtggtaaactgccatatttttgttttgttgtgacagtgtgttaggactacaaggagaattttaaaagcaaagacagttatcgttgaacctcaataaacctcaatcttggcagttgttctgtgcagatataagtaatgaaaatagtgactctgtgtatgtgtgtgtgtgtgtgtgtgtgtgtgtataagtatcattgctcagatgaaattaggatatttaatgttttgggaggggactttttaagaatataaactagatcacaaaa

SEQ ID NO: 584963 - DNA, 4001 bp, Homo sapiens
aaaatagaaggccaaaaggtcggaatatatagacaaagatatctttgggaatattcatttcttcctgcaaatatttattaagttcggactatattgccatcacttcacagatgaacaaggcacaggccctgcccttaagttactcacagcctgtctggagacagatgagtacacaagcaactggagttcatgagcgaggtgtctagaagcaatctgggcctgggatggaaggctgcaaagacttcactgaaaagcaaatttgcaagactgtaaaatacaacatgcttccaaggccttggattaagttgtgtggtccaggatagctgaacagagtaaagatacctggatatagggaaaagataacccataaacttttcacgaaacaaaattgtgttaataaaagtcacaggtactctagttactctagtggcagtggagacagaatatgagatacacaatgaaaaaagaacttactttttaggaagagaattaaaagagtctattattaaatggtagccaaaatgctgtttttctcgtatacctggcacagaacctactcttgaaagctatgtgttgaatcaataaagtatgacatgggaacagcatataaaaaggtttagctcagataaacttgaattcagtcaataatctcacctatttaagatttttccttgaatagacttttttccttccttccttcctccctcccttttccctaccatttttcaggcgaaagaaagactggtcaaataggggttctaaatcctgttaacctcactttaaccctgttatttcaccatttaatgacaaggcaaaaccatcagctcttaaatcatgaactttaaatgccaaaaacagtgttgagaaatttttaaaatatgagtgttatatagaaaaagaatgactaacactaaaagcaaacaaaacaggcagttcattagaaaccggtaatatagaatagccccgattttgtacctaacagatctcggaaagggactgacagcccacagagaaacaagagcagcacatcaagacgaaggcacattttcttcccaactgctgtcatttaaggaaaacccatgagcgtgagttctcttatgggagggtagcgacctccatgaaatcatgagaacattcccccagtctaagtgctgcctggctttactcccacatcaacagcaaaacaactgcatagcaacctacatttgcccatttcctcactcattaatgtttgtccagaggaaacacccctgccagtccctgtctgctttgtaaagtatgtcaaacaggagttgagtgtgtacgccagattgggaagtgacacatgctggcatttctcagcgcatgcggctccccactcggctttctggagctctgccttttggcgacagagcagctagagctcctctcccctcccccatttcctctcataaagataaccagtaacaacaattggcgtgtgtgtgtgtgtgtgtgtgtgtgagagagagagagagagagagagagagcgctcccagttggccaagtaccctttacatccagtgacctgttttacgaataataggaaagactttccagcttattttctgcattctcaggagtacgcagagttcacagtaaatgcagagtaacagtcatttctaaaacaaagataaaacactccaaatgctgctctgcaaagaccatttgccatctgttcctttccccctgacagggctgcttatcaggactccagcaaggacaccatcatagcaatctagatccgagtacttttcctctgttgcagggggtgtttccttgaactttcccatctgcttctaagcaagaggtataaaatattatctataaaataagactagcaaatgactcacagtgaataaaaataaatcagggtgtagtttgtcatcatctttaagagaaaaaaaaaggaaaatgctccacaattggagaaacaactcactttttcaaacctcctcaaggaacgtcttcaaatgataggcaggaaatgggtatgtgggggttaagttaagctcaagtaaactcaagtggcaagagcatgatccagccccatcatacatattcataagaggcaacctgagcttccgtgtaaaaccacagtgtgactgtatttcctgcacacactttgcatcccacacagcccggacacactgcagcactggaggggcacaatgccttgctttaaaacatggctcagaagaaccataattgttcattgacaacttaacctacacattgactggatgttctccataggccttatgacagctcaagaagtatctgtcaggatgcagtttgaaagacatcattgtgcaagtgtgaatctcaaggcttcggctgctaagaagcaaaaatggaatatggttatttgttttcaataaagcattgggcatttattactaatactctaatggagaaacaggtcagtctaaccaacatgggaagatgataacactctatatactgcttctcttctcaacagactttctacaacaaaatacccatagtttcagctgccagaaaatataaaccaaaggccttgtttcagtgggatttggggtggcatcgatagtatagtggtaaacataactgcttttcagtagaatttgggaaggcatgtactgggtttttcttcattcactcaacaaatatttattaagtgccacgatgtgccaagtactgccctgggcacttggaaaaaccacaatgaacaaaacacaaaagtccctgcatcatgaaggctatgatcgcggagtgtttcagactgccatgctcctccagagagaaagaacaccttatcatgtgcctgtcattaaagggcctggacctttttcttcaatttctttcaaatgccctcgatgactctgtcaatgaagtttgtatgtgtgcccatatgtgctgtttgaaagaaggaagagagagggaaagaaagcaacactgaaacacgattcaaaaagtgatagaaagatttacctttatgattgggaaagccacaaagacatgagtactgggaaacacaaaagaacactagtgcagatggaaaaatctatttgttttattaggaagatggaaaatattatcaagatgtcaactcttggccaggcacagtggttcacacctgtaatccagcactttgggagcccaaggcagatgtatcatctgaggtcaggagttcgagaccagcctgaccaacatggtgaaaccctgtctctactaaaaaaaaaatacaaaaaaattagcgggggggtttggtggcacatgcctgtaatcacagctacttgggaggctgaggcaggagaatcacttgaacctgggaggcagaggttgctgtgagctgagatcgcgccattgcactccagcctgggcaacgagggcgaaactctgtttcaaaaatgaaaaaagatgtcaactctcatgatttaagctataaatttgatatatgacaaaaaaattcataatggtcttgtgaactaagttgattcaaagcacaaagaaaaatctgagggggaaaagtctaatgagggaggaactagctctaccagatgctgaaatataaagctttgataactgaaagtgtatgctaactcataaatagacaaaacggtggaactgaatgaaacaccgggaaataattccaaatccatttgggaattaaatatctgatcaacatgccacattgcccataggtctgttgacctcagcagcattgtcagtcatgcagtgtggtccttcacctccttctcattaggaggcttggagctaaccagaggttgtgggttcaggagtaagaaagaacactgggcttagatggctagacaccagagcaccaatcttgctctaccacctgtaacttggtgaccttgtgttgagctttggtttcattgtctataatatgaggataatgaaatccattgccaagctttattgtggggataagtttatataatatatgaatctacctaacaaatatcaactatttaaca

SEQ ID NO: 584964 - DNA, 4001 bp, Homo sapiens
ctgggtgccaggagagtggctcaggctccagcattaacagttctgtcccttctccattttcccccagttccctgccctgcctcccttctctgtcttcaaacctgggccgtgcccatcctcagcatcgactccttctatggtctctgtcagggaagacaggaaagcttcggccacctcttgaggggtgtcgtacatgaaggagtctgggagagtcagaaatgaggtcaaatgtctgggagtgtcagggatacagtgaccaaagagacgggggatcatgggtttccagggtataaaaggctcagaagtgagatagttgtacagggaggtttaaacaaagtgaggaaagagcagggttgaggtggggagagaagacagtaggatggaagaccaggatctgacctgggggtacaggtcaaaggtcaccttggcaggaaggctccgtcccgctccaagagccaccttcctgacacgttcgccgctgggagccacgcagggtaagcccccggctgcagtggtaggtgacgctgtcttcaaggcggtactggctgcccaccttccttgtgccaatggggatgcccgggttggagcagtaccccgctgcagaggtatgagacatcgaggtaagcactgaagcctgaggccccgtgagcaaggtagagagcaagagttacagtgtccggagccgagtgcccactcctcgggctgggcgccgtcagggagacagcaatgtagggggaggggatgcttctcacctccgttgtcacagatcgctgtctgcccactccatcggccattcacttggcaggtgcgattggcagagccccggagagtgtaaccgtcatagcagtggaaagagatctcatcactcacattgtagtagggagaccggggccagtattccccgttctcgaagtcgtgtggtcttggacagtggattgctttgagaaggggggacaagtagaagtcatcaagagggaaaggctgccttaggtgtatccctcctggtctcggagaccatgtcactgagaaacagcgcattcccagtcccgcagaagcagcatcttacctactcctcaacccatatggatttccactgcttctccctccccatttctgagtgttctcttgacttccagggctgcctggaagcccagggtaaatgcttagtaagggttaactccgctttttcttgccccctttccgcctgccaccctaaaactgctcctactcccggtcagcccaccttgtcaccctgcctagtctcatcctagtcctgaccttgctgccgcctgccctgtttctgccttaggccactgcccacactcattgccctcaaacctctgcactctgccttcctgacagtcttttggtcttgagtcttcagggtgctccaggaccccgtagatctgcaggtacgtgtctgcacagggtacgggtagaagccagaaggacacacgtactccagtgcctggccctcttggagaagtcggaaggagccgcctttgatctctaccccctccagagagcaggatccctggggccgggccaaagaccatggagtggtggtcacacctgaagagaaaggctgatgaagcctggccccaaaaggccaaggagggatgctggagacagcaggaagggaaggttaccctcgcttacctccagacaagaggcccaagataaagggcatcaggcagagttgggggctgagattgctccccatggcgttggaaggcaggagagaagctgggcctggggcaggatggtgtgtcctggcttgctttgcttgtctgcttggctcagtgtccaagctgaaactccagacctagacctggtcacattcccttcccctgctccccaccagcccccagccttttatacaatctgtgttctggcacctgcggctcgccccgcctgtcctacccacatcactttcccggaacatccaagcgggagggccccgctgagctgccagtcaaggaaacagaaactgcagaagtcccaccctttgctgccaaaggtccaggactctccccttcagtacctcctctccggccttagctcctccccagtaagcccaaaccacccacttagggaccagaaataaggatccagctcactcccctgttgattgtgtgttatggtgcagagtccagccactgtttgtccagtggggtctctgacctgccttcctgtagctcttggagtcattctggcctccccctcccccaaggccagccctacctggcctccagatagaggcactgagagatgtggaaaccattgatttttattaatttcataactgggaaattccatgtgaaagtgaaacaagcatgagtcaagtcaaccagggaaggaatctggggacaggccaaggagcgggaggtggggcagcgaggcagtcctgctggtaggagccctgaggatttcccagcttgtgtgcgctgcctctggcatcctagagacccggatttactcagctaggagagaggatggatcacagggtctaagggtggccattcagaggtagaagatggaggggcggcagattctggcagggcagcagagggctcagtggccatggctagaggggtaaaaaattcaggacatcccccaggtgctgcctcagccagggctgcatgcggaagagattgatgtgaaagtctcgtggcggcgggaccttgctacgaggggcccttttgcgggagtttttgtcagcagagccaaggcaggggttgtaaagaccccagctcaccagacccacctggagaaaaggagagaactggctgggaggctgccacagccccaactgtaagccccaacctccctagatccctcaaaggcctccctcatccccccaacaaggctgagatcctgtaacccctgggtcctgcaagcttctaccttctcacctgaaaaaacctgaatctccgctcaaggaaaactgctcccccagattctcctgccagcaaagggtgacaggagacagtgtcatctagggcagtggactggtgttctggcatgcatgctggccacagagacacaggtggccttccccttgggaatccaggcatggtgagggactcacccttgcagggactctcatcctcctgggtcccactgcataggaactggtctgtcaccacctccctgacatctgtcaagttggggaacatggttttttcttgggagacaacctcggcacagcttgtccactgcagcaggggtggaaccagagagaagggtagaataagcagacccgggtgggtgcagtggctcacgcctgtaatctcagcactttgggaggttgaggcaggcagatcacttgaggtcaggagttcaagaccatcctggccaacatggcgaaatcccgtctctactaaaaatacaaaaattagctggtgtggtggtgggcacctgtaatctcagctactcgggaggctgaagtaggagaatcgcttgaacccaggaggcagaagttgcagtgagctgaggtcgtgccactgcactccagcctgggagacagagcaagactccatctcaataacaacaaaaaaagaataagcagacccagggacacctagcaggtttgtgaggcttgggaggaggggtgacccgcgtcagagagagaaagcagccagacctggagaaggaagagagacattctgggagctgtcacagggggatcccagcatccccaacctgagaccctcacctccactcccatcttaaggttaatgttcagtttgctcccattcaaggcgacaaaatgagcaggaacactctgtttgttcagcagttcattctctatagtcaagagaaggggatgttggtgctggtccttttacccagaatccaggttcctggcttggggactgcagcctagtccttgttatcacccccaaaccccggccccagctctcaagcaccataagtcccagcactcaccatggtccctacaggtgctgccttgaggtctccgcagagccagattggcc

SEQ ID NO: 584965 - DNA, 4001 bp, Homo sapiens
acattagagaatttaaaagatttgccaaagttgctcagaaagtgatctgatgctaagatggtgtccttccacttgtactacccctatagcctagaagtataccattaatccatgtcctcctttataacttggagtcacacatggatcatgctgtttcagttatcttgtctaatttgatttctaacattgttattgattctacccctaagtgccccaccttaaaccacagagtgttaaagatgctggatcatttctacaatgttatctctaagcctggtgaaccaagaaattgctagactactttgtgcaacattacaatggcactgctgtaacattatatgccaaatccagaatgtgcaaagatcagaagttgatagcaaactactctaggattcacaacctgtaaaaatgaagtttggtgctatgaaccatgctgttctcaaaagaaatgtaagttcactcctgtaaattttctctttgagaaagtagattactttgatgtgcttttaagcaagacgtacattaccttctaagttagccatttctgttacccagctcttactttgagttttcatgtaaatttgggtctcacattaaaaagaaatgtacactgcaactgaaaatctgctctggaacataattaattgcttttctaacatttttctcacacactacccttttcagcaggaaatggtaaggaatatgactcacttaaaatttcaatgactcttactgcaaaaaaaataataaacttaagaaaaccaaagttgaaattaacatgaaaaaccacgaaccttttataaatgatgaccactcttgtcttttttaaataattcaagaatatagcaatgtattacatgcaatttggttgaccaatattatgaataattgaattggtattaagtcaagtaattatttaaaagatattttcagaaactttaaaagattccttttctaaagcaaaatatctgacttttgactgggaaaaagattgaagagcttaagaaacaaaatatctacagagatgaaagggagcttctgcattcctaagggacccatatagtgtcagcccatagttcttcacacgtgcccatagcctattcttcaacgctaataaggagggacaaaaaaggtcttttattttctagtgtctatttcccaatcagccaccaattaatgctaatgctaagataaccaaggttagctgcaaaaaagtttccagaaactcattggaactaatcaattagacttgggcaagtgacttatcattgcaaattcatgaataatagctagagaaatactaccaactttgatttttgtagcattttattaaagaagaaaaatgaaaacaacgacattcaagaaattccatgctactattcaagtctgcatgagaacatctattcaaaagataatcagaagctatagtcattcagctgaacaagtgaaccactttatcatgggccagcttgaagatatagctatacatcacttaaaaatggataataaaacaatatcataatgtctacttgccctctgtctggctcctggaagccactcaaaagaacgtctttccaatgacatacagtaattcttgaggaaaatttttagatcctgacaggcactcaagcatctcagcaggagacattgggtttctggcttctgttagataacatcttaccctatgatcacagccaaattttacagacttccttctaattcaatcataagtgctgaaaagagaatgagtaaaagcctgtctcagttcttattaaggtatatgcagagactttggaatcttcctcatattctcaaatattttactcctcaattaaagtcccccaaaattatttcattcatattacctttctctgggctttttgcaggatgtgttcagggcggttgactgtggatccgaagagggattttagcttcgtcttatgagttctcagtaactgcagttaatgaagtcctcacctgcttttataccagcagagtgtttccacctgcatctaagccctgggatcaacaggaaattccatccaatgattgaagggtacttggtgtaattaccatgacgtcaatttttaccatgacgtcaatttgatcttatcttgtttcaacccttaggtcatttttgtttggagccattttcaggtgatggtgacgacaaggtcagcccatgaaaagagagtacgctgtcactttgtacgtaattttattgagccatacacataacatcctgaaagctgacactttcctataaacaagagacatttaattagctaagtacctgatatttacctaaacaagagctatagatttccgaaaatagatatagagcatttccaggcttataccactatttaattaggaaacagaaaaataaaacacacacctatttagacttttctaaaattaatttgcatctgaatttaataaagatgcatgagaaaggtatgaggcaattctaagaaggactgaatggttctcaatatacgtgcctggtttttggtttttttttttttctcatttcacttttgtaaagctcagtttctgcctgaacagaaaatatgtatgtcatggcttgccaggtgtgggacacttagctccaaggttcccaacccagtgtcaccctaaaacctgcacagctcttcagactactgtggcttcttttttgcacacagagattatgacccttcaaaagttcctatctttatctactccgctcagtgccacttccgtaaggaactggcttagatacagactaccaaggacctcttcaacaaagagtttagaagatctatgtgatgcaaaaagcaattcttgtttaacataaagaaacttgccaaagaacgcaaagttgttttgtgatttattttctgtgataaacaaatttgtttaggttcttacaccttttcagatttccgttgtttccttccagtatgcatcccaaccattcaccttttcttagtgatgctcctttttgggggacgagtgggggagacggaatctcgctctgtctcccaagctggagtgcagtggcacaatctcactgcagtctacacctcccgggttcaagcacttctcctgcctcagcctccgagtagctgggactacaggtgtgcgccataatgcctggctaatttttgtatttttggtagagacaggagtttcaccatgttggccaggctggtttaacccctgacctcaagtgatccacccacctcggcttccaaaagtgctgggatcacaggcatgagccaccgtgccgggccttcctagtgatgattgatgccaccattattcaagaatttctacatttaaatatcaaccaactggcagtatattttcaatgtagcagacttattttgaaaatctttccatctaggcatttcactcttctttgttctattctttctcttttatttgtgccttctttacatccttttatttcttttttatctgaatgattacatagaaacaatgtttctaggatgctcttattaaattatttttgtttggcttatgatttcatagtggattttatttttatttcacatttctatataagaattatgaatattagggaattcttatgaaaatgtttattgtgtttttaaagtttacatactgttttttaatttttttagtgatgtggctacataaataatacaaaagtcagtgcctttaacacctgacttatcttccccatttcctcaattattctactcagaagcaatgtttccagtttcttacttgtgtttctgcagatactctatgtatatacaaacaaattatatttaagtctccatccctgttgaaattctccttaaaataacaaacagaatacaaaaattagaggaacccctgcctttgtgcttagagaatctctgttggtatggtataaattatacttctctgtactttctacaacaaacatatattacttttataattggggaaagtactgttaacaaaaacatgtttctaagtttcac

SEQ ID NO: 584966 - DNA, 4001 bp, Homo sapiens
agctttcaacacagtagtatcttttcatgtactgaatataactattagcacagtgtcaaaaatgttgaagacagaaacaaaataaaaatctgtgaaatgtttgccactgacgacattccacaccctattatcatctgtacatatgggggtggggggggcggcgggggggacagccaacttgaaagtgaacagtatgactttcctgatccagaacagtttggcccacatctgtttaatcttccagtttagcatattttaaaaattagtctgtactcaaatgcatagttaaaaaaatgaagcgagatggcagtttgtgcagtaatatctgcccttcgaagttcatgcaaccaactaatgcaatttttcctttcactcgtaaatctgaatgcagttcagtcatttgaaaccatctacaaaatccacaagattaagcagtttgccaagattaatatctaacagttgagcactggagaaagtgagggaaaggagtaaaaacaaacaacgaaaaagaccaagttagctagatatttcaactacataagggaggtgggtgaatgtcaaggctacaaaaacgaaacaaaaacaggaaaaaaaagtggcagcaattttttttaaaaccaatttgtacaagtttatagtttactttgtttccaagttctcaaacctttcaagatctgaaaagtgagatactgtgtctaagggaatgtttcttttaattcacgccgaagaagttgggggtttgatttctttcgccggggtttcgatcgagtcaacagctcactctgctgggctgctgtttgcacacgaagtccgtcataaaatcaaactcgttttgccccagccagagttcgggcagctccttgatgcggtccaaacccatttctatcaccaaggacataagaacttcctcgtcgatgaaatcagtgtctatgacattgggcggcagcattgcagcggggacgtgggccacggaggcgggcatgttgccgctgccgctgccgccgccgctgttgctgctgcccgcgccgccgcccgagctgctgccagagccgccgggggtgctgctgccgcccgagccgccgggggtgctgctgccgccgctgtgcttggggttgcaatctcggaagtgctggtttgtcccgttcatctggtggcctgcagcagggtgcaaatccggcatgtagtggttgtgggggtaggggtgatggttgaaatactggttgttgagcttctgcagctgcatgctggccggcagggagcctccctggctggccaccgggggacccatgaactgggagttgttaaacctggccgcgggggccagcgcgctcggggggtgccctccgttcacagtccccggccccatcgcatgcctgatgccgctcgtggcattcatgttgcccgcgccgtagtgtatgtgctcgcccattagggcgttgaaggcgtgctggggctgctgctgctggtggtgatgggggctcgggaactgccccatgcccatgcggtgggcagggtgatggtgcagcccattggtgccgtcggggaagcgcccgtggttcatggccatcatatggtctgccatttccagtcctggaagtgaaaagggcagataatgagacccgcgccacacgtgtcgcccaccacagcgcaccccacttttgctcgcctctgccccccaggattcccgggcgcacgtcggctgcgaaccaccacccccaagatcccactaacagcctgtgcacccgggctagccaccacggaagagctaccactcataacacagccggacgctgcacaaacagccccttcccctgcgatcgggcggggggacccgagcccacaccccctttgctccccgaagtggcctaataaaggaagtgccccgtagccctgctgcgaacttcaggcattaaatcagccctcctcatcctgttgttgcacatcctgttgttattccccagcttcgcctcacgctcttcctccgggcaaaccctgccctcggaggactgggctggcaagagccccagccagcttcgcccgtcgcgcttaccttccgtttttgcgatttctgctccgaagaccgagggcgggctcgtcgcgtccaggaccggctcagcagcacatagaggggaccttcctggcgtgcaaagcgcttcgctgtcgcgatgtcggcgccgaggtctcgcagcggccgctggggcagattcggagccgttcccttttatttcccctccgttgccctcacagctcggcaggaccgcccggcagctgccaacaatgagctgtgtttcttagggctttggccacagttaatataggcatttcggaaaggcggagcgagagcctccagggcgggcggcgccaagacgcggattccggaacaccgcgaacaccctggaccgggtcccggagccgcgtccccgccgcccgcggcacgtgctgcagaggctgcggggcccgggggccgcccagtcgccccgtcgccccccgactctggtttcttcccggcccagaaacgcgaggttggctcagccacccccgaggcagggggaaaatcctcccctgccgccccgcccgaaggtagagcctgccgggatagccacgaggagagctcaccgcccccctcaggctggatctaccccacccccagctttctcactcggttcacctagcgatctgccccgctctctacgggaaaaggggactcgcccagcgccccccgccctccagagtgcccttgtgcctccccggttttgcaaaagcttccacaggcagcgaagaatggctgtgcttcctcgagttgggttttaaagacccggacaaataatgcgccctttcctgagcgcgccttcctaggctgtgcctttgtgttttcatacgggcagtgggtagacctactctagatcaccgcttgtagatgcatttttttcctccactcctttcaaggacaggagctgggggcggggaggggcagccgctgcaggtggacggagcgcgctcgagggcccggccacccccgctcccgcgccctggaattccagtccgcgctttcgggcccgcctgccgctcccggggtacgtgtgcttctgctaagtttgcgtttgcagctcttggtagctttggcatccgagctgaggcgtctctgctctgtaaacaaactcagcgatcctcgtccccagatccacctttttgcacatacacagttacttgcttctgctgttgccctggatccgggaggtgggggtgtgtacaaacttgcagagcctccctccgggctctgcctgacggtttggggttgatttagaagcaaacgggtttgtaattaagaaatttgagggctgagtaaggctgctcttgctggaaaaggaaaacaaatagataacgtggtaatcgctttgtaaataaagtcgttctggaggtgggcacgtagctgcacgtcccgtatggcaccacgcgcacacacacggctgggactcttccttttcagtgaaattgttcagtggggcaatgggcgataataataaccttgcttccacaacgcggcacaacgagcctggtcgcccgtttggttcattgacttgcaaataaaacccctaacacaggtctgggctactaccaagtcggagctctctggctttctcacatggggaagccgagttgtttccccaacaccatgatggggctgttctgagcttttacattgctctttatgtggtaaaatcgagtttagcgctccgaataaggacttctgggcagttgtttcttcataactcgatagccattgaagacttcctgctgcgaagagcgagtccgcctccccgcccccccctcgtctttttcccccttcttgcacacaagacttttaaaggccctgtttcttgaggactggaaattctgatacatttccccgttcaggaatttgcaaaagagacccaatcctgattattttcgtctatgacccctctgtcttttcctagtcaggcatatttttgtaaatgttg

SEQ ID NO: 584967 - DNA, 4001 bp, Homo sapiens
ccaaagggaacaaccacccccaaatgacttctagaaaacaagttatttcttaactttttattgacattggcaaattaaaatagaataaattaacaagtattttttcaaaaaaatgttttgtacaaaaatactgtcaaaatttcctaaaaagctttcaacacagtagtatcttttcatgtactgaatataactattagcacagtgtcaaaaatgttgaagacagaaacaaaataaaaatctgtgaaatgtttgccactgacgacattccacaccctattatcatctgtacatatgggggtggggggggcggcgggggggacagccaacttgaaagtgaacagtatgactttcctgatccagaacagtttggcccacatctgtttaatcttccagtttagcatattttaaaaattagtctgtactcaaatgcatagttaaaaaaatgaagcgagatggcagtttgtgcagtaatatctgcccttcgaagttcatgcaaccaactaatgcaatttttcctttcactcgtaaatctgaatgcagttcagtcatttgaaaccatctacaaaatccacaagattaagcagtttgccaagattaatatctaacagttgagcactggagaaagtgagggaaaggagtaaaaacaaacaacgaaaaagaccaagttagctagatatttcaactacataagggaggtgggtgaatgtcaaggctacaaaaacgaaacaaaaacaggaaaaaaaagtggcagcaattttttttaaaaccaatttgtacaagtttatagtttactttgtttccaagttctcaaacctttcaagatctgaaaagtgagatactgtgtctaagggaatgtttcttttaattcacgccgaagaagttgggggtttgatttctttcgccggggtttcgatcgagtcaacagctcactctgctgggctgctgtttgcacacgaagtccgtcataaaatcaaactcgttttgccccagccagagttcgggcagctccttgatgcggtccaaacccatttctatcaccaaggacataagaacttcctcgtcgatgaaatcagtgtctatgacattgggcggcagcattgcagcggggacgtgggccacggaggcgggcatgttgccgctgccgctgccgccgccgctgttgctgctgcccgcgccgccgcccgagctgctgccagagccgccgggggtgctgctgccgcccgagccgccgggggtgctgctgccgccgctgtgcttggggttgcaatctcggaagtgctggtttgtcccgttcatctggtggcctgcagcagggtgcaaatccggcatgtagtggttgtgggggtaggggtgatggttgaaatactggttgttgagcttctgcagctgcatgctggccggcagggagcctccctggctggccaccgggggacccatgaactgggagttgttaaacctggccgcgggggccagcgcgctcggggggtgccctccgttcacagtccccggccccatcgcatgcctgatgccgctcgtggcattcatgttgcccgcgccgtagtgtatgtgctcgcccattagggcgttgaaggcgtgctggggctgctgctgctggtggtgatgggggctcgggaactgccccatgcccatgcggtgggcagggtgatggtgcagcccattggtgccgtcggggaagcgcccgtggttcatggccatcatatggtctgccatttccagtcctggaagtgaaaagggcagataatgagacccgcgccacacgtgtcgcccaccacagcgcaccccacttttgctcgcctctgccccccaggattcccgggcgcacgtcggctgcgaaccaccacccccaagatcccactaacagcctgtgcacccgggctagccaccacggaagagctaccactcataacacagccggacgctgcacaaacagccccttcccctgcgatcgggcggggggacccgagcccacaccccctttgctccccgaagtggcctaataaaggaagtgccccgtagccctgctgcgaacttcaggcattaaatcagccctcctcatcctgttgttgcacatcctgttgttattccccagcttcgcctcacgctcttcctccgggcaaaccctgccctcggaggactgggctggcaagagccccagccagcttcgcccgtcgcgcttaccttccgtttttgcgatttctgctccgaagaccgagggcgggctcgtcgcgtccaggaccggctcagcagcacatagaggggaccttcctggcgtgcaaagcgcttcgctgtcgcgatgtcggcgccgaggtctcgcagcggccgctggggcagattcggagccgttcccttttatttcccctccgttgccctcacagctcggcaggaccgcccggcagctgccaacaatgagctgtgtttcttagggctttggccacagttaatataggcatttcggaaaggcggagcgagagcctccagggcgggcggcgccaagacgcggattccggaacaccgcgaacaccctggaccgggtcccggagccgcgtccccgccgcccgcggcacgtgctgcagaggctgcggggcccgggggccgcccagtcgccccgtcgccccccgactctggtttcttcccggcccagaaacgcgaggttggctcagccacccccgaggcagggggaaaatcctcccctgccgccccgcccgaaggtagagcctgccgggatagccacgaggagagctcaccgcccccctcaggctggatctaccccacccccagctttctcactcggttcacctagcgatctgccccgctctctacgggaaaaggggactcgcccagcgccccccgccctccagagtgcccttgtgcctccccggttttgcaaaagcttccacaggcagcgaagaatggctgtgcttcctcgagttgggttttaaagacccggacaaataatgcgccctttcctgagcgcgccttcctaggctgtgcctttgtgttttcatacgggcagtgggtagacctactctagatcaccgcttgtagatgcatttttttcctccactcctttcaaggacaggagctgggggcggggaggggcagccgctgcaggtggacggagcgcgctcgagggcccggccacccccgctcccgcgccctggaattccagtccgcgctttcgggcccgcctgccgctcccggggtacgtgtgcttctgctaagtttgcgtttgcagctcttggtagctttggcatccgagctgaggcgtctctgctctgtaaacaaactcagcgatcctcgtccccagatccacctttttgcacatacacagttacttgcttctgctgttgccctggatccgggaggtgggggtgtgtacaaacttgcagagcctccctccgggctctgcctgacggtttggggttgatttagaagcaaacgggtttgtaattaagaaatttgagggctgagtaaggctgctcttgctggaaaaggaaaacaaatagataacgtggtaatcgctttgtaaataaagtcgttctggaggtgggcacgtagctgcacgtcccgtatggcaccacgcgcacacacacggctgggactcttccttttcagtgaaattgttcagtggggcaatgggcgataataataaccttgcttccacaacgcggcacaacgagcctggtcgcccgtttggttcattgacttgcaaataaaacccctaacacaggtctgggctactaccaagtcggagctctctggctttctcacatggggaagccgagttgtttccccaacaccatgatggggctgttctgagcttttacattgctctttatgtggtaaaatcgagtttagcgctccgaataaggacttctgggcagttgtttcttcataactcgatagccattgaagacttcctgctgcgaagagcgagtccgcctccccgcccccccctcgtctttttcccccttcttgca

SEQ ID NO: 584968 - DNA, 4001 bp, Homo sapiens
aaaaaatgaagcgagatggcagtttgtgcagtaatatctgcccttcgaagttcatgcaaccaactaatgcaatttttcctttcactcgtaaatctgaatgcagttcagtcatttgaaaccatctacaaaatccacaagattaagcagtttgccaagattaatatctaacagttgagcactggagaaagtgagggaaaggagtaaaaacaaacaacgaaaaagaccaagttagctagatatttcaactacataagggaggtgggtgaatgtcaaggctacaaaaacgaaacaaaaacaggaaaaaaaagtggcagcaattttttttaaaaccaatttgtacaagtttatagtttactttgtttccaagttctcaaacctttcaagatctgaaaagtgagatactgtgtctaagggaatgtttcttttaattcacgccgaagaagttgggggtttgatttctttcgccggggtttcgatcgagtcaacagctcactctgctgggctgctgtttgcacacgaagtccgtcataaaatcaaactcgttttgccccagccagagttcgggcagctccttgatgcggtccaaacccatttctatcaccaaggacataagaacttcctcgtcgatgaaatcagtgtctatgacattgggcggcagcattgcagcggggacgtgggccacggaggcgggcatgttgccgctgccgctgccgccgccgctgttgctgctgcccgcgccgccgcccgagctgctgccagagccgccgggggtgctgctgccgcccgagccgccgggggtgctgctgccgccgctgtgcttggggttgcaatctcggaagtgctggtttgtcccgttcatctggtggcctgcagcagggtgcaaatccggcatgtagtggttgtgggggtaggggtgatggttgaaatactggttgttgagcttctgcagctgcatgctggccggcagggagcctccctggctggccaccgggggacccatgaactgggagttgttaaacctggccgcgggggccagcgcgctcggggggtgccctccgttcacagtccccggccccatcgcatgcctgatgccgctcgtggcattcatgttgcccgcgccgtagtgtatgtgctcgcccattagggcgttgaaggcgtgctggggctgctgctgctggtggtgatgggggctcgggaactgccccatgcccatgcggtgggcagggtgatggtgcagcccattggtgccgtcggggaagcgcccgtggttcatggccatcatatggtctgccatttccagtcctggaagtgaaaagggcagataatgagacccgcgccacacgtgtcgcccaccacagcgcaccccacttttgctcgcctctgccccccaggattcccgggcgcacgtcggctgcgaaccaccacccccaagatcccactaacagcctgtgcacccgggctagccaccacggaagagctaccactcataacacagccggacgctgcacaaacagccccttcccctgcgatcgggcggggggacccgagcccacaccccctttgctccccgaagtggcctaataaaggaagtgccccgtagccctgctgcgaacttcaggcattaaatcagccctcctcatcctgttgttgcacatcctgttgttattccccagcttcgcctcacgctcttcctccgggcaaaccctgccctcggaggactgggctggcaagagccccagccagcttcgcccgtcgcgcttaccttccgtttttgcgatttctgctccgaagaccgagggcgggctcgtcgcgtccaggaccggctcagcagcacatagaggggaccttcctggcgtgcaaagcgcttcgctgtcgcgatgtcggcgccgaggtctcgcagcggccgctggggcagattcggagccgttcccttttatttcccctccgttgccctcacagctcggcaggaccgcccggcagctgccaacaatgagctgtgtttcttagggctttggccacagttaatataggcatttcggaaaggcggagcgagagcctccagggcgggcggcgccaagacgcggattccggaacaccgcgaacaccctggaccgggtcccggagccgcgtccccgccgcccgcggcacgtgctgcagaggctgcggggcccgggggccgcccagtcgccccgtcgccccccgactctggtttcttcccggcccagaaacgcgaggttggctcagccacccccgaggcagggggaaaatcctcccctgccgccccgcccgaaggtagagcctgccgggatagccacgaggagagctcaccgcccccctcaggctggatctaccccacccccagctttctcactcggttcacctagcgatctgccccgctctctacgggaaaaggggactcgcccagcgccccccgccctccagagtgcccttgtgcctccccggttttgcaaaagcttccacaggcagcgaagaatggctgtgcttcctcgagttgggttttaaagacccggacaaataatgcgccctttcctgagcgcgccttcctaggctgtgcctttgtgttttcatacgggcagtgggtagacctactctagatcaccgcttgtagatgcatttttttcctccactcctttcaaggacaggagctgggggcggggaggggcagccgctgcaggtggacggagcgcgctcgagggcccggccacccccgctcccgcgccctggaattccagtccgcgctttcgggcccgcctgccgctcccggggtacgtgtgcttctgctaagtttgcgtttgcagctcttggtagctttggcatccgagctgaggcgtctctgctctgtaaacaaactcagcgatcctcgtccccagatccacctttttgcacatacacagttacttgcttctgctgttgccctggatccgggaggtgggggtgtgtacaaacttgcagagcctccctccgggctctgcctgacggtttggggttgatttagaagcaaacgggtttgtaattaagaaatttgagggctgagtaaggctgctcttgctggaaaaggaaaacaaatagataacgtggtaatcgctttgtaaataaagtcgttctggaggtgggcacgtagctgcacgtcccgtatggcaccacgcgcacacacacggctgggactcttccttttcagtgaaattgttcagtggggcaatgggcgataataataaccttgcttccacaacgcggcacaacgagcctggtcgcccgtttggttcattgacttgcaaataaaacccctaacacaggtctgggctactaccaagtcggagctctctggctttctcacatggggaagccgagttgtttccccaacaccatgatggggctgttctgagcttttacattgctctttatgtggtaaaatcgagtttagcgctccgaataaggacttctgggcagttgtttcttcataactcgatagccattgaagacttcctgctgcgaagagcgagtccgcctccccgcccccccctcgtctttttcccccttcttgcacacaagacttttaaaggccctgtttcttgaggactggaaattctgatacatttccccgttcaggaatttgcaaaagagacccaatcctgattattttcgtctatgacccctctgtcttttcctagtcaggcatatttttgtaaatgttgttactttgtgtcttgtcttctttcctcttccaggctctccggcaaaccgtgcaggcaaataatttttaaacctcaaaaatatttactttttagagatacgggcacatgacacattgcattgttagttgcaacaattccctattctcctaacctcccaccacctttacctgtaggtcaggacatgcagtttaccgtatcagaggcttggatacctgaaggggccacttcctataaaaaaacagattctaaaatattggtaaaacccaacctgaaaaatcgcgggattgt

SEQ ID NO: 584969 - DNA, 4001 bp, Homo sapiens
tagaatataagtgggcagaaaaatgtgaaaagagagactggcttagcctcccagcccacatcttttctcacgtgctggatgcttcctatcctcaaacattggactcccaagttcttcagttttggaacttggactggctctccttgcttctcagcctgcagatggcctattgtgggaccttgtgatcatgtgagttaatacttaataaactcttctttatatatatatttaatatttacatattatatattaaatatatattatatattatatataatatatatttatattatatataaatatatttaatatttatatttaataaactcatatatatatattccattagttctgtccctctagagaaccctaatacaaatgttttttcttctttgctttccattcaatcttgaaaataatgacagttcagagtaagataaaatagttacctgttccagccctacaaatttaaagtgatttgacctaatcctaaaataatgttcttcttctgtcccagccttaggaaattaacagtatcagctatgaatatacgaatgtactgaccaagcatcttcagtgtgatgtctagtccgtttgataattatggtttattatgaattactatatttgtatgcatgttctatttctcagtcttttaataatattactagcagcatttatcaagtgccttctgagtttgtttagattgagagcctctctgaggtcctgtcttctctctgagggacgggagttgctcaggacctgcagcgctggggtccagaccctggcagttgccaatgtgctgccacacccatggcccggctgggcagcctcgaagctgcctcaggcagctcctgccacatccacaaacccaagcgggagcacagcccgggacaggaaacacagggcacgtccagatgctgctgcttcacagacaccaagggcgtggtttgtggaaaaggcctagttttaggaaggtcttttccctctgatcatccaggaactccagattaaatgtaacagaaaacctttatacaacaattgtcagttcttgttccatttgtgctttcttgaggattacacgtgcatctccctgaaattgtttaatctcttgggaccaagagacactgactcatcttgttgttgttattactaataggtgtaatttacatacatacatatgtacatttacataatttacacagtaaaaaaactcttcatccccctcaccacatttcttagtcttatttctcttgtgatctgagtttgctgtcattctcttggcctcagttcttcctaccacatctgctctgagaggaaacactatgtgactgtttaaaatctgttctttttttatgatcccaagaagaaagagaaaaaaacaaagatctgtaggaagaaaaaagggtgaggacagaacttctgcagaaataaatattgttacaataacacaaattgtaaactttaggataggtactgaccgtgtagttgatctttattgaaccagttggtttgaaatacttagaatgctgtcagctttaaggttttacagtggaaattctttccttaaattggcttttggacatggatcacaggtagagtgaaccaattccagaaaatgtgatctacattcacatttgtcagtattttctttttctatgacatgcataattatcatatcacaggcatcagtgacttgctgcctctacctgggattctccttacctgggaaagttgtaacctcgaggcccgtgatgtcctaaagtggactgtcattagcttggtggaggtacttgaagagcaagcagacactggagggtggggaaaccaagcatccggaggcactcatcttgctccgttgttttacccgacagtgaagtggctctcccaagcccctgtcctcctgcgttccattttgtggtgcctatagcctgcaagatgccatatgcttcctgttcccaaccacccaggtctgcccgtgatcatcccacttcgaactttgaatccttcttatatgttgttctttaaagtcttactgattattccctgtggtcttttttttttttttcactagcccttctgttgtcttaagttatggctgtgtcttggctatttacatagtaacttcctcatcattttttcatctccactatcttgtcctctaatggtcttgaacaccgtgagagtgttgaatgaagacccttttgtagacagtggccagcattgtttctgtgtctgtgcatgtggtcgtgacttagcttttgggcatatgataatcatcaggaactgagttgtacgtctcttcagtgtcctctgtatatcatgttgattacagttctcagttgtaatatctaatatctaagatttaagatttaatatctccttagcccgggtcccttgtgagttccaagtgctgctctgagctgataaccagtcacgtcctagacaccctggcctggaaactaggacatctgcctcgggcctgttatggccaaggctgctaacactgagaaacagtcttagcttgttacagcgttgacgtatagggttagaaaggcaaatatttaaattcattttaaatcctttcatttgaaattttagtaggtcattttggtatactgatggactgagtttggaaaaggctggcggcattaaactagaatattttaagtacttctgatgcctttgtactgatttcttttttgtaatcaaacccattaatagacttaaaactcaaggaagaaaaaataatacttgtaattttaaataagcattcaattataagtaaaaaacatttttgtattcgttaccatagttaccaagcagctttcctatagttctagaaaaaaatgggctccatcattcagagtaattctgaaaggtgcctttgggggaaagggagaggaaggggtggtacaggagaggtcctggccgtcccagaagcaggagacataactggaagagctttgttgacgctgagttttacagaatctcccactaaatagtaactgcatttgtgaggggaattctcttttagccgtgacataatataagccaacttaacagagtattggaattgtattcaaactttagaagtcgacgctatagtttacatggggtactactatatttgttcagggttttaaaactttatttaaatcaagcaaaagttagacacttcctgtatttgcaaataccaactatatctcaaaggaatgaaatcaggcaaataaagatgaggccaaaatttaaaatctaaggaagctgaaagtggcagtttctgtactggaagagagtgcatctatctctgtatttgtgcttttggtcttaatagtttgtaagccttatgtagagttttgataatatttcatggttttaggcctaggcagggattagattttatctcagattttgctaagagtatttcttctggagactagcaggctgctagtaagaattgatagaattggctctttgtcactgggagaactggagttgaagggttacaggagatgagtcctggagaacgggaggcagggacaagggtgccaggaagctcaggggatgaaagggaaatggagagtccagtgagagaaggctggcgaggtgtagagagtggccagacacatgcctgacagttgggaccacttctctatacaaatcaggaggaggcgaggtaggcaggatagttcagagtttgtgggaaggaacctgacatctgaagtcagtggagtgtgtcttgggctgctgcctgcactctgccattcatagatcaggtcttctttttccttccccagaactgccctgagctgaaaccacctttcttctctccctatagcagtacatctaccccacctacaccctgcatccactccacagccccttgtcttcttcagtccctctttccctgatgaccacagacctctccaagctgggcactgttctatggtgcgttttgttaaagtctaagggaagtcctgtaggaagaggtagttgttact

SEQ ID NO: 584970 - DNA, 4001 bp, Homo sapiens
ggcacagccaggaggtcccaagactgggaaatgaatgcagcagcggtagggaggggagcggccgctgcaatcagaggggggctgggtgacaccgagaagcctgctgcctgcagttttgctacccaaatgccataggaccatctctccttacccacacccgcagagagaggagagagttggggcaagtcttctacttctccaacccccaaatcccaaaatgccctaaccgagctcttctcctccgtctgatctctctcccacccatccttgtggtagctacgttaaactcacgtcttcttgccacctccccttctgtccctttccccagtcctggggatattcaatgccacccgatcacctctccagctctgcttttcaaactccgatcccagtctcctgttttgttccgcccctccaaagcttcccaatttacttgctctcactctcaggcctccctcaacacaccgtcttccctgaagcgtctccatccacacacacacacacacacacacacacacacacacacacacacctctcctactgcactactcaccctcagatcttgtagggacacatgtcctaactgaggttcccctctgtcccttctaaaccctgctgggcccccactgtcccttcaccagctcgccctctaaccccaccccagtctcacttttgggaattctcctttttctccacttcccttcctttagtctgctagaaacttgcacttttacaaacttttcagggttgatcctagaattctcattacttgctaacaagttaatgtcttcccctctcaaaaccacccctcaaccaaagagtgcacgtgggattgggggtgggagtcaaggagggaagggattggggagttaaggctggaccgggggaaaggtgagagttggcttccaggaatttgggtggctgaggagagaagtgttcttaccttcacgaacaattcgacctgcggttgttcttcagccatggttgcgtcggggaccaggaagtggccgtccctgggggaactgggaggggctgggaccggggaaggcgggtctcacactcagggactctctcccctagacccagggctgtcccttcagcacaacacaagctcaatcagacctacttgcacccaaactaggcctccccaccagcccaacgcaccccacacccagctcctccagctcggtcctctcccgggctggatcagagagccgctgactcaccgaccggccccgccctgaacctggggaggggactggaggggggcgggactcgacgatgtagggagtgagtccggaaggggaatcctcggatctcccacaggatggggatgggggtgttaaggaggagtcctgaaaacctccttgtttctccgacctctcctgaacacaggactcttttctgcctcagtttccctgcttcattaatctgagtacaacccgactgaccctcatataaaaaacttgacactaacagcttgggcacacccgtgaagattcagggatggggacttcaaatggaaaggtggtcgtttaatcattctgcatttcttccagactccaatccaaattctgggttgctgggactgtggtctgagagaagaactcggaagtggaaggctgggactgcagataggaaccgttagccatgcagcctgggattagggaaggggtgacgccagcactccctgagctgcccagactggtgtctcagtaggtcctgtgccccccgcagtctactgtctccgggcccagctcagcactaggacttgcagtccttgtggcctacacttgggattgggcataggaaatagagttaggggccgggtgaggtggctcacgcctgtaatcccaacactttaggaggccaaggggggtggatcacctgaggtcagggagtcaagaccagactggccaacatggtgaaaccctgtctctactaaaaatacaaaaatttgccaggcggggtggtgggcacctgtaatcccagctacttgggaggctgaggcaggagaatcaattgaacccgggaggtgaaggttgcagtgagctgagatggtgccattgcactccagcctgggcaataagagcgaaactccatctcaaaaaaaaaaaaaaaaaaagaagaagaagaaaagaaaaagaaagtagagttagggatgggaagggagatgacgaagtcttttgcgaaggaaacataaagccgaggcaaggggctttgttgcagggaggggtctgttcctgtagcttggtcagctttgtgcttccacttatgtttcctattggggccccttcctgtgccctttgtcctcgtctcactgacaggttgccttggagatggggcagaggggtgggattatcatggcccgatcctgaagtatgtgtatagggggtggggtaggggtgttgttagctggtcctgtcatggggataaagaaagatcagacagaatagtgggagtagagtccttggggacacctaaataaataagcagggaggacataggaggagcagctctctctccagtaaccttgatttctattaaacctttatgacctgctgaaaaaataaacccagaattccagcctccatatcctgaatttctctcctgtccaaccatcccttctctatcctcctcatcaccctctgtccaacaaaagacctacagttccagaaaaccatggtggagtgcaagaacacagaactaaaacagagcttgaaacttaaagaaagggagagacttgggggaggagtggggtggagtgacgtgatgtgctgctggaaaccagcagttggtggtttcctcttgtgcttcctcttctgtgggttttctcctgcttgtgggagggcctttttctctcctcccgacagaaaggctatctttggtgttcgttcccttgaactgtaacatcctgtaagggtatgattccatgcctctgtgtgggtgtgaattccctcatggtgaccctcaaaatctgcacacaggaccccttcccattgaggggaggggatcaaaacaactctacttctcagggtcctctcctgttccaactggtctgtgtccaagagaagccttaggtaaatggggccagcttgaagatcaaacaggtttggcagcctctcccggcctctcttttctctcctacagctttatagctacagctgccttgatatcaatattgactttggctggctggcatgactacccacagggtatcgtgccttaatttaccaggtgacaggcaacgctgccctctcctggaaccatccagcagagccagggctgtacccccaaatcctgcaacagaggtttccctccatctcacctccctgtccctgcatttctcctatctcagtagctcctctttccctctctgggcttctctttccactccctccccttcctgggcttggtaaactagtccctaatctcttcacaccccagattggaaggtgggtccctccctgacactccccagagctgtcaccaacctcctccaagtttctatagctccattgctcaacagatttgccaggggtaaccattaacccagcccttaactctgttcccccacctttcttgctggaggggattttccaattactggttagcacagctaggtcatctcacccccaccatctttcctaacttcttgggttggggggctggggaggaatctccccatctcagggtactaggaacaaagctggggaggatggtgcatttaaagggattatatatatatatatatatattttttttctttctccctcataaccccacccccgcaacacacacacacacacacacacacacacacacacacacagacgcacaaataagctttatggagcagtgacttcattatgttcaccgctttgagtccaacccctggcccaaaataggcactaaatagttgccgaatgcatgaatgatagatacctctctgtcttcaggggtgtgtagaagtgcgaaggggtatgggcatgtcccagtag

SEQ ID NO: 584971 - DNA, 4001 bp, Homo sapiens
gagagggaagggtgtggaacttcagtgaggccagagttgtaggctagaagcctggatttctgggttcctgaagggagtagagtctgaagacaggagaggtgggtggggtttgggagccagagttttggttctctacacctccaatccaaggtgtctttgggtggggagtctagtcaaggggccctgggcctcgcgctagagatgtggagggccctacagagaggggctgccctctaattagcaagtggtgacctcattggcccaagggacacctccccctaagctgagggtgattcatctctctgtctccggcttccttcctgtcaaggatgtgggggaagggacagtgaggatgaggcctgggcagctaaggctacccctaacctgctgccagggtctcccagcacaagtcctctgactgcaataaccatcctctcacaggacacagggccggaatctctgcggcacagcctcacccacgagtaaaaatagccccggaggcgaatgtgagagtgaggtggggaccacacctaagggggcggacccaagcaggctccgacttccctgggcccagggagagggaatggctgcccgagaaacccaagcagaagggagagggagacacaggcagagacacacaaagatgagagaaacaaaaggggggaaggggaaagaaaggcggcaggaaagtggagagtggggagacgtgcgtgccaacggagagacacaaacggagcggggagaagaggacactgttaaggaagggagggaggggcacagccaggaggtcccaagactgggaaatgaatgcagcagcggtagggaggggagcggccgctgcaatcagaggggggctgggtgacaccgagaagcctgctgcctgcagttttgctacccaaatgccataggaccatctctccttacccacacccgcagagagaggagagagttggggcaagtcttctacttctccaacccccaaatcccaaaatgccctaaccgagctcttctcctccgtctgatctctctcccacccatccttgtggtagctacgttaaactcacgtcttcttgccacctccccttctgtccctttccccagtcctggggatattcaatgccacccgatcacctctccagctctgcttttcaaactccgatcccagtctcctgttttgttccgcccctccaaagcttcccaatttacttgctctcactctcaggcctccctcaacacaccgtcttccctgaagcgtctccatccacacacacacacacacacacacacacacacacacacacacacctctcctactgcactactcaccctcagatcttgtagggacacatgtcctaactgaggttcccctctgtcccttctaaaccctgctgggcccccactgtcccttcaccagctcgccctctaaccccaccccagtctcacttttgggaattctcctttttctccacttcccttcctttagtctgctagaaacttgcacttttacaaacttttcagggttgatcctagaattctcattacttgctaacaagttaatgtcttcccctctcaaaaccacccctcaaccaaagagtgcacgtgggattgggggtgggagtcaaggagggaagggattggggagttaaggctggaccgggggaaaggtgagagttggcttccaggaatttgggtggctgaggagagaagtgttcttaccttcacgaacaattcgacctgcggttgttcttcagccatggttgcgtcggggaccaggaagtggccgtccctgggggaactgggaggggctgggaccggggaaggcgggtctcacactcagggactctctcccctagacccagggctgtcccttcagcacaacacaagctcaatcagacctacttgcacccaaactaggcctccccaccagcccaacgcaccccacacccagctcctccagctcggtcctctcccgggctggatcagagagccgctgactcaccgaccggccccgccctgaacctggggaggggactggaggggggcgggactcgacgatgtagggagtgagtccggaaggggaatcctcggatctcccacaggatggggatgggggtgttaaggaggagtcctgaaaacctccttgtttctccgacctctcctgaacacaggactcttttctgcctcagtttccctgcttcattaatctgagtacaacccgactgaccctcatataaaaaacttgacactaacagcttgggcacacccgtgaagattcagggatggggacttcaaatggaaaggtggtcgtttaatcattctgcatttcttccagactccaatccaaattctgggttgctgggactgtggtctgagagaagaactcggaagtggaaggctgggactgcagataggaaccgttagccatgcagcctgggattagggaaggggtgacgccagcactccctgagctgcccagactggtgtctcagtaggtcctgtgccccccgcagtctactgtctccgggcccagctcagcactaggacttgcagtccttgtggcctacacttgggattgggcataggaaatagagttaggggccgggtgaggtggctcacgcctgtaatcccaacactttaggaggccaaggggggtggatcacctgaggtcagggagtcaagaccagactggccaacatggtgaaaccctgtctctactaaaaatacaaaaatttgccaggcggggtggtgggcacctgtaatcccagctacttgggaggctgaggcaggagaatcaattgaacccgggaggtgaaggttgcagtgagctgagatggtgccattgcactccagcctgggcaataagagcgaaactccatctcaaaaaaaaaaaaaaaaaaagaagaagaagaaaagaaaaagaaagtagagttagggatgggaagggagatgacgaagtcttttgcgaaggaaacataaagccgaggcaaggggctttgttgcagggaggggtctgttcctgtagcttggtcagctttgtgcttccacttatgtttcctattggggccccttcctgtgccctttgtcctcgtctcactgacaggttgccttggagatggggcagaggggtgggattatcatggcccgatcctgaagtatgtgtatagggggtggggtaggggtgttgttagctggtcctgtcatggggataaagaaagatcagacagaatagtgggagtagagtccttggggacacctaaataaataagcagggaggacataggaggagcagctctctctccagtaaccttgatttctattaaacctttatgacctgctgaaaaaataaacccagaattccagcctccatatcctgaatttctctcctgtccaaccatcccttctctatcctcctcatcaccctctgtccaacaaaagacctacagttccagaaaaccatggtggagtgcaagaacacagaactaaaacagagcttgaaacttaaagaaagggagagacttgggggaggagtggggtggagtgacgtgatgtgctgctggaaaccagcagttggtggtttcctcttgtgcttcctcttctgtgggttttctcctgcttgtgggagggcctttttctctcctcccgacagaaaggctatctttggtgttcgttcccttgaactgtaacatcctgtaagggtatgattccatgcctctgtgtgggtgtgaattccctcatggtgaccctcaaaatctgcacacaggaccccttcccattgaggggaggggatcaaaacaactctacttctcagggtcctctcctgttccaactggtctgtgtccaagagaagccttaggtaaatggggccagcttgaagatcaaacaggtttggcagcctctcccggcctctcttttctctcctacagctttatagctacagctgccttgatatcaatattgactttggctggctggcatgactacccacagggtatcgtgcctta

SEQ ID NO: 584972 - DNA, 4001 bp, Homo sapiens
cttcagtgaggccagagttgtaggctagaagcctggatttctgggttcctgaagggagtagagtctgaagacaggagaggtgggtggggtttgggagccagagttttggttctctacacctccaatccaaggtgtctttgggtggggagtctagtcaaggggccctgggcctcgcgctagagatgtggagggccctacagagaggggctgccctctaattagcaagtggtgacctcattggcccaagggacacctccccctaagctgagggtgattcatctctctgtctccggcttccttcctgtcaaggatgtgggggaagggacagtgaggatgaggcctgggcagctaaggctacccctaacctgctgccagggtctcccagcacaagtcctctgactgcaataaccatcctctcacaggacacagggccggaatctctgcggcacagcctcacccacgagtaaaaatagccccggaggcgaatgtgagagtgaggtggggaccacacctaagggggcggacccaagcaggctccgacttccctgggcccagggagagggaatggctgcccgagaaacccaagcagaagggagagggagacacaggcagagacacacaaagatgagagaaacaaaaggggggaaggggaaagaaaggcggcaggaaagtggagagtggggagacgtgcgtgccaacggagagacacaaacggagcggggagaagaggacactgttaaggaagggagggaggggcacagccaggaggtcccaagactgggaaatgaatgcagcagcggtagggaggggagcggccgctgcaatcagaggggggctgggtgacaccgagaagcctgctgcctgcagttttgctacccaaatgccataggaccatctctccttacccacacccgcagagagaggagagagttggggcaagtcttctacttctccaacccccaaatcccaaaatgccctaaccgagctcttctcctccgtctgatctctctcccacccatccttgtggtagctacgttaaactcacgtcttcttgccacctccccttctgtccctttccccagtcctggggatattcaatgccacccgatcacctctccagctctgcttttcaaactccgatcccagtctcctgttttgttccgcccctccaaagcttcccaatttacttgctctcactctcaggcctccctcaacacaccgtcttccctgaagcgtctccatccacacacacacacacacacacacacacacacacacacacacacctctcctactgcactactcaccctcagatcttgtagggacacatgtcctaactgaggttcccctctgtcccttctaaaccctgctgggcccccactgtcccttcaccagctcgccctctaaccccaccccagtctcacttttgggaattctcctttttctccacttcccttcctttagtctgctagaaacttgcacttttacaaacttttcagggttgatcctagaattctcattacttgctaacaagttaatgtcttcccctctcaaaaccacccctcaaccaaagagtgcacgtgggattgggggtgggagtcaaggagggaagggattggggagttaaggctggaccgggggaaaggtgagagttggcttccaggaatttgggtggctgaggagagaagtgttcttaccttcacgaacaattcgacctgcggttgttcttcagccatggttgcgtcggggaccaggaagtggccgtccctgggggaactgggaggggctgggaccggggaaggcgggtctcacactcagggactctctcccctagacccagggctgtcccttcagcacaacacaagctcaatcagacctacttgcacccaaactaggcctccccaccagcccaacgcaccccacacccagctcctccagctcggtcctctcccgggctggatcagagagccgctgactcaccgaccggccccgccctgaacctggggaggggactggaggggggcgggactcgacgatgtagggagtgagtccggaaggggaatcctcggatctcccacaggatggggatgggggtgttaaggaggagtcctgaaaacctccttgtttctccgacctctcctgaacacaggactcttttctgcctcagtttccctgcttcattaatctgagtacaacccgactgaccctcatataaaaaacttgacactaacagcttgggcacacccgtgaagattcagggatggggacttcaaatggaaaggtggtcgtttaatcattctgcatttcttccagactccaatccaaattctgggttgctgggactgtggtctgagagaagaactcggaagtggaaggctgggactgcagataggaaccgttagccatgcagcctgggattagggaaggggtgacgccagcactccctgagctgcccagactggtgtctcagtaggtcctgtgccccccgcagtctactgtctccgggcccagctcagcactaggacttgcagtccttgtggcctacacttgggattgggcataggaaatagagttaggggccgggtgaggtggctcacgcctgtaatcccaacactttaggaggccaaggggggtggatcacctgaggtcagggagtcaagaccagactggccaacatggtgaaaccctgtctctactaaaaatacaaaaatttgccaggcggggtggtgggcacctgtaatcccagctacttgggaggctgaggcaggagaatcaattgaacccgggaggtgaaggttgcagtgagctgagatggtgccattgcactccagcctgggcaataagagcgaaactccatctcaaaaaaaaaaaaaaaaaaagaagaagaagaaaagaaaaagaaagtagagttagggatgggaagggagatgacgaagtcttttgcgaaggaaacataaagccgaggcaaggggctttgttgcagggaggggtctgttcctgtagcttggtcagctttgtgcttccacttatgtttcctattggggccccttcctgtgccctttgtcctcgtctcactgacaggttgccttggagatggggcagaggggtgggattatcatggcccgatcctgaagtatgtgtatagggggtggggtaggggtgttgttagctggtcctgtcatggggataaagaaagatcagacagaatagtgggagtagagtccttggggacacctaaataaataagcagggaggacataggaggagcagctctctctccagtaaccttgatttctattaaacctttatgacctgctgaaaaaataaacccagaattccagcctccatatcctgaatttctctcctgtccaaccatcccttctctatcctcctcatcaccctctgtccaacaaaagacctacagttccagaaaaccatggtggagtgcaagaacacagaactaaaacagagcttgaaacttaaagaaagggagagacttgggggaggagtggggtggagtgacgtgatgtgctgctggaaaccagcagttggtggtttcctcttgtgcttcctcttctgtgggttttctcctgcttgtgggagggcctttttctctcctcccgacagaaaggctatctttggtgttcgttcccttgaactgtaacatcctgtaagggtatgattccatgcctctgtgtgggtgtgaattccctcatggtgaccctcaaaatctgcacacaggaccccttcccattgaggggaggggatcaaaacaactctacttctcagggtcctctcctgttccaactggtctgtgtccaagagaagccttaggtaaatggggccagcttgaagatcaaacaggtttggcagcctctcccggcctctcttttctctcctacagctttatagctacagctgccttgatatcaatattgactttggctggctggcatgactacccacagggtatcgtgccttaatttaccaggtgacaggca

SEQ ID NO: 584973 - DNA, 4001 bp, Homo sapiens
gactctgtctcaaaaaagaaaaaaaaaaaagtttgtttgcacagtgtgacagtgatgatgtggatatggaggtcagaaaactgcgtgaatgcacctgttctaacatcacctcctccgtggagctgctccaaactcagtacacatctcagcactccttctctgaacacccacacactccacccactcctctgtttcatctcttactatattgtattagaatacattgagtgcaagtctgtctctgtcaccatattattcattacttaagagcaagggccttgtcttgcacagccctttccccccaaatgctcagcagagtacaaggcaatgtgtgtctggtatgtatgtgtgaaccaagcactatactagattatttttaaaaggaccttgtagtagaataagtgatccatgatttacacacaaaacaattagagaaaagaacaaattacaagacaacaaagggcaaaattagtaaagtgtgtttcatcagaaatgttactgggaactggggaagagagaaatgagtatgaactatggtttctgtaggtttataatcatttttattggcaggaaagagcagcatttacaaatatatttatataataaatgtgaaaacatttctaaaaatcacataaatatgaatattgtgggggagatgttggggaaaaagggcctgccatcttgattaataaagatgatttgtttaggtctgaaacactttacattttgataatatttataaccataactttattactttatcatctaatacaaagatcaccaaggttctgtttagatatcgtaagcattaaacattaacactggtagtgtcttactactactgaaatcatttgacttcatcaaatttttagttatattggtgccaaaggggcaagctagtgacagagatagcctttattgaccacctatctgacaaatctgtgaccttagaagcacaagaaggtctttctttcacaagctttggtttcacttttaaacatgttgacaaaggaaatttaaccagacagaaaaatgtacttaatgtcagccacaatggcaaggatttgggcagcagttatggctcacttatgtgaaccgttttgaaaaatactttgcccatggtatgtaaaagtcagtgattaaatacgtgctttaaatgcaccttccaattcctctaattttgtgaagagctgagtacactctaatgactgatttagtccctccgactcctgaatatgtattgagatccaaggaccatggcattatgaatctttccctggtcattcagagcaaaataaaacaccagccataatatctgcatgaacagggtatgcctgtcagaggcagaccttaccttcacaaagaggtaaatctcagggttcatgtgagctccctccttttcttccaaaccttcagcatcagaatagcaggaatacttggtggtagagaaggccttactgtgctgaatggtgaagcttgaaggagaaggcagatcttccttcatcacactcccattctcctggagttctgctgcgcagagttgctggtcctgggttgatgaatataacccttccattgagatgcccctgtcctcctggggctcacctggatgagcctcctggagttcagagtatatctcatcaggcaggaggtagcctctgtcttctgactggacagaggccaagctggtctcttcacccttaatggtatagactgacacaaaatcatactcatgggtattcagctgagtggcatataaatcattttctggccttaagtactcatggacatcatcataatggggactttcattttcttctggctggtctggaacctcatacgtcctctcattttggattgtgtcatagatggtgctgtagtcttcgtcattcatgcttattgatccgagagatctgtttacagggagacctgagtagatctgaaatgaatgaagggacagaggatgctgcaccaccttgcagaggaatcaacgagctcttaaaaggcagcaactagcaactgctatcaatgacaggtctctaacaattatttactggagagttttataagcaaaccacaagtccattggacagaagataaagcttacacactcagttaactccttcactcctaaagatatttttattagaccctggggatttcctcattggcagtaactccaagattctttgggtaagccagagattgaattgaattatcttcctggtatacactgaaattttgaatatgtagccatttttcatcaatagagctccctcctccaactgcctccaaatgttgacaacattcaagaacccctgcaattcagtggagagctacaattcttcacaatggcctctcatctatttactgctgaatttatcacatagaacaattatttgcctattgataccctgtgataaatgaattacatgccctggttaggtaatgaattccatttacatttcttatctggaaacaccactaggtgattaaacagcagaaggaaaagaagataaatgctctggcctatagacacatcagtatagaccacccaaattagggactcaaagacttatggctttaatttttatttttcccccttaaatctgcatgatcatcaccatcaacaaacattcactaaaatcctatcatatacagaatgctgaattgagcacaacaaaagcgttagaagacacattctctgtcttcaaaggggcttttaaatgtagctggagggcccagaagagaaaaataaaaccgaggaaaaactatttaaagttttcttagtgcaataagcccaggtctggataagcaataaaaaattgtatgcacaaggctgttcagtcaatgccatccacagatgctgtgaatatgtgtgccccccaaattctttttaatctggtactctatcctgctaattcctgcttccctttgccacaccacatacatctttctccttgaagtgacaacccagctaggttgtaaagggactttaatgtctagaaatcatgtgaaaactgtgaagcaatgcaactcctgttgacaagcttcagaacatttgatgggcatcttggcaaaacttcgttgtactcttagacttcaatattgtatccaggaatcttctactgggaattagagcagcatttctagaattctagcttaaagaatgggtaaggaaaaagaggtcagagacttcaaaggctattgacactggacatttatcttattgaaaagtgacattcaatgggtccaaataccttacacattttgataggttctataatcaggtgtttttaattgaatggattccagttcaaatcttcctcctagttttacagctggtgaaaacctaagagatcattcaaacattttattttacatttgaaaaaaatttaaacctagaaagtggaagtgaatggtccaagtttacacaaaaacttaatggcggagctgactttagctgtggtttttgaacctccagctcagtaatatttctgctactaaatctcttccttaactcagtattttccaatctttttttcatgatcacacactgtcccttccctgctcccaaaggagccttttcagatatttctctatgaaataaaaatgctgcagatatactacatatctgtttgcatattgtatatacatatgcattttgtacattaaaagagtaacttttttttctttttgcttcccaagaaccaattttcaccccttggggggtgacactactcctttccacaatgcaactcatgcttttactactaatgcagtgtgtagctcataatctaacactggattctgtttcattctgcattattacaaagaatagtatacagcatgtgcatatggatacagcatgttgtcaagtcctcaccacaatgacccagtgaggcagggctgaggttggctaagcttagggcccaagatcaaacagatatttcaaattaggtccctctcttatcccattttagaacacatctatcatgatc

SEQ ID NO: 584974 - DNA, 4001 bp, Homo sapiens
tccctattcacccctagggcccaggcctggatgctggggttcagaacacccccttgctgccctaaggtccaacactacccagcatcagacgagaaatgacctcctttattacctgggtctgccaaaggacctggaaatccagcctggggtgggggtggggggagtcccagaaaccaaaggagcacacaggggccacagtgggaagagaacaggctgaagaaagcaagtgtcactaaatgtcaggtgtaagcttgaaaaataaacacaaagaatgtaaaacccagcagaagaaatttaacaaacctttgtggtaggctgggacaacggagacagatcacgtaccaagtgtaaagtaagtcacattttaagagtcagaaagtaccaaagaccacagattgttatcaaggtttatgtagatctcatactttttgcaaacatctatttaattagcttgtagagaaggatcttttgggcaaaataacattttcccaattccagggaatatttatgccttttaaattctgccaggaggcccctgacaggcaccagtgactcttcccttctcagcgatctgcatatttctagggaaactttgcactgagagagttttccccctttgtgaaaggtcttggcgcccaggcagtccccgacttcccctcccccaagtcctggcgactgtttctgctcagccctggaggctactctcccgcagcctcaggtttccctacttctgcagcgtcggcaccaagggctgatcaaatgtttctttctccttacaccggcggaccgggaaacgccgccgcagcctcgcctccatccttcctcctacaggttgcaaataaagtacagcagctctgacattaggcagtttctgtccaaggagcaaggtgacttcatttaatttgcactgtgctccttcatccctgtctgcatcaggttgaacgggaggctctccctactaccaaacgcctaacatttccttgatactgccttgaaaaatcatgattatgacaaaaataataacgtcggagaatggagtgcttgttttctgctttgcaagtcaccaagcaagaaaacacttttgtctccttggcttttattttaggatctctgagcgaaagagagaaagagaattttaagaaatgtcattttcgctttgccaaagatcattgtgtcaataacgtttctctcccattcctccccctcctcccgttttaaaggaaaggttcacgggtccagccaggtttctgccgcatcccgacacctggagacgtctttcaggaccagcctgaatcgcgtccgggctgggctctggactcggactcgcagcggtgacagcggaggcggggacgggggtggacaaactgcggatcaactctccgagaagacggccacctgccggaacctgccttcctccattccgcccaggagcctcgcagcggggcgctggcctgcggaaaggccacgggggagcacagggctccgcgccgccctcctgggagggtccggagtccagcgcaccccgagccctggtgggtgagcccggcgggaggcgcggcaggtgcggcgggagactggaccccgacctaccttcacaaagagctcgatctcggggtccctgtcgtccccgttagctgtcgccgagtctgtcatgccgttggcgcccggggctaccgtcccgggccggggaggcgccacctctgcagcacctgggccagcactctgcgctcctgccgctgcccagcggggctcctcttcagggcggtgtttaatttttcacaaaaccatctattctccagcccgagcagcggggtctgagagatcagtgtcccagatgctcacatgaaaaggagcgaagccgggaggaggcggggggccacggggaaagccgggttaagggaatgacaacaggtcgtgggagcaacaagtgccgggctgcccggaggtgtcacaggatccgcgactgtcagcgatcccgccgccgccaacgcgcccaaaatagccggcggctgcagggcggggtcagccgggcggggacgcggcggggacaccccggcagctcgggcctgggccgggccacggccccccgccccaagaccccgcagggcaggaggcggagacagagctggtcctggcaaagccaccaaggccaagaggatgtcctgggggcggataatgaggcgaaggcagaaagagtcgaggagaaggggaaggggaagaggaaggggaaaggggaaggggaagaggaaggggaaaggggaaggggaagaggaaggggaaaggggaaggggaagaggaaggggaaaggggaaggggaagaggaaggggaaaggggaaggggaaggaagagaggagatggctctcaagtcttctgtttctttaataaagcgtcagctcctccgagttactccactaccagccttacccacttggaaagcccttcctgtcttagtgatgctcagaacccccaccaaaaggggcatttgccatccttgggctaagcaaaaggagagtagggtgctggggacgggcagggcagggcaggggtggctcctggggcagaggggtgagtcaacccggtcaggtgcggcttccatgcctttcagccttctgggtttgtttatttttcttctcccttctttcattttctttctatttcttcctttattttctgatcttacttcattcccgttctcttctggttgttttagtgaagtaggatgcaaacacagaaaagatgcacatatcttaggtgtatgcctcaatgaattttcacaatccaacccacccatgtaacgagcgccagatgaagaataaaatgttagccacagccctagaagctcctcctgctctctcctctccacatcttttctcccgtctccactgtcccagggtaaccattattctggcttgtagcagcataggatctttttgcctggaatgttggtgtctggcttctttcgctcattactatgtttgtgagattcatccattgtgctatgtgtagttgtgtatcatccattttcaccgacacacttacttattcattcttctgtcaatggacatttgtgcaggtgactatcatgactactctgtcacgaacattctctctatcaaacatcttttggttggattcacagacacttttctcttggatgtatacttaggagtggacttgctgagttgtagtgtataagaatgctctccttgtgtaaacactgccataggttttctaaagtggttgcaccaacagacattcccacccttcagttctttaaaaaataattattgaatgttttgcaccagaatctggtggaattctctttgtcttctttgccttctctttaattaatcctgtttgtgctatgtccttccttactaaaaacatgtatttgtttaatagctttattaaaaaatttatcgcttaataaaaaaataagtaataatacttattatgtgctaggcaaaaatgttgagcactttacatgtgtgaacttgtataatatttacaaatagtataatgatcccaattttacaagtggggaaactgagacatgaagtatttaagtaacttatccctagtcattcagctaggaaatggtgaagtcaggatttaaacccagacagacttgagcctgtcctctcaactgctctacaaactgcttttcttagtgcacactatggaagtgcacactttgaggaaacaaaggcatggttttaacggtcttaacagagatcaaaatccctttcagaataatagttacatgaaatgaaaactaaggctgccacatgaattgggaagatgaaggagctatacaagctgtcacgtaaagatactatttaccatggttggggtgaggagaggaaaaggcttcatggagcaaaaggcactttagctgaaccttcctgaaaggtcaggcatctgataggcaaagaaaagggaaagatgtcctcactaccctttatggcaggctgtgtccccacagactctcagtgcaaat

SEQ ID NO: 584975 - DNA, 4001 bp, Homo sapiens
tgacctagagaaccagtaggccagcctgtgttttcggggagtgcctctcccacctgcctccccaggggtgccgtgggccctggagaccccagctctgacctctgctctggctcatttgctcttactagcttgatctctctggggagcctctatttacccagccatgaaatggggataacaaatccccacccccacccatctcactggtcactcgggagggtcaagagagatgatgggatgggaaagtgctttgacacctgtcgacctccctctcgtctcctcaacattcagtgtccaggctgacccccctccctgatcccactcacaagtgttcagggccctactccccattctcccccacccacgccaagtcctcaggcacccaccttgacagagcactcgctgttctcgctggccatggatgtgcagcgggccaggcccagcgcacttgaatgctggcagcaattgctcttacactgggcactattcatgcagagctcaccgttctcctgccaggagcagccagtcagcccaggccccactccctcaggtcccttctccattcagacctgtacccaccacacactaccactaacagtgtctcccctggtagggatgtgtgtgaaggagtccatcccctgggtctggtggcctctgtgccccccacccacgtgagaagtgggcatgcggtgacagagaagcagacttgcacagagggtcaggacccctgggttctagtaccggctgtgctaccaacctcctgtgtgactctgggcaagtcactgcctcccaagcctcagtgttcccatttggaatgtgcacacaaggcccctagacaagttctccaaaccactctgggtcccacacctctttaaggaggcggtgaagattgcatctccctgcaagactccttcctcccccaacagatctgatctataatctccaagggtcctggacctccaagtccagccatggccccaagttaagagagttcagaacctttcaaccgcatggacgttctggaagggctttcccagccaagacccatggtggagaggtggtgtggggcagtggtggggccccagctgaaccactttccagctatgtgacctcaggcaggttgctcaccctctctctgtctgaagacagggctgactctgaaaacacctccctcagtggttattatgagaacagaatgagtaaacatctccgaggcatctccataagtcagaagctggaatgattggcgcaaagcattttctcaggatggaagcccagggctctggatttttacaaagctccctcgtagggccaggtgaggtggctcatgcctgtaatcccagcactttgggaggccgaggtgggcggatcacgaggtcaggagtttgagactagcctgggcaacatggtgaaaccctatttctactaaaaatacaaaaaatagctgagcgttatggcaggcacctgtaatcccagcttcttgggaggctgaggcaggagaatcatttgaacccgggaagcagagattgcagtgagccgagattgtgccactacactccagcctggtgacagagcaagactccgtttcaaaaagaaaaaaaagaaaaaaaaggtccctcatagccaggttgagctgctgctctgagcatgctccagttggagctggagaggggctgatcagcctttcctgtggcctctgggaagaggcataggacaggacatggaagtaaacagagggatgcaagatgccactcctcccagcccctgccagtccaggtggagacatcagaggtcaaggtccaagcttaggaagtcttcatctggggactcaggaggcgcctcccctgaagaccctcttaccaggttgataatgatcccccgggggccaggagctgcataggccacagagagggcgacaagcaggaggatcaggatcttctccatggtgagtgggacagctggtgtgggtggcgggagacagagccagctgtggtgatggggctataaaaggggccctgacctcacgagatccacctgcatcccacagggctggccgtgggcagaggcacagctgtggccaatctgctgtggggcggttcctgataaggaaactgggtgagtacctggtggcctttttcgtgtgtgtgtgtgtgtgtgtgtgtgtgtgtgtgtgtgtgttggtgataattgtgttgcatcgtggttaagagtatggactgtgtacaagttattagtgaggcaaacttactatctgttccaactattctgcctttcatcttatctgtcaactaaggataatttaaagagttgtgagggttgaattaatacacatttatgtgttacatatatataaacattattatatacaattataagaatatatttatattgtatattcccatatgccacataagcagtgggtaagggtggctgcccttgtgtcttgagctcctgggcagtgcctggacgaatccaaggcaagagaggcacctatggtgtgagtgcctgcttacattctgtgtacttggggcctctctgcctcactatagtcaggccttgcctttggcccacccaagcccaggtgtctagcagtgtcagactccagggacgaggatcctagcctcccacccctcaaccttccttcagtctcctcgggggattccaggccatgcccagatccctggggctgacagttctgcaacccccagcaggccagggtgtgtgtgctttcactttggcaccctccccctgccctcacaccaggggctgcctgcaggcctgactcaagggcccttaggaggcccttcctaaatgcctctctcccctttcctttctacctcacttactatctgcaattccagcatcagatactcacccctttagttaaggtttccactcacgctgccccctacccaaggccacgtgcgcgcgtgagcagtcgctagtcctggctgagaatgaagaggtctcatgagcctcagatggagcaggggcctcaggaagctgggaagggcacagctgcctgagtttgctcaggcatgggaacagagcagcttttcctgaaggactagtcatggcagccagaggcccctgcccttcccctctccatcccaggaggtagaagacagctccactgagaggcccaggcctcaagcacagcttttaatttaatttaatttaattttttgagacaaggtctcactctgtcacctaggccgaagtgcagttgtgccatcttggctcactgcagcctccacctcctgagatcaagcaatcttccccctaagcctcccaggtctaaaactcgtgggctcaagcaatcttcccacctcggcctcctaaagtgttgggattacaggtgtgagccactgtgcccagcctcaagcacagctttgatccagaccaagctggcttcaaaattcagcatttactggagctacgtggcctcagacacattattgaaagtgaagctccctgaacctcactttccttatttatcttagggggataacgcctcctacttcctgaggtcatgattaagacaatgcacgtggaacaccttcggaagtgcctggcacatggtgggtgcccagccatgtaatatgacccccttcctctcacctttacatccctggggtgtggaatgtagagaaatagctggaggaacaaccaggagactctcaaaatgagaaaaaccaatttggttccagcgatgcagaaataccattgatgaaagaacactatcccccctctcttttatagaactcaatgtttgaaagcactttttcctatgagttcactctgatccttccttctcttttctctacctgctccccacccccaggacctctgtgaggtgagccacagagaagggaatcactattcccttctcacaagtcaagatggagactggcaaaggaatcagaggagtgatttctctccatgaagggagctgtgaaaaccatcagccctgtccctagttggtctcagccaagcttgca

SEQ ID NO: 584976 - DNA, 4001 bp, Homo sapiens
gggggtctgcataggttcgaatccattgatttccatgtaaactcaagatctgagcacctagtaaggtgtgatttttaccacatatgttatatacataacaataagtaatatttatattatatatgtataatcctattatgtacgattatgtgctataaagaaaataaggcaggaaaggaggattggctatagccgcctcccggcctccctgcttccatccttgccagtgacctcccccaggtaccccctcaccatccccactctcacttccacctccccaacctcctcaagtcagttcttcccagaatagctagaggagtcttttttaaaagataattcccacaatgccattctctggattcaaagccatcactggggctctgaatccacacctggcctggccccagggcatttgcgcttgctggccctctgcccagagcaccctgtcctgcactctttgcccggctgcctccccctcctgcctcaggctgaagacttcctggacaccagcagagcagtccccatcacctggttgtactttgttcacaacacttatgactctctgaaatcatcttatttatatgtttaaaaataatttatttcccccgctagcaacctcagctctgggacatggatcttctgctctcacgttcactgctatatttcttagcccccttggactaaagtccttacacattgcaggtgctgaatgcataactgttgaataaatgagaatattgtaactgtgttccatttatctctctgagctcatctcccatgatttccactctctcttactcctctttgctattccttgaatatgccagcacatttccgcccccagacctttgccctggctgttccctccaccttgaatgctcttctcccagagacccccctgctttgccggttaggaaggacttccctccctttaggtctttgctaaaatttcacattcttagtaaactcttccctgagcaccccatttaaaactgcaaaccctggccaggtgcggtggcttacgcctgtaatcctagcactttgggaggccaaggcgggtggattgcttgaggtcaggagttcaagaccagcctgaccaatacggtgaaaccctgtctctactaaaaatacagaaaaaaaaattagctgggcgtggcagtgggtgcctgtaatctcagctactcgggaggctgaggcaggggaatcgcttgaactcaggaggctaagtttgcagtgagccgagattgccccactgcactccagcctgggtgacaaagcaagactctgtcccaaaaaaaagaaaaagaaaaagaaaaaaaaaaaaaacacctgcaaacccttctcacaccaccactcccacagctcgattcttattttccctttccttgcttatcacctgagatagatgctattattaatagcatctattgtaatgttttacttctttgcctcacacactagagtgacagctctacaagggcaaggatttttatctttcttgctcacagccctatcactaaatgtagaaaaataatttacatatagtaggtgctcaataaaaatgtgttgcatgagtgaatatctgtctcccttaccacatgtgcgcatgggcaggggggctctctcacattcacctctgtggcagcagcacctggcactgccctggcacagcttccaggaccaggttgttctctctttcctccgagacatcttccacccaacactccctgctgcccccacttctggccttctcccacactagcccccatgcccgctcacctccccaaatagtacaggccttaggacagtggagggggaggtgactgcactctccagctttcttaccaaaaggttgtattttgttggagaaagtgagcccctggtgaggaggaagagaaagaagaagagaaggaacagcagcagcagccattggggtagcatcatggcccacaggtcgtggtggcttttctagggtccagcgaaatatcctgcacgccgaccatgtgggtgtcctcccagctgtgggaacaccatgtaaaaccagcacccaaccccgtcagaattttcccatcctgcacaatactcaggctaggccaatcagcaaattccaccacaataattagttcaggcagactaagccaatccaatcagaaccgatcttaggatgtttgctgaaaattgtggaacagagatgttttctttctctgaaaggcacagtattgatgtacatggtggatttgtggttaagagcctggcctctggggcaggattgtctgggttcaagtctcagttccaacccttactttaggagcctcgataccctgtttgtaaaatagggataattataacacctactatagccctgttgtgacaaaaagatgagtcaatacagttaagaaagcactttgggccaggcgcagtggctcatgcttgtaatcccagcactttgggaggctgaggcaggaggatcacttgagcccaggagtttgagaccagccagggcaatacagtgaggccctgtctctattaaaaaaaaaaaaagaaaaagaaaaagaaaaaaaattggccgggcatggtgtcacacacctgtagtcccagttacttgggaggctgacgtgggaggatcttttgagcccagggggttgaggctgcagtacgctgcgatcgagccactgcactccagcctgggtgctgtcttaaattttttaattaaatgaaaaagaaagcactttgcacagtgtctggcacataggaagtgctcaataaatcctacctgttattaggtgacacctggaatgtttgtgactactgggaaggaattcagcctgagagctgctggctctggccctacctaagggttgcctgacctctggactttcatttcccatcaccagtaaatcccctcctcacctagaccaatttgagttggtttttaagatacttgcagcagaaagaggcctcactgctaccccaatgatatgacctagggcaagtcatgtcgcttctctgggcctcagtttctttgtccatgcagtgaaccgacaatacctgagagagcggaggcatccatgcaccaggtccctttcccaccacaggcatttctgcatttatactttgcacattctcaccaactctctaatgatctctacccttttgtgccccacaacccgccccgcaaaacattcagatacctccacctagtctctccctaccacacacccctccataggcaccccaacatacactctccaggtacattcctcaatcccgtctctcccacacagccctccaaccagagaatcagccctttcccagacccagcccctgctccaccacaccctccctgtgccattcccttcctgcagttctaccctgacctccggacagggccaaatcccattagaagctcattcatgcctccagtctccccttttgcctgccccctggactggtacaatctccaccaggtcccctcgcccagaaagtacagacagaggccaaggacaggaagtgactttaatgtctcaggagctggatttggagcaagttggtggcaaccagggcctatggccccaagggagcagtgaccagcctgcatcttcctctaaatcatatggcaccggcgggaacacatcaagtccttggatatgcacgtcaagcccatccggcaagggcagatgatgttggtagctcccttggtctgcagggagtgggtatgagaatcgggagtcaccaggatgcaggaaggatggggacttaaacttcttggggaccagaaccaagagtaccaggcctggagtaagacagacctgggctgtctctacagcttataactgcgtgaccttcagcaagtcaatgaacctctccagctcggtttcctcatctgtcaaatggggacagtaatagtaacccccctcatagggttgttgtgaggactaaatgagatagagcagatcaagtggtgataataaaaagaccctttaggccatgcgcggtggctc

SEQ ID NO: 584977 - DNA, 4001 bp, Homo sapiens
ccatgctggactgcacactctccttgccaggaccacataatcttcccaacagcctggtggggtaggtactttagcctctccttgtagatgaggaaactaaggctcagagagccatgatgacctgcttgaagtcacaaagatagggtgtggaaaagtcaggatttaaactcaggtccaactgcaaagctgtggtcctgccactgcagtgccatgctcctctcaagaaatcatgtcactgtggcagggagatggggactagtaaggggaaggtcatttcctacttaccctgcctcagtggtgtgagagaagagatattcattcattcaacaagcatttattggccgggcacggtggctcatgcctataatcccagcaccttgggaggccgagccaggtggatcacctgaggtcaggagttcaagaccggcttggccaacatggcaaaaccccatctctaccaaagatacgaaaattagccaggcatagcggtgcacccctgtaatcccagctactcgggaggctgaggcccaagaatcgcttgaacccaggaggcagaggttgcagtgagccgagatcatgccattgcactctagcctgggtgacagagcgagactccatctcgaaacaaacaaacaaacaacaataagcatttattgagcacctactatgtgcagatactaagctgggggtaggtgcttcatagatgaatatgatgcgatccctgcccttgaagagttccaaccactgggagaggcagagaaaagacatggccagttagggagatacatggtctgctgagggtctgaccccagggtacaggagctccaaggagggaagccttctcagaggaggtggctggagttgttttgcaccatgagtaggagtttgccaagtggagaagaagaagggcactccagacagaggtgaaaaaacaggtggggccaggtgttttttttttaacctccctgcccgcttctctacttgccagaagttgccccatactagggcctcacctggggcaagcagatcatggttattctggccctgggggcacagaaggctccaccggagtccaagtccatgaggcagcagccactgtagcactcagagtggtggaagcacctgtctgtgattttctgtggggacaggcagaatgtctgccaggctgggagcaatccctgagtcgtgtgggcgggtaggggagggttcccaccattgccaaagagcccagggatccaggagaagtcatgaggttgtcaccccttggggggctggttccccccccagccccaccccggcccctcagcaggacccagggcagcagagaggaggagagggggattagcacttttccctcggcctctcctttcctggacccccctcacctccatgagtcccatggggtgtgtactcttaagtcccattttgcggggcagggttgggggatgagaatgaaggggctgcgggctcgaaaaagagggagagaaagaggagaaaaggggagagccctcgtgcctggaagaatcactagacagtgagaggaggtggaagaagaggaggagaaaccagagcatgcagggtgggtttgcctgtgagcagtttggggagggaagcgagcccaggactgaggccatcggaaggggcacgggcgggggaggtggagggagcgagggtgctggtcataggccaatttctctcccctctgaggccaccaggggaaagtgaagcggcttttgaagtccgtctgaggatgccccaggctacccgcctgggtgtggttccggacccacctctccctttcaggctgcccggcgccttcgggctccagtgccccggcggcggggccaccctctcctgcggtcgcggccggctgggcgcgctccccggctcacctttttatattgcggaagcgcgctccagaggggcagcaccgcccccgacaggacccccgccacgagcgccagggctgcggccatgggcctgggcggcagagcagcggcggggttccgaggggccgcgggataaaacctcttccccggccacgtgacccggcgccccaggccaccccggcggaggagggacgtggagggcgaggacgcctgcggaagggaaggagggaggaaaggcgctcaggctcgcacgggcgggattccagactgtaggggccctgggagcctccatacgtgttacttccaagtagaagcttgaaactgtaagataaaactctatttttattgtaagataaaactctattttattgtatttatttattttacagacggagtctcgcactgtcgcccagtgcagtggcgtgatctcggctcactgccatctccgcctcccaggttcaagtgatcctcctgcctcagcctcccgagtagctgggactacaggtgtgcgccaccacgccgggataattttaaaaatttctgtagagacgggggtctccccatgtcgcccaggctggtctctaactcctggcctcaagtgatggtcctgcttcagcctcccaaagtgctgggattacaggtgtgagccaccgcacctggcctcaaaactttatttttataaacggcacaaaacatatatgctgaaataaaaagagcttccttcctgatgttgattctctgtctgcccttgcagccccagattctccccttaccttcgggataatccagccccaccctctgggctgctcacacccgctgcaggccccattctcctcttctgtaagaaccaggaggtgggacaagatggtctctaagtcttaaatctcttgcagtcttaatcattctattaattgtctaaggatttgtctgtgaattgtgtgaaagtcaagatgtgggggcaaaatggagaagtgggaagagaagaaaactcagaatagggaggagggttaagggagagctagagctgcacagagcaatcctggaaccgggggaggcaggccttcctcaggacttccctatggatgaagcttccacctcaccccacctgcctgcttctgcttttttttaatttctatttttttttaattttgtattgttaatatttgttatagagacaggttgtccttatgttgtccaggctggtcttgaactcatgggctcaagagattctcctgcctcggcctcccaaagtggtgggattacagacgtgagccaccactcccagcctgcttctgcttttgaagtttcgcttaagaaatgaaccgaggaatcctgtcttggtggggaataacagccaagaataacagcccccaccgcactcagagggccttgtatccattatttccgtgagccctccctgtattaacactagctgtcacagagtaattaacactggctgtaacaacagaactcctggaatttcgtggcttggcacaataatgctttatgtacagtctgatttggggcaagatacccttcttccatcctgtagccatctataagactggcctctggctgggcatggtggctcatgcatgtattcacagcacttcgggaggccaaggagagaggatcagttgttttgggggtttttttggttttttttttttttttttttttttttttttttgagacagagtctcacgctattgcccaggctgaagtgcaatggcacaatctcggctcactgcaacctccgcaaagtgctgggattaccagtgggagtcaccatgcccggctgagaggatctcgtgagctcaggagttcaaggccagccctgggcaatatagtgagacctcattgctacaaaaaaaatttaagaaattagccagacatggtggcacatgcatgtagtcctggctactcgggaggctgaagctgcagtgagttatgatcgtgccactgcactccagcatgggcaacagagtgagaccctgtctcaaaaaaaaaaaaaaaaactagcatccaaggtctccatggaagacctgccttctccactcacaaaccacctgctggaactagtcacatgatcccaaccctctaaccttctgc

SEQ ID NO: 584978 - DNA, 4001 bp, Homo sapiens
tgatgaaacttcctagcccgcaagaagcgtaagatgaaggcatcatccgtgcgcagaaagccaatgtccggcctggtgatgaccatatccctcacctcctggatgtcctggtgcagcgtgtctgggttttcattgagctccaggcgagctttctccagggtctcaggggagagaccggcttgcaaatgagtcattgttctgcctatctctgagctttccctcagaagaccttgttgactgtcccaaagcaaacctggtccttgccaccaccagactccagcccccagacctcctgctgcctgcttcctctcccctacaggaaattaataatcttggtgtccaatcaagtgccctgttgctcctgctttcccccagcaaagctgggggggccggggggtgtaaacttcttcctctgccccctaaaatacaacaccctactttggctccctctttcctttcctttaaagagatgtgaacccctgaagggctccgcactcctcttcttgtcctttctctttcctaacaaatcacccctaattccacctagcacgggtgtttctgatcttggtactgtcctcttctcttctcttccaagatgtaacaaaaacaacccccacgcacatctcagcccctgcactgtgaatgttcctgcggtccctgctgaaggatacgcctgccaggggtggcgatggaaattctgattaataataaggtagctcttcagcgctgagctccagggcggagagagatcatctttgccagaaagaaaaagagacagagagaaagaggggggagaaaggagattatttctccctgtacttattcaaagacgctatttttaaaagacaaatttgtgtgatttatttaagattattgtgatccaattaggtgaagactctgcagatagcgcaccttcccaccacccctctgagatacaccgtgatctcataaggcaccagcaggggttctggtggcgttggtaccagcgtgggctcccccaaccccacccccaacttctgccttcctctagcccttcatttccacggacttgccgcggggttggagaaaaggggggagggggagggaggggaccggggatatctctgggaatgcacatttcaaaaacgaagagaaggggaggacgttgtgaagaataaaataaaaatgtccttatcttttctataaaaccccaaagcaagaaagaagaaagagcagccgctcctaccagcaaacccagaggcggggtcgctaagcaatgcggcactccctggcatccatcagccgcggcttcagcagcggcggcggcggcgacagcggcatcaactcctctgggcgggatggaaggagcagagaagaggggtggcggcggggacccgggccgaagatgcgctcgggagcagccgcggccacatcgtccgcgggcagcccgcagcctctcctagcaggaggggtgaggatcgcagggctagggccaccgctgtcccaggttctcgcctggccctgccattttcgccttcgggagagaaggtggggaggaggacgcgaacgcctggatggagaaggccactcgggcggccaccgcctttgtgagccctccgggagcagccggggaggtgggcgcagcggggcggctgctgcgcggcgctggcctctcctggggctctcccgagcggtccgagtcagggttgccccaccgggctgcggcggcggctccggctgctgctgctgaaagaggactcggctcagcccaactcctctctaattatcccagcacagatctcgctgcgacgtaagcactcactcagctcgcgcgcgcgctccgctcctttccctgcctcgttggggtaggacggcaatttgggtggcatcgaaatatcccgagccctaagtttaggctgctcttcgtccccactcctcagcaggctgctgagcgggcgtcgccgggccaggcggggcaaccatgctttccagcctccccacgcccctctcttcgccctttgtgtgcaagaccccagatcagcctggagagtagctgttgtagacggtaattcacattgacacgcattttctcgttcctgtaggaggcaattttgatgtagaaggagtacggaaacattctgtacttttcgcatttgttgtagacagagatatttaatttagaaaacaccagagtggttccaagacaatgtactgatgattaagcctccggaggaacttatatgaatagtttttcaaccagtctccctgctaaatttctgttgaagaggatgaaaatgagcactagggtaaatgataataaaaacataattctcaaaggaagaaaaaaataggaacttcactcatatctcatcataaagcaaatatttctggaaacacataccatccttccttcagttgtatgcatctgtatatgagaatcattataaataaacagaagtccttgcgcttaatatgactatctatggatttgaggaaaagggatattttctattttcaaaacacagcacatattactgagcgtgttactaagagcaacttttgactttataaactgtagaatggggtcttgaattgaagttaattcaatgcaactaatatttactgagttccacgaggtgtggggcatttttctgcattctgtgtataggaggtggtcttgaagataagcaaattttgtcattttcttatcttgacatttcttatcttgtcattttcaatgttgatgactatgagaaccctcaaaatacaggcacacttgtttttgctcttctcatggcgatggtgttgataaaaagaaagaaggaaaagggttgtatggtagagctagagcatttattaattaaattaatgcaaattaatgtaggaacccgaataagacaataaattacacacacacacacacacacacacacagtcattattgtcaaggaatttatgttttaaatggggaaggcagaaaataaaccacttaagtgtgtgtatatgtgtgttatatatatgcactatatataaggtccttctaggattttaagtgattatgactttctcaagcatgctgaatgcaatgtgaactgttaaatttttggttctcattttaaaacatttgaaaaaatcattttttctaatattttagaggttgaagaaaatttatgtttcgtatcaactgtatgaagaagttttagtcatcaccaacatggagagacaattctccctggatccgttgtgtttctacctgtcttatgaccaaggcactaattgcccttttttctagactgtcttctcaagggtatttgtacagtaaatagtcttggaagatattggaagatagagatagtacctccatctgaaacaaagccttgaaagctgtgatatctctctcctgaccaaaaggtaggcaagcttatttgaattccctaaactcagagctattctgctgtaatgccacccattgtttatgccagtatcacttgatcctcttttcttagctatctgtgggaattagagctcaggggaccagtcaatgcaagatatgcagatgctcatactgcccgctatgcctgagtgacaaaatcctttatctcgaagccaagagttttgcatcttccatcggcatccatgaaactacagccagctaacttgttagcctgtaagtgaagttaaaattcagatctttcaccttgatgaaaaaacagttgtttaattttgttctctgagatggacatattagactatatttttaagggaatttataaaataaaatgtattttttggcccagcatatgttatgaccagtattgaaggttgaaggatgacatttttattatttattatttaccaataacagaattgcttcaaatagatttattttaacatatctacatatgatagaaatagtctctatcacccagtaggattgttggagcaggtcagttaggtatatataagatttttaaatcatatttacaaaactttagtgattatactgttattctctctctact

SEQ ID NO: 584979 - DNA, 4001 bp, Homo sapiens
aaatactggttttggtttacttcataatgtttgaaaacatgaaagaattgggaaagtttttaagcagagtagggaatggaagcagtgaaatgacttaagaccgaggaaacacaagagcgggaaagttattgggactggaggtagctataccacagaactcagttacgaaaacaacaattttaaggacagaaatccacctccacaaaaaagagtggaaaccagctgggcgcggtggctcacgcctgtaatcccagcactttgggagaaagaggtgggcggatcacctgaggtcaggagttcaagaccagcctggccaacatggtgaaaccccatctctagtaaaaaaaacacaaaaattagccgggtggtggcacatgcctgtagtcccagctactcaggagaaccgcttgaattgctgaggcggaggttgcagtgagccgagatcacaccactgcactccaccctgggcgacagagcaagactccgtctcaaaaaaacaaaaaagaaagaaacaggcaccatgccaccatcaatcatccatccccatggttaggtacatgagagataagcacgagaaaaaaataagatggaatgaagtgattatgaaaccctgaaatcttaacgaattatcaagttaaagagcaagcaagagaagtagtgaatacagtgtggcttacacacaactgattggctgtagagaactcagaaaagaggactcaatacagggtgggcgacaagctgggaaacaatccttagggaaggcgaggtacagcaagaaagtattgaaacccaaaagtgtcactgatgctcccaacctcgtaaaaccctggatcacatgtttcagttctctccaactcaaggaagagccaatcaacccaatgcacaaccgccaccttcctgagaaagcagcctcttactagatacaggcaggggctgtcccagggaagaaccggagacactgagcaaacagaaagcaagaccaagctaagccacatttcactttaagccgtagtcttaaatacccccaaaaggcccccagggtgagataaaggaaggctcatcacagagcttgcttctagccattgcaagcgctaaaagcttttaattcttaagtgactcggggggagactggaagtacagcaaactcaaagcggactgttgaacagctgtgtgaaaggcaggagaggcggatgctcctccccaaaccacatcaccttagatttgggccttccaaatcatctcatccaaccctatcatcttccacgggaaaagactgcggccacagaggtgaaggccacacagctaaccagtgccctgctcaagtgacccacacatgccagcagaatgctctggcagggaacttctaagcggaaggcaagcggcctggttctacctgctgcttccgcacagaaggggttcaaatcccctctgcagtcttctctccctgggcctcggtttggcactgccacccctaatcacagagagaagagataagctcccatgtctcccggccagtcccttcatttgaagataacatgagcgtgtgaatgtgtgcgcagagacgtgtgtcagcggcagctcgggctccagggagccggcgttgggggtgggaggaggagggaagacataaggggccagaaggcgaggagacccataaccgcgggcggggggcccaggcggcggtggaggggagaaggatgctgagcccgcgcgcccgcccgcttgctccccccgggccgcgcgtcggcactcacgctgaggggagagagcgagctgccggggagcggagggggggtcaggccgacactgtcgccgccgctgccagagccgccgcctcctccctcagtttcgtttccccacaagccagcccgggtccgccagccgcaccgtcgcgctcgggtccagtactgcgggcagcgcagcctgatgacgtcacggacagcgccgcgcctcggtcctcccccggccgggtcccggccccgggaaaggcagctgaggtttggcccgctccacctctcaacctgggaggtccaggggcgcctgcgcggaaaagccgcccggaaaaggctgcaaaagcaaaagtaactatctcctcctttggctctgaggaagagaaaccaatacaaaaattgtaagtgctaggtgccctcacacgacctcatcttacttaatcttatcattatcttcattttacagactaagaacaagttcagagaggtagatggtaaactggttgagcgaacgcagtgttcttgttccctgctgtatccccaacatccagcctatgggacatctcaacagattttgaacgaaggacgggaggacagaaggaatgccgcctgtagcatcttaccatatgggcacagttggctctccatctcaaacctctcttctgattttcaggccaatatggccaaacgtctgttggacatcctcactcagtcacctcaaaccccatgaattcaaatttcaccttatgttcttccatcagctcacttttttcctggtgaagggcgctgccatccatcctgttggtccagctagaaatctgaggaatctccctcttcttcataccccaaagtttctcatacacttaattgcgcttacctcctaattgtctttcaaatccatccattcacccccatccccattgccacaattcatgcacttaccccctctcggcagaatttctccagtaactccaaactcccgtgactgtctccagttgtgatccctctaatgcgttcttcacaaaaccaaagtgatttttataattttcaacacctgtgaaaagaagggaatttaaaattgattaattaaacctgatcctgtcacaacccaacaatgattaaaatccatcaatgatgtcccattgctcttagaataaagctaatgtccttaaaatggcctctgagaccctccagcatgaccccttcttcaggtatgccttgtactgctatcccttagttctccccatgctgactcttctcagtttatcaaatatgccgtgtctccgccgggcgcggtggctcacacctgtaatcccagcacgtggggaggctgaggcggatggatcacctgaggtcaggagttcgagaccagcctggccaacatggtgaaatcccgtctctactgaagatacaaaaaaagtagctgggtgtggtggtgcgcacctatagtcccagctactcagtagggtaagtcaggaaaatcgcttgaacctgggaagcagaggttgcagtgagcagagattgcaccactgcactccagcctgggcgacagagccagactccatctcaaaaacagaacacaacaaaacaaaacatgccatgtctcttaagagttcagccccctgcctggatcatgcttctcctctttgctgggctaatgtccatttatccctcaggagtcactttagtgtccctatctcgaaatatttcctgatgtcacaaatctaggttgggagacccacctctgagctcctaaagcactctgtccttccactatcaaagcacttaccacggtgttgtataatggcctgtggactcatctgcctccccgactcagctgtaaactctgtacaggaaagattgtctgtctgtattaaattcacaagatttaacagaggctggtggtcagtgctcaatagatatttactgaatctgtggaagtgtggaatatgaatgaaggttgagtgatatgttcaagattacagagctaggaagcagcaaacaggtatttacctagttctctatgttctaaagtttagtgtccttctttccacctcactgaggcttcttagcatgcattatgacatgaacacttttggtaatcttgtagagcttatggacccattctcaaaataataatttgaagggtataaaataaggtataggaaatgagttatattgaaaaagttaacatatttagcaaatttaatgatttaatttttatgtaaagcattaaataatgagagaatgcattcaaaatatagtcaagtt

SEQ ID NO: 584980 - DNA, 4001 bp, Homo sapiens
gcttttaagctcatgcttcctaccaagtactggcaatgccacttactctttaccaagggaaacctagtcaccaaggcagaaacatgtgttgtttttagcttcattttatataggagtccaggaaattctgctcacttgacaaacccgttctcaaggagttctcccagaggagcaggaaatggtcagacatacccactgacacaccccacacacctcggacatcctattccacgtggtctatgtgtaagtcacaggcgtgagaaatgagatgtagcggtgatcagttttcattatgctgcagccatgggtgggacggtttgaaagacgacctggtcttaccagtattacctacctcacaggcttactgtgatgaccaaggacaataacagagagagctcttagcaaactgtaaagcgctacacaattctagttattactgagaaagaacaccattcctcacctggaagagcagatagaaaaacaaatagtaacttgaaacagagatgtcgttgggggtggggggaaaccatgaaaatacagattgttcttggtggactttgttctcttgaaagtacagaaaagggttgagtaaactctagtacctttccctcgaaatcgtaggagacattgaaaagtaagcgagccagctaggaggacaagcttctacctctgctcattccccccaccacccccccaccgccccagccccactgccttcctcatcccaaatattgtatgaatcaagacagtggttccaaacaattatatttctccttcccagtgcttacatgtggcctgaaaatgcagcgccaccggggatactggcgcctcccggagcaaaagtcactgcctcccggggagtcctggctcgaggtttctccctggcgcaaatgctatggtgttggcttttgcgcggccctctcgccttctccaacaaaaacagacaggctcggcggacccgccggagtctccctctacctgtccgacagccctgtcacgcctgcggacggctctgggcaggcggcatggacgaggtcccgcgggagtcacccacacaaaggcaccttgtgcctctgcactcgggcccccgggtcgccgggcaccgcaccggggccaggcagggagagcgccccccggcccgagtgccgagtcccgagatcggcatccccagccctcaaccgccacagaaaggccacccctactccctggtttaaagatagggctcccctcggcttgccacaatccgcaccctggaaaggaagagctcggagcaggtacgagagataggagcgcacaggccactcggcagaagtttgcattgtcaccgggctgtgccctcaccgcttctcgccgggaggaagggccaagtaccctcttccccagctcctcgtccgccccatccccgaggctggaggactccggacccccccaaggcccgcgcacctctagtccagtccaccacttgtttggggctccacttggtcacgggttccatggtaaaccgcttcgcctctcgctgggctggagagtcgcagataaagtgctgctgcctgcgctccggtgccccttcccgggagggcgcgcccgcggctgctcccctgcgcccgagcgactccgtcaagactgcatggccgcggtcagccagtcgtcccagcgcggctccgccaggggagcccggccctctccctccagctgccacagtccagctgcagctcctccttcccccgccgccgccgggatcccgggcacagctgctgctcccgagcgacggcagctgcaggcacgccgggctgcgaccccagacccctggcctcggctcggcacgggagcctcccggcccgcgaccacttcctcggatctctcgaggcgcgatcggctctccctcggccggtcttctcgcctgctggctctccggggtccccgctccgcgtgcgctggcgtcccggagccttcccggcgcaggtcccacctcctgcgccgccctcccgtgccgccctggcagggccgagcgcagagcgtgcgcgctcgggttgcaaagtttcagctccggttgctgcaaaccgaataaaagagagggcggggccgagggtctagggaaactcgtgggagggggcgggtccgcccgaagcggcggactcgggttactttccctctctaagccggtccggctcacacccgcagcgtcccgggccccgctttccttttcaaggggcgggttgtagatcgcgcgcgcaccctggagagcccgctggtttgtgtgaggccctggccctgtgggtagcagaacactctgtctcgctgtgagcaacaatacactaaaaaaaaaagaaaagaaaaaaaaaagtaagatctgcatgttctgttcattttaaatgctttatatcgtaatactactctgccattaagccgtcattttaggtttcttaaagtagaacaatttttttttttagatggagcctcgctctgtcgcccaggctggagtgcagtggcgcgatctcagctcactgcagcctctgcctcccaggttccagcgattctcccgcctcagcctccggagtagctgggattacaggcgtctgccactacgcccggctaatttttgtatttttagtagagacagggtttcaccatgttggccagactggtctcgaaatcctgaactcaggtgatccgccagcctcggcctcccgaagtgctaggattacaggcctgagccaccgcgccaggccagaacaattttatttcatttatatgttgactgaaatcgtaacaatgtaactcttttaatgctattgctatgaaatttcaactttgcgactaaaattagattgatggcttttagcgttatattttgctatattataatttcatatttacagagtgagctaatgctccttgggattagtcattaaccgtgagaggaaagctgttagccaagaaaaaaaaaatagctcgtgcacaatttcagcgcctggcaggggagggcccttccacattcatggactgcaactggggccagagttaatgctaaactgggggaaaatctaatttgaatgcctgcctctccttcaagttctccctgcatcctaaccgcccccccaacccctgccaccctcgccaccacccctcccctcaccccccaacaccccccccaaccccccacccccgccccgccccgcccagcaacctcttcctcccactctttttggcactgaatgattcttactttcaattacggttatttatttacatcttcctcttggagactattaaccccttgagggcagaacctacttgatctcatatagagttttctctcctccctttcttcctaccacctaacttgtagcacccagcacgggaccaaaggcaaggttggtatttattcattcagtaaatatccgggaatgcttcctatgtgccagccactgtattcattcagtatttgttgaattcgtgtgatatgtgctacttacacaggtctgtttggacgcacatgtggaaaaatagctagcagccagcctagcatctgatgagctggagcatccaagcaaaagaaacatttttaaaaagcaaaacatcagacccacctcccattcaactcccctagaggactgggcaacacagagacacacaactatcaaatatagtgattctttttcttcatctagcgaaagtgactggcagaccacacaagttggcaaaggcaatgacaaaattcctgatatagtagttgtccttaaaaaaaaaaaaagacctttaaacttaatgacatccagcattaaccatctttacagcagtcagcagagagaaggaccttgacactggttcactggaaagggtaaccaacctgatgcacaccttttgtttcagcaatcactgcctgttgtgtgatttctgattatgattagggtgaccacataacttacctccaaatcaaaatattcttgagcatgaaagaagcaactatcaagaattacattggaataacatgaataaac

SEQ ID NO: 584981 - DNA, 4001 bp, Homo sapiens
aggtcaggagttcaagaccagcctgaccaatatgatgaaatcccatctctactaaaaacacaaaaattagctgggcatggtggcatgcgcctgtaatcccagctactcaggaggctgagacaggaaaatcgtttgaacctaggaggcagaggttgcaataagccgagatctcgccactgcactccagcctgggcaacagagccagacagtctcataaaaaaaaaaaaggaaaaaaagaaaagaatgtacgggggaaggcacaggcttgaactcatactgggtgccctaccagtgaagtcggcttatctctaaagcatccttttaatctctctaatggaaggattatgtgtccgaaacttaccccaaacccactttccagtgtttagggaacatctggcctgatgtaggctttcaattcagatgagagattcacagccaactttctgggggccctggggttacggggctaggaaggcaggcatgactgtaaggtctgaggagaaaactaagggacggagttgaggaaaaagaaataggtcctttatagtcctggctcgctggtagctccctctctctctctctctgtagttcctcaacgcctatgtctttgggactcaccttttctccaaagtcctaaaatcttctttcaagttccccataggctctattgttcccccaaagggctcctcagatccagatcctcctcctcacacacacccacagtctcccatttaatcatctgtattctcaaaacatttattgagtgcctaccagacactgtgtgaatacgtatctaagacaaaaattcctgccttcgaggagttgttagtgggtgcaacagacaactacacagattgggttgcagtgagggcaaaaggggaaagtcttaggtttttttcccccaagatgagtcatctggagcttttcagttcctcaaactcgttcttagcttctcagccggcaggcctctgcctctgtagtttcctgagtgggcccctctctttccacttctcttcatccggctaactcctaatgcctcttcgtgcttcctgtatgaagccctctttgactcccctctgcacacagccttcgcccaccccctcccccactccaggctagaccagatgctcctcgtccggcccccaaaaggaagctctgtacctcccctatcatggcatctactactctgaattatcattgcttgtttctaccaatgtgtgaactccaggggtaccgggaccagatctctcgtccgccgcagcgtcccggcgcaagcctgttcaaggaaggaagacaccctgcagagctcggaaccttgcaacccccgacgctgctccgcaagcaccaccgctggagccagcccctccggcaggatacgccccacgggccccgcctcctcaccttcgcatttgctgggcaggcgaacccagtcgttctcctcagctccggcctggctcgggcccagctccggggccggcagcagcagcagcagcagcagcagcaagggaagaagcagaagacagcgggacgcgggctcaggcattgaatccatggcccggccgggcccggaccctaaaggaccgggcggttcctcctcccgcggcgcgcgcggagcagtttcccctcgccgcttccgggactgcacacgtgcctccgagcaaccacgacaacagctagcctcccgcccgccctcctctcgcagccgcagcccgccttcaaagcggaccaaggcccgcggacggcgcagccaataggctttctggggtttgctctctagctaatgggaagactatctttttacgcccttggccagtaagagagcagatggtggcctcagcgacctatggcaaagtcctttcccaccccctaacggaggctctgggagagagaggatgcaggaccaagacccgagaagaagcctgcgtctgggcctgggtgggacggattcaggcgcgcaggtgctggaagatgtggggaaggccgtcttcgcggctttctccgcctcctcgaacgtcacttccctcctggggtcctaatgccgcaagtccttactgaacatctgtttttaaattttattattggtattgtggttgttatagccgggcactcttgtaggcgcttaaggtgcaagcaggacgactcaaactgtccccagccttcacacttttttagtagccagtagatttgtcctagtgagaactagaacaaatgacttcctctctgagcctgtttctatttgtatgacgacaaagtgatcctcctagctgctgtgggagcttgcctgttgttgggaagctcaaataggttaatagaattaaagcttatcgagcagattgtaaaaagttcaggcattaattttctttttgtatgtaatcccagccccttttactgccctattatttatttcttgattctgagctctcagaaggcagaaatttagccgattaacgattgtctctcccttccgcttccccagcaacaacagggtgcctggcacaaggagatactcagtaaaactctcatctgctgtgtcattaaggggaacacttaatggctcacgcctgtaatcccagcactttgggaggccgaggcggaaggatcacctgagcccaggagttggagaccagcctgggcaacagattgagaccctgtctcaacaaagaagaagaagaagaaaaaggccaggcgccgtggctaatgtctgtaatcccagcactttgggaggccaagaagggagaactgcttgaggccaggagttcgagaccagcctggtcaacatagcgagacaccccccccatctcaaaaataaataaatcaaaataaaaaataaagaggaggccgggcttggtggctcacgcctataattccagcactttggaaggccgaggtaggtggatcacgaggtcaggagttcaagaccagcctggccaagatgctgaaaccccatctctactaaagatacaaaaagttagccgggcgtggtggcacacgcctgtaatcccagctactcgggaggtggaggcaggagaattgcttgaacctgggagatggaggttgcagtgagccgagatcacgccattgcactccagcctgggcgacagggcaagactccatctcaaaaataataaatgccgggcgcgatggttcatgcctgtatttccagcactttgggaggccaaggcgggcagatcacaaggtcaggaattcgagaccagcctggccaatatggtgaaaccctgtctctactaaaaatacaaaaaaaaatagccgtggtggtgggtgcctgtagtcccagctacttgggaggctgaggcgggagaattgcttgaaccctggaggtggaggttgcagtgagccgagatcgcgccactgcactccagcctggcgacagagcgagactccgtctcaaaaaataaaaataaacaaataaaaataaagaggagcactcttggtcttctttaggctgcccctgaactcagtgtcctacagacgcacacagaccaaagttgcttctctgggaagttgtctgcaaattggccataaaaccctgttccctgataccttcttgtttccttcctagaggttggatatttatgctattttatgaagacttcagagcactgaggcccaggccttgccactttctgactttagtttcttgtccaaaactgtgttggtaacaaagcactttggataggcaggggctgtggcatgtggaattccacagtgtacaagatcaggacaccctcctaaggtcctccatgttttctaggcttgataagacttaggttggctcaagctgggcacagtggctcacacttataattccagcacttcgggaggccaaggcaggcggatcacttgaggtcagaagttcaagaccagcctggccaatgtggtgaaaccctgtctctaccaaaaaatacaaaaatgagccaggcatggtggcgtgtgcctgtagtcccagctacttgagaggctgaggtgggagaattgctgga

SEQ ID NO: 584982 - DNA, 4001 bp, Homo sapiens
taacattctttttacatacatatattaatgttattaaaattcaggggcatgaatatctaatttgctttcctaacaacgagtatgcaagcacagtaattttatttgtgaaaggccagaattgggtatttccaccttgtggcatcattgtacccccatggacactgagaaacacaatgagacctctccccatcagacacttgatacatacctcagccaagagcgctcctcgcctggagtgggagacatctttgaaacaaaaagagtcggtttacagtaagttctcctgataagctaaaatggattagttttttaaaaccatgtcccacatcaagtctcttgccccactatggtaactgccattgtgcctacaaataagtgcctgtagtatgcaatgtttaaaattctggaggtgcatgtcttctgctcatgtatggatataatctgaaagtaatttgtctcacttaagaaactataaatggccttttatttttataaaattgctcttaactgagttagagagcgggggagggggaggagtaccagggaaaaaaaggacagagaaaaatcaattagtgtatcttcccttgcaaactgtcagtagggtaggattagaaaagcaacactttaaatcacataaagtcctatgggaaccttaaaggttggttgctctgagcttctcaatattctgcaaaatagattgatgtcagtggtgaccccactaatactcagtgtccgctaagcttcctctaagaaattgcatttcccccattgttcaaaagatattaacttggtaataaaaatgaggagaagttatgggacccacagagatatctttcaacacctttaaaaccagtaaatctgttctaatctcttattggattacatgcccgaggaggcttactatatcaggaaatcaacaacaaaggcaagaatagcacttatttggaggaaaataaaaaaagatgggaggcaaaatgattaatacgttactaaacatttcttttgtttttttatctgttcaattttaaatatctgagagacaatctattaaaatcagaaacatgcatgttgcttttaaacttccaaatgaccaaatgacagtttctcatgtctattacagcaaacatatttttatttgagaggtgatccgtttatgatttgtaagccttaacaagaaatgtcttttaaaaatgcaacattaactttagtcatctaacagctagttctgagttaaacggttccatcaacattcaattttaggtattagttacatggacatttgtttttcctcaaagagaagtggttcctgtagctttttatcaaaagtttattatttgacatacatctctttatatgacatttactattttacattagtcagtttctaggcttgcagcagagatcgatgtatttccctgggaagacttagctgctaacatggtttataggcattcagcaccaactcaagcgcccgtttttcaaacatgcacaattacccattttctacaaacagacatcagtgcatacagagccaggtgcacacacattcaataaatagtaaatggtagaaatctccagaagtagaacagatcacagttaacaggctggggccatacagctaagtaaacaccgacgcacgattcgctcacacggaataagaactccacgaaggacacttggggaccacactggtcgtacccgagggggcgggaggcggaaaaagtatttccaaacgcaactctgccaggtcttacccttcgcatcccctggtcctcgggacagaagctcccttggcacctctcgcccagctcaggggctggttgtccgctagaacgaaatatcccccactgactacggagagctctgcagggagccgaggcccccgcccgggccaagggaaggcgctggcgccgcgggagacaagaagaggcggaggcggaaaagaagtggagaaggaaggggtggcagagggagtagcgtgcgggaggcggcgccggcgccgggctgctggcgaggcggggtggggtggagtggggtgtgcctccggcgggcggtcagcaagtcagtccgtccgagcgccggcgtcccggtctccagcgcccgcccgcgacagcgaccgggactggcgccccgctgctccgaccgccggcgagcctcgccccttcccaggctcttcactgggtcctcccgcgagccccgcctggcccggcgtggggccgcccgtctccgccagcccgggcgcccgtcgcctcgtcccgctcgcgcagtccctgccgctccctccgctcgcgctgtctctggctccctctcgctccagtcccatttatgaagcgcggtcccatcacgtgttaatgagcctttgtcctgccctggcagcggcggcggcacagaccccgccgagggaactgcgcggggagggacctgagcgcagcgcccgtagccccaaactttgcttggggcgggggacccgccgcggcgccagccctggggccagaggggacaagcctcttcggcccgcgtcacctacttctcctcttcctcctcctcctccgccgccgcgctcccggaggcccccgctgccatgacctcgctgtgctcccggataccctcacaccctgaccaggccaagaaggggctggtgcatgcgccgcccacgacctcggggccattaatcacacgctcccgggcagcgcgcatcgccaacaccttccgcgggggtcacgtctggggcagcgggctgagccggaaggggaaggggagcgggagcccagaggccgaggcgcgccgggcccgggggtgcggtctcgcgccccctccctccgcgcaaggccgctcccgtggcaggcggcagcgagctgggcccggggccgggctgagctttgggaccgcgctgcgcagcccccgagccgttcgctacctggctgcggtcgcgcggccacctgtcctccgccctcggggcgccgcccagcttcgcgccaggcgccttctccagcgcccgccgccctttcccggcgagaccactcgggcgcgccccgcccgccggtccccgatgcaaacagttgggctccgtaggcggctggctccgcgcctcccggcccggcgcgccccctccccggccacccggggccccgctcctcgcaccttttcgctggaggaggacgccccactccagggccggactgggggctctgggactcgggggcggcagcggcgggcgcctggggagccgcggtgtgctcagcagccgcggcaggaattaggggacatgctcgttaattgtttccactatcagccgccgtctgcctcctgtgtgcacggatcaaaccttaattggtctttacatttatcatggtgaattgcgaacctccaaacaagcctgggccgccgcttctgccgaggaggcgctcccctcccctccgcccccggggccctgcagggtgtgcggcggcggtcgtggttatttagacatctttatctctcgtgagttggatcgggagaggatcgcacggtttccacctgacggagccacgtcacgtcggccacaagggccccgtgctgggcgctgggttcggttcccggccgtcctcttgtggccgccttggcgttcattttatgacaccttgccggtgttcccagacatcatcccgcaccgctccgttttaccgacctccaggtcttcccgcccctgatcagaccccaacagcaaccgtactatatctggaccctatatttgaactacgtggtgagaatctgtgaaagcgagcctctcagggaaagaaggaagattgttgagttcaaggtcctggaggagggaaggctgtaaaaccgttttggaaacgtcaggccaaatcgtacaaaggcttcccgcagagcactagtgcagtttttgaaaatccccctagactgctttagactagaagtatttccgtcaagcaaatgaccatttgactccattgagagagagagtccaccgctgaaatgattaagtcctactaggtggg

SEQ ID NO: 584983 - DNA, 4001 bp, Homo sapiens
gttctcataaaagtctacctttcagttttgctgaactaaacaaatattaatagcacataaacactgatacacatctcacaggacataatacattttacaaaatatctctagtactataacttgtaaaaatggacatctctgatactacggacagttacatttcacattatagtgaaagttgtggttacaaaggcattattcatttgatggcatttttccatgggttcttagacttccaattgtgtagccaaaggtttccctcctatttcattgagactttgaaggatcgttcagtcacttaaacaacaggctttcttcactgtaaacccctggagaatggagtttgagtacctaaactatggaaacattagcaaactgataagtgatcatggtgacaatcaccttttcattgagcatggtaaagttaaaaaaatataaccaaggagacaatagactcttctagattttgagcttaaaaaaaaaaattcttttcctgtgctgccagggaggcatcaggctcacagagcctcggcagacgtgtctgtggacacagacatggttaccttggcaatcttgaccgtgctcttgatgcagctttctgcggccctgtgaacactggctgcattgtttgcgtgtttgtgcaggcagtccgagtcccccatgctgttatccagaggctgcgcagtgccttcacaagagggaaacatgctccggaaagcgtgtcgcaggtccttactcctcagagcatagatgatggggttcacggtggagttcagcaggcagagcatactgcagaatgcaaacaccgtcttaatgagcttgttcatcttcccaaagacatcatacaccatgattgcaagcagagggccccagcagatgatcaacaccaccaggatcaggaccagggtcttggctaacctaatgtccatgcgggcttggtctggccgggtcacctgtaccttcccatcctcagacgtgtggatgatgatgctcttctgggtgccacgctgaatcatgcggacggcgtggctgtgagccttccagagaatatacatgtacgcatacacgatgaacagaagcagtacgctggtgaccccgatccagaacatcaggtaggtttcatcaatgtgtgggaaaatgtctgagcaaacagattgcagtttctcgcagttccagcccaggagaggcagcacggcgatcacaatggctatggtccacatcaggcaaaacgccaccacggccttgggcctggtgacaatcctcttataggccaggggcctgtgaatggatatgtacctgtcgatggctgtgaggaacaggctgcccacggaggcagtgaaggaggccgtgaccccacccagtttgaacagaaacacgttgcggctatctttgcggtggaacacgtggaagtcaatgaagctgtagacaaaaatgacactccccaggaggtctgccaccgccaggctgccgatgaagtggtaggaaggcctgcagcggaggctgcgggagtggaggatgacgcacagcaccaggaggttctccaggaccgtgaaggtgcccagcgtgagggacaggactgcaatggccagctgctggctggggttcaggaccatgaaacactctatgtccatgaagttctccccacactggatgttctcctcattctccttgaaggacgagagagacttgttgtaaaattctgtaatgttcacctggtctgctgggactagctgggggttgtctcccgcagtcatcttctcttggaagggacttcccctaaaggaagttaaagggaatttctgtgggaagtaccctaatttggatgccatgtcacctttgatgtcttcgtactgaatgtcatttgagcccacgtacaggaggtcagtggtgatggtgcggaaggtggtatctgcaaggccatctaggatcgacttcataacctcagtctttgattaggctgagctcaaaatgactgagaaagtgacccacagggggcaatcctaagaggagggaaaacaaataagccgaatggtgagaaacaggaagaataaaaacaaagagacactgtaaatgtggcaaatgtactgtcatggcaactcattcctgtctctgaacagtaggaggtcaagttctcatcagattcagtcaacaaaatgagtaagtcactcagagaaaagctccccaaagttcagggatggcgtggcacatgccagaaatgtatcaccttttcattatttaaaccctctgtattgaagtcagtgtgtgaatccaggaaggacctccagggccaagaagactgaactaaatgaaatgtttcttggggacaatgtccatttcatagtcacgttaggaagtgtttagcacctggcttctcctgtcacacacacatggtatcccagtgctggttggggccggcgagagcactgatgtgtcacatgacccctactcttggagacttcaccttgtcagacaaatgagactaaatgtaaaagacaaccaaagaataagacagtgtagaatcaagtgatgagttgtgtggtctgtatgttacttgtagcgggggaggagggagctagtgagaactgaggaagcttgaggccatgtggggagagatgctcctcaagacaagtttcttcacccagagaaggggaggtctggacggagccatggctgacatgacttctaggatgtccacatcaaccaagaaaaatgtcacaaagaccaaacttgcaatgaggcgtataggaagacagagttttttttttctttctttctttctttctttttgatacagagtcttgctctgccaccaggctggagtgcagtggcacgatctgggctcactgcagcctccacctccccagttcaagtgattctcctgcctcagcctcttgagtagctgggactacaggtgcgcaccaccatgcccggctaatttttgtatttttagtagagacagggtttcaccatattggtcgggctggtctcaaactcttgacctcaggtgatccacctgcctcggcctcccaaagtgctgggattacaggtgtgagccactgtgcccggccaagactgagctttttcacagcagggatatggaggaggcctcctgatagtccccttcatgagcaggttggtgacacaagtgtgcctggtgacaggagacaggctggagagtgtccaaggatttccatgtgaacagctaagaggaaaggcccaaactttaaggttcttcgattctaagctaagcaatttggttttgtttcaaaataaacagccagagaactgatcttactatttataaatttttgtttaaaatgtgggctattcatttctttagtttatttttaaaaattagaagtatagagtgatatctataacaattaaaataagaattaaaacaatatattacttgttaattggcatttgttgttcctgaaacatatcacactgtatggggttgggggagagacaatcactatttcagaacaaattttaaaaatgttgaactaacaataaatgagttattaattcagagaccctaatatctgaattaataattcatttattcatgtattaacaaattatggagcatccactatgcacttgtattatgtctagctacggtactagacactagtgttgacagcatcaagaaagagtccctgcccttggccgggcacagtagttcatgcctgtaatcccagcactttgggaggctgaggtgggcatatcacgaagtcaagagactgagaccatcctggccaacatggtgaaaccccgtctctactaaaaataaaaagaaatttaaaaaaattttaaaaaaattagctgggcatggtggcacgcctgtaatccctgctactcaggaggctgaggcaggagaatcgcttgaacccgggaggcggaggttgcagtgaggcgagattatgccactgcactccagtctggcaacagagcaacattctgtgaaaaaaagagtccttgcccgcatgaaggat

SEQ ID NO: 584984 - DNA, 4001 bp, Homo sapiens
ttaagtttccttttgtgaaatattttaaattccatctttcttcttaaaaagacaattctataagtttcattgctcaaaatggttgttcccaaaagcataatatttaaactttataacaaatatccttagctttatttacagtataaaatatataattaaaaaattatggaaagggagtttgaagcctacagtcagtttatattattctgtagatattttataggcggtcgtgtcagttgctgttaaataaaattagtgaatatgaggcctagaagttgccctcctttgagaaccttagtgctttacatatattatctcagtaatcttcaaagagtaaccaagaaaactggacaggtaagcaacagattcaagaagaaagttaacttattgaaggctatattagtagctaaaagtagtagaaataaaactaggagtaacagaagtagtagtagaagtaatagcaacacttaaagcactttacaggtattaattcatttaaacttcgcagcagcccttgagatagctgctccttattttacaaatgaggaaactaaggcatgggaggacaagtaacttacctcaggtcacacagcttatgcattacagttaagtctctgcattttaccgctaaactatattcaaaatgtataagtaattatgagaattgcagtttcatttgcctgcttggcaattctcataattacatttgttcattgttgggggggaggccatcagatttttttgataagactcggttttatatctgtttgtgggctagttgaattagttttaaaagtaaatgtttaatatttagctaaataaaccagctaccttctttatacaattggcagttatttttagcttaaaatttttaaacttgattagttttgattagatcaagatttctggattacatgcagttatttgtgcaaaagcagcatctgagaaaaaaatttgtacacacaaaagttctgattttttgcaggtatatctttcaactatattttcaagtatatcctttctactacacttattggatattcttgttctacttttttcacagatcactttgttgtaataatttgggctaattcagaagttggaaagtaacaccaaagttaaatgcattttgttaaagagattattaagattatagaaagcaacaagcaacttgttaatagaacaaaatatacaattcaatttacctttactctttatggtgtagggaatgaagaactgtgtcttggtgttgggtagtgggccttttatgcctgtgggcatttggtatcgttcagcgtaaaacactccatgaaccaagttcaaggatactagcagcaaaaagggtatttgtggcagcatattctcagatggattctgaaaaacagaaaagaataactttatacagcattgttattaacctatttttttattctcatgtttcacagatgagttctttatacagttatctacttttttaacctatcctatatatttttaatatgtgccataaataaatgagagatcattttttagttatgtgaatatatgtcttagttatttttggaagctatactcaggtaatcaagtgaaaataaaatgatttacctaaaggaaaagaaacagaaattaggattggatgtctgtattaaataatctaggatctttgacatagcctgaaatatctaatagtttcaaaatacactgaaattcggattagggcaaatttttacaatatggttttattgggactatcatccacagactgatgcaaaaagaacttttggagtgcattttagtagaaacccattttttaaatcactttaatacttctaatacttgagaaaactcaagtatttaaatctttaaagtttctttccaagcaagttaacatggaagtccaccagtaagcgtacgcttacctgcgtgctgggagttcctggagatggtgccttggcagctttctgaagcttcctctgcccagatgagcagtgcagaaggtgcctctcaagagctgttcagtggtatttatactgtttttcccttactacatgaggttaccctgagcttaagctcctcccctcaaagttggtaagcactaattatggtggaaagttctattgggtaggcacacaagatcgggctgggctctccttttccttgttttcttatttaaaaataaacccattgtcttaaatatatattaatagttttaaccaaggaccgtctttgtctgtgattctattttattaattaatactctagtgttcaggctggttcacggtggaatgatgataccccctttttatttttgaaaagcacattcttatgttaattggttgatattatataatatgtggtagtacataaaagcggataaaattccttgaagggggtactggatttagaccatcatctaaattattgagttattacataaagttatcaatgtgtctattaatattcataaatttttgtgaaaatagctgaccccaattcttaattacttttaggcttttaggatttagatcccttattcacaacactacgctatattcagtaaatgacttcagattttcttgcttaaatttgggtttactttagagttgcagtagagtttgcaaaaaccccttaatttgataatctcatattatgttaatttacataagattgctgtgtttatttcaggagaaaaaaattttcaaactttgctttcagcttaaaaaaaatattattggcttaacttgcagttaggaatcatcccaattagaaacactttccctcaaaggtggaagtaaacactattgttgtcaattttggtagttagactctgtttaacaatattaggaagcctttaaaatcagtttttaggatcctaaaaaatctaataaaggtgggaagttgagagtccaaatttttcatcttatttaatttcatcgttttgaatcaaaatcaaattgactatgcaggtgaactggttgaggaggacaattccatacacaggcatagacacatcatttttctacctccacagaattaaagtagtatggattcaggactaatcaataattgaaataattgaaagtttgaccagtgaatgaactaaagatttgtcctttttcttttccctttctctccccttcaagcaattttctgtattttaaacaaagccttgtatagccctttatggaaatgtaaatggataaggcatctcattgcctctctcctcttgcttgtaagcattttgttgattgccatattaaaaaaatttacattgttgtatatatctctgtataatactcatagatacatataaaatatgtttcttatagcagtttagaataacaaaataggaaagtttataattcatcatttggaaattatatatggaatagcttttgtaattataatatgtactctgctacatctgtaggagactacaaaagataagtgagagaaaacacctgccttttggcttatggcccatttggacacaattttgaaaaagtaggtgaggtaactttatggatgcttttgaatgctaggttgaatttgttttgaaaggaattattaaaatatatattttaatattttgtgtgtatatatggtgatacacatgcacacacatactgctatttgcttataattgagactgataccctgttagttatcactcgtgaacgttcagaagactaattctcagctcttaatacatagtgctatgcccctgtgtataccatttgttcatctgtggctattgcaacaattttcagagcctttcactttaacctctctgggtgtctgttttttatcaacacaatgaaaagtttggactaggtggtttctaagctcctcccagttttaaaattagattattcctgtgcttgaggtattctgctgttctccatggtcagatggtagacttggctccagttagtacttattagagacacaaaaaaatccataccaggaggttgtatgtcttcttttagggatatgtaaat

SEQ ID NO: 584985 - DNA, 4001 bp, Homo sapiens
ctcacttgctcccctatacacatactcttcacaccatcagctccagattggaaaaatcccaaagagagttccagcaaaactttcatagaagtgtggggcagggcagaggccagagcaatcaggagagtggagctgggtggggtgggtgaggtggggcgggcaggcagagaaaaggccctttgagtccaggagccgggaaaccacggccttcccccccaacccccacctaagcctggcccctgcgcgtgtggcagctccgcaaacaccaacacacaagggccgctttgagagacgaagggtgagtgagacagagacacagagactcacagagaccccaggccaaggagacctcggaggtccccaccctccaccaaatcccaagggagtacaattcgatcatatggacaacctacccacaggtccgcccaccatcttcccacaccaggccacatacttgcccccctgtatccagcctcatctgccccacaggctctccactggtagccccattaccctccaccactctacctctggccccccaaatgccttattctctaaccttaggaattctacagtaactcatttccctaaagtcccatctctacccactcagcccctgaaataagaaacagtcatcttagccatccccctgcctccatgccagaggatccctcttccccctaagaaagactcctagagtctacaggcaccatacgcctcaatttcctggccctgggcttcactgtcctcacatcttggaagttcttccttctgtaatctaatctaaatcttttgtgctgccattctgaccattttctctctaaagcagagaagaattgaatagtcaagttaaatataaatcagccctcagtgtctccagaaatgggctttttccagcctgctgaggacctggtgctcacagccccctccttgacatcaaatcccctttcctagaagccaggaattctgggtcctgggaaaaagaaggaaaagatcagggttgtgggcaccagggtcccaggggagcctggctggccagagggaggaggggctaggcaggaatgcaaagagttggctctggcctcagacacctgatcctggcctgtccggagggccgtcctgttggcagccagccccagtgctccccagagccagctgcgtggcagcatcgagggcacagggagggggagggggaccctgtccaggaggccaatgagacaggtagtcaaggcttcctttctttctgggcttactgggctctgctctgaatcacaggtgctcaccccttatcccagagatatcgacagaaaggccataagacacacacgcctcacccatcaacattggcgtctaccatccccacaccagcaatgactggaccgggctggccctggccatcttcagctcttcccaaggactcaagacaagcatccatccccattcagggtctctaaagtggtcctccacctttcagccctatctgccctcccccagtcacttcaaggacaaagagattcctaccctgatgccaaggaacacaggtgtcctgccctccagcctgtagccttgaagccccaaatctccttgttagactcagaagctgctgccccaggcatcagctggccccttcccagagacactcagagctccagcctgactccgaggacccaggcatcaggactcctcttacctgcccagcctggggccgcgctcagccccagcaccagaggtaggaggaggaggaggcgatggcagcggctgcaccgctccatggctgagaagccgaaacgccgggtcccagggacccaggtcggcctgagacgctggatgccctgaggctgacagaagacagggagcagactatgagcctcagacgccggggtcccagggaggtcagaggctgcgggcagcgacagctgtcagcggcccagctccatgcagcaaggcgccgtcggggctcccggcactgctccctcctcggtggctgccgcttctgtgtgtccccggccaccctggcgcccagagcccccacctcgcccccgcccccggcccggcccccgcctccagccgcccgcccacagccaccgaagggaaaccccaccctcagtctccacctggggagggaggcgggaaccctccctctatcgctcgctctctcctgccccttgtaggtctcaacggcctgtaccctaagattctcttttcgggaaccccaatatcttccctagccccttccttttctaggacccaaacgtccagtcacacacactccctcccattccctccctcttgggggcccagagccccctttcagcagaggcctgggcgggatttagggcacagtgggagggggagaggcgggcctgggggtcgcagtccccaccccacccataatcaggtctccataattacttccctcaccccgccccgtgtaattacagagccgggccggggcgggggtatttatagacaaggctatagatagcgacgaactggggcgggggatgtgggggaaggtgttctacggagagcaagaggccagagactgggacccaccgacaaacacaggatagtcaggtccaaggagatgcaaatgggggacgcggttagggagtcccagagccgaggtagagggggagcagtggtaagatgagcgagcagtcgactctggttggaagggtccagggaaatggggtcactcggggacgtgggccgcctccgggcgggcaacgcctgagaagcacgcagcgctcggcgcccagtgcgcccccacgagcgggcacggcgccgggtctgcccggagcccgcagcgcgcccggagggaaggccgcagcgagccgaggcgccgccgcccgctggcgcggagagggcacgagcgaacaaggcgcctttgagaatccaccgcccccccttcctcctccggccggccccgcccccagcctggcacaccctctccccccctccccgacaaagcttgccttgtgtcccccaccctgcgtgcacctcttgggccccacggaacctcggcggcggcgtccagggatcgcgtccggagctcccaaccggataccccccccaagcccgaaacggcgctgcccatcctcatacagtcacctcagtccagaaaacagcgattttaatttgaaagcgattttatgtatgagaggggaaaggagccccaaagagaagggacgcagggcaaaaatcatgcagccccagcaccccacctctgcgggctggccacctcccctcaattctcaggccaggatcctgtgtccccagcctatgctatgtgcccagggctggaggagagctgtaaagggaaggcctccgggactacactcgtgaaaccatcccctgtgggggccctgtcctcacagcccaggccccttccccaagttagacaggaagagatagggggggcggcgggaagctgggaaggctagtgcttggagagccctagggacaggccatttcagggccctgcctttcccaaacacccacctccaccactggcatttcttagtcaacctgggaaagtacagtacttctttgagtctaactgcaagtctctatcctcacaggaaattaaaaatagcagatcggttcctacatctccaccagccccttcaccaccaccaccaccttttttatatttcagtctgactgcagaaggaggtgaagtgtaaaaagagactctggacagtgacagggcccctccctcttccagagaggcccccatctgccaggtttgagaggaggaaggcctgtcagggccctactctcatgtccatcagcttgggaggcctgccccccagtatccacctctgggggagttccccatttccactcttcagatgggaagcaaaatgaggcaagatgagaaggaagcaaggtcctggaggcaaggccagtgctttgtgctgggggaaggacagagggtgagaaatcaccccaaatcatgggagaacccgacaaattcagagactcaaggccaccga

SEQ ID NO: 584986 - DNA, 4001 bp, Homo sapiens
ctgtcctgcgtcggaatgcaaaaatgagccaaaggtcgaggcctctttgagaaaagaaactgacaatctccaacgatgactttccaaattattggcacaaagcatgagggcagctttcctcagcctgtgtgtaaattgcattttaaatgtctgatgagcaggcgtgccaaattgcctggagctcctttttatgaagccaagattaaaattttggcactgccctaagtatctaaggggtctagcaatttctttcttcctaattaacaactgtttgacatttctaaccctcttctacatcagtgaaaagcaagaggtgagactggcccattgttccaatcatcttgccttaactttggtataataatttccaactcagttggcagtcgtgctcgcgagaagttaaaggcgaacaatcgacccaccgaaaagctgtgcgcagatttttttttaacagctgaactcaacgaaaacctgagtggtaacacttttgctgggtctcgatcgccacctgtcgctttcccgacttagctgcaagaatgaatcatctcgcgccgggatatcggaacgccagccagccaagcatcccgtcaatatatgttttaaaaaagaaaatgctttctctcctttttagccaaaacattcatttgaatgcttagcaacacttcattgagcattctcagacataaatatctgaaagcggccgcccctacgtggcagcgaggactccctcacttcaccctcatgaataaaaatgagtccactggggtgggagtgggggctaagtggactcgtccccttctgccaactcgccccctcccaattccctgctggaagaacccaattccttaactcccgcgtccagttaaaaagaaaatcacacacacacacacacaccgcgtgcgcgtcgcctacctcctctcccacccaccacgaccttggcattagccaaaggagagcttagcgtttatttcctttcctgccctatccttccccagcattcactagaagactacagagtccggatcgagagtctccctggcccagagtcccagggagccctgaactggtcactgaagggctcccgaggtcgcccgcttgggggtacctgttccgctcgctgaacgagtccggcgacccacgctttctgatccccacaagtctaggatctgagtgggaaaccgccgcggagatctcacagaccccgaatagggcctccaccaatgcaccgggagggagtcggagaggggactttctcccggagctgggaaaagtccgccaagaatgagtaccctagtgctgcctaacccaccatctcggatgctctgaaaggtaggggaggaaggagccagaacactccactaggaatctgttacgagatgccacacacacccgtgcagcctcgacgagctgcagagcactcagcgggccctccaaagaattccgcaccgtgcgtcaccaaaataccttcccagcgcccccgccgcacgcctgccctccccgacaaagccacagccgcgagataaccagggccctgctgccccagaacccggcgcgccctccattgaaatcgacagcatctacagatgaaactcctctagaaacggaaacactgaacgggatgctttgcgtgcacaaaaccttgctcagctcttaagaaaagcaacattcccctctccctcaaaaaccccaaagaatcaccaaatcccagtatacaaggcaacgctctagcccacctacactattacaagtccaaactgtcctcgcccaggattcttcaccgctccgggcaaggtgcaagctagacgccgtttcccgagttgtctctgggaatgatgggggtaggggaaaggggacagaaaccaggctgacctgaggcggcggcaacagggagaggtagcggcggcgacagcggcttcccggcgtcggagaagctggtgctcggtgtggcccccacacgccccggcgataggcgctgcactccaggagcacctggcggccgccgaggcgtgggcagctgcggggaagtccaggaggaggaggagaatcccaggaggagaggcgggcgcggcaggaagactggagatggcctgagcctgcagctgccggcgcgcggacgcgtctggggcggttcgccttagccaagtggaaagagactccgcgccgcgggctacttaatagagggctgttcccagctctcagtttactcggttacgaaacgcctgagaaggtggacggctgccacggggtgatgtatgctcctccggcggtgaaggaggtctacttttgggaacgtgtgcatacttcgagcattccttcggcgtgaggtggcgatcgccgtagtagcagtgccccgctggggggcggggagaagggagggagcgtagagggggacagccgcagccgggttccctgccaagggaagccgcgtactccgccacttggggcggactgggatttctttaatgaagctcgggtttccctatccctgagatttctttaatgaatttttctacattaagaacaatggggaggggaccgactcccattttcggaaatgcaaggatgcgtaacccattcacccccgctcctgcggatctccatccttcatctgatatcaccacctccatcttcctccccctctgtcctgggtgcacttaaaaccgatttacaggatttccattaactaactgtctgtacacgcggcgcgccttctgtctttttcaatctccaagcgcgattggaaacccggacagccgcccgcgcggggctcagtgatgggatggctttcccagtcctttctcactcccctggtgcttcaggacggaactgggaggcttaagttgagccaaaagagagggagaggaaacctatgaaacccaggagttctcagaataggaagccgctcagtaacaagttgcatccactgcagaaacttctcacccggaccagagcaaaacctggccccgagcggaggcttcggactgaaagctctgcccttaaaacctcgcggagccaaaggggcgaagaggagtaagtttgaaaccccaaagcacccctccacacacagtactggagaagccaaatagggggctgatattctaccaacaacgtcgcctcttcttacagccccctccatcctggcatcctaccccttgttcctgggcagggagtctggtactcagggttgccagattgtacaaggcgcacgggaggaagcttcgagcgctcacaccaagaaatcagaaaaatgctactggagagattctgattataacgtctgacctcagtataggccctgcaccgttttggcctcttgaagcccaaaggttactcctgtaacgctgggggagcgttgaacaacaaaggaccggggtggggcgcaagggaacagaggagctgcttctctggaactaaccgcccgccatagtagaatcggagggcatgttcccaatgtaaatctctcttccccattggctctgacgtctgcaaatttggccttccctctccactaggcgtgatagcctccaaacttgcctttcgactgacaagaacttgtagggcgctcccctttctgcacatctccccacacacaggctgcctccagcagaagccggcgaaagcaagagagaagacaagagggagacaatgaagacaaataggaatcgccgcctctgcacattccccaaccacacagcccactcgaagtccagctgggcagctcgcacaaagagcctacacagtacacaagattttcccccttcaaatcctcacaaccagagtgtctgacaaacccctagtgagtgagcgcgtcccagggatgaaacacccgaccttctcaacgttgcgcccaatcaggcttgcaaccacattgccctggtatcactgagccccgaatttgtcgacagctggcgtctgcacccaagctaacccttcactcgcctccccacccaacacacaaagagcagggagcccagtccaaccaggcttgcagaccgcgcgtg

SEQ ID NO: 584987 - DNA, 4001 bp, Homo sapiens
ggtcccttagcacttagagagctcaggtaggacaaaacctaacggaagcacctgacagttactttctccactttctatcccctagagagagcataaattttctgcctctgggggtcaccctcctctttttcatcctgaagagatattcctacacaaaaaccctgtcagccctcctcaggaaggggcatttatgcatgtttttcaccactggaatacctaaatatctcagctttgcaggcccatatcaaagatctctctacttagagagggtcctgcaagtttcccaccactcaaaaacaaggagatgccaagaccccacatacgagcaggggctcttttctttcttttttttttttccctttagtctcctaaagaattatagcagtgtttgattcgggcagagggggaggcattggtgttctctcctttttggggaggggtggtggttgaaaatagatactggtgtgcgtttgtttcatctcctccattaacaggcagatgtaaattcccctacagcagagtgattatcctcacatcttaatcctcctcagacttatccaagcagaagatgggactgagtcgtcttggaattggggattgagggaggtggcgcaatttatttcccttactcttccatctcccaatctcaagctgtggccgatgatcactctcttgcctctattcacggattgttctattaaaactacttattatcagcattctgggccctcctctttttgctctccagcccactgtcccctgaggctgacaaggcacgctggtcccctctgcctcttcaccttctcatcaaatgaagctcctcgggggctcctgtggcacccgcctgtcccccagctcctctgcccaccctcttgccggcttcccgctccctccgtaacctctaagggggttcgcttacgcgcccgcctgctctcggggagctagcgtgcccgacggcgtgcttggttccgggccaacaaacttcctcgcgaccctgcagcgccctagctgggccgcccggcgccgcctcctggttctcggccgctgtggctgcggcgccggcgcgctctcggcggtggcctcgggactctgacagcggaggcggcagaggctggggccgcgtcttcctcgcgccgcgactgggacgttccggcggcggcggcggtggctgcagggaggactgcggggacggcggcggcgctgtggccgaccgcgctgcgcatgctgcagggtaattaaggaacagggccggacgctccggaacgtggtggggctggagtccgggaatccccgcccgcgcccgcgccgccccccagaagccgcacttgggaaaaacacccacatgtggagtaggtaaccccgggccggagggcaccgcaccggaaccccgcgtctcttagcttacgccgcttaactggctgcctcgcttccagggctaacaccgtcaaaaaaaaaaaaaaaaagcgctctaacggcatgaattgatagtgagtttgttttactcctttaaccccccattttttttgtaatgtatttgatgtctgtccctacccgcatcagcagtgctccatagttccgcttcacagacacacatagccagaaaaaccacctagaacttaggtgtaacgcatgaagcctgcatcatgtgaacataggaacacgaactacatggtatgtaccacatgagagtggccgtctcctgccaaacgtttttggtcccatccttaaggcccctatggaaacgtatgcaggtgtgcattatttatccacctaaacatatttccatgtgtagcacagtttttacattttcttgaaaagcagatgcacacagataactaggaacacgagcagatgacatagcccgggcatgtgtgagagggcaagtgcagagccggtcgcaaagccgcgcagcttaccttgaattcgtatttgagcccctcagaggcgcagtggagtccggacagggctgcggcaccgccgaggagtgagctccctgcgagtggggaagggggacgcatctctgcccttattagtctctcccagtgtgaccctcccactccgcgaggacagaggactctgcaagaaggtactcagccaactcaggcacaggttttctttaatgacagcgatgtcgccttagagctgggagtaatgcctttcaggtttatgttttactagcagtttcacagataaaatgacggttggatgcaaatgcctagagtttctcacttctgatcatgaagtgtcttcaaagtattattgtatgtggcaaacgttcacgagtaggtaattggctttttaacggttgagctaagaaaatatatcatttatgtttcattttttcacttttatgtcaagagtttatataaagttgattaaggcagtctgcccaccttctaatcacgctcatatgtaaacgtttgtgtggcttggtttttctcagtgtccacagaagtattttgtgattttaaatacatctttccatgggttggtgcttccaatcttggcttttgaactcttttgggatccctttgaatatgtgaaagtgtcattttcctgcagatttctgtgtaggtgcatgtatgtgtgtgtagagagagtatatatatatttgtaggcatatatagtaggtttatatacatatataggaggtatatatggatacttgtaggcatatatatttgtaggtatatatacatatatagtaaatttatatgtatacatatagtgtatgcatatgtatgtgtatatatgaaaaacagaatgatttatagaattcagaagagtaaaccaggcattagaaaacagataaactggttttacatttttatttcagtattgccacagtgggagaaataggataaattatattattgatccacaatggtgaaaatcatcaagcttaaaagttaccttagaaccatagaaatacacttcacatatcagagctcacagatcaaggaataaataaaatcaggcaggcaaaaaataaagatgttaagaaaaatgttaaaagatagctcctttccacttcattggagtgaaaccattaaagtatcacttgtgatttttaaacttctctctcaacctaatcaagatacctgcagttttagagttcggcattcatggtgatgcaaaccatgtttctatgtcaggatttaaaaccacttgatacatttccttctcatatgattttcatcactaatttttggctgactgtggaaagaggccaaggagggaggatattgcatgagtcacgctactcaaatggccatttgaaaaacatgattcacaaaccttcattagacttttggtgatcagtctctatttttttgaagtattatcccatttgatttttttctttctctaagcaattttactttatataccttgccatcactaatgaattgaactaagagcatccaggctttatttctttgtcagactattaaattcaccttatttacacttaattgaaactatttaaagtaatgctttaaaactacctaaaaggaagtccacaattttgtctctaatttttgttttaatacaagtaaatcaagtttatcttagaattattttcttaaacattttaataatttcataattgttaagatatttgagagagctaaacacttatatttttgtttatatttcaaaatggcccttttcttatttctaatattgacccaagcaagattttggaagaaagtgaaaaatgaataaataaaacttcaaattattattatctgttgcttattctgtttctagatacaccaacatccccagggcaacaaatatttctctatttttctttcaggaaagggtttgaatctaggctggtttcatgattacaaactattgtatacctagggtttgcttctttagccagttctttttattgaattttaaagtgacttcaattaggaagaacctttagccaaacaccttttatttatctaagccaaatacaattataaatgatccggttttcttcttgc

SEQ ID NO: 584988 - DNA, 4001 bp, Homo sapiens
aggcactttagaagcattatttaactctgacaacaatgtgaattatgaggtaagtgtactagtacgccccacatttcacagataaggaaaatgaggctcggagaagctatgcaactatccaagagcacagagaagcagaagagcaggtcttgaacccaggtctgcctcagaccaaagttcctgttcctaaccactatctaaatttcccccagattctctaaatacaagcttagtacctaacccttaacaagtttatatacctcagtcacaaattggcacagaaaaaaagcagtttggaaaataaatgttctctgtacaggaagtcttggtacagttagccctgtgttcattgcagcacgcatgtgctgggattggagtcatgcctattctagattttcttatccagtgtcagatttctaatccatttaagcccatttgcaaagtcattctatttttgaactaatggcttagaaacagctggaactattttagccaaaattttgaaatctcagatatctataaaaagaaaaaaaaaatggtccacttcaataatccagaggcctgcaacactgaattccctttcactaaagagaattggcatgaatcccttaaaccctcaactactttaggaaaagacaaaatacgcatatgaatgctgtaacctgcactgatgacagtgatgatccaggaacatttcatcaggggtcaaagattcctgttattacagctggaagactcatgtatatttcttccttggcttcatttcaacttttagaaaaggaaaaattcctattctctcctaaagcaagtatacaaattctactgcttaaaaattattcgatgatgcttaagtctcccctttataagatctttcaaagtccccagtatgctttttttttttcaatatgggcaaaactctactaataaataactaaggttcttctgaaaagtggtctgttgcctcctcccttggtgaagggaaatttgcaggtgtcttctctgattaagtaaggtccaacccaacagttttcaaacttgagcaagcactagcattacctggagggctcattaaaacacaggtttctgggcaccagcctcagggttttaggttcagtgggtctagggcggagctagagccctagattttgtttgtatttctcaaagttaccaggtgcttgctgctgcgggccagatgccacacagcgaatcactgctgtagttcgctgctttctatattcgactgcactttggaatcacctgacaaaagttttaaatatgttaatgctcaaagtcccacccccagagattctgagtaattggtctggggtgctgctcaagcatcgatttttttaaaggtcccggagtgagtccataatgcagcagccgtaaagaacctctggcccactcaacacagccccagacccacagctctgcgcgctcagcgccacgtgtggacgctggagacccttccaagaagctaaaagctgagggtggggttgagctcaggggagtaaatcaacgcacgttatcgtactcagaagccaaacactccaaggcaggaatctgcacccagagaacctcccaagattcattaacatgaagtaactttgcaagacaaatcctgacatctcagcctccagctgggcgcggaattcaccgaacagttcaccaactgctttggcgcagggagaagactgcacccccaggaaacccaaaatgccaaattgcagcccctggagagccagccctgaggccccccgagatgtcattctggcagcgagaggggagtaggaggtgtctccttacctggcgcagtgtccaggctcggggttgccgtcgcagccagctgagtgttgcgccagggggacaggtatgttccaggcagtggcaagcccaacccgagcaagacctgcgctgaaacggattggctgccctccgcccggagtccgttctccctgcagcggccagtgcagagctcagaggctcagaaactcgctctcagccccctggaggcggagcccgggagataaggttcgcgctccccacccgccccctttccttggccgaagaccagagggtggattttggatctggatcttgaagggcgaactgctagtgtcgccctggtggaaacactcagttcaaatcctgctagcatcagaaaatgcacgattgaggattgaaaacgagggtgaaggaggaccagggaagcgcgaggagagaggcaaaataagggactgccaggaaagcaggaaaggcaactcagttgaaagggcaagcactaaaggaggcaaagacttgggcaacaccagagcatcgcctgcactgatcgaaggaggcctgcctcccttgcccaagaagaacccccctctggggcgccaaggtacgttgcagcggactgatgttccttgctttcaaccaaaagtaacagctgctccaaaacctgagggaagttcactttcaaatagtcaagtaggcagtgacctttaagggtttagcaattacaaaggaagcctcggaataaggtgacagccttatgacaagataaagatgctgtctgctctgcccctttgagtgcattcttcacagagcagccagaaagttatttaacattcatatgctttccctattatctgcaactcttcttttctcacccgtgtgcacccctcctaccccaacacacacaagacctgtttgccctttcttatacacaccagtgtgttctcatctcacttggcatttcttctgcctccaaaactctgtcccagaccttatcatagttgcttgcttctgttcatcaaattatccactctttgtgacactttgagacactttgagagtgagtccttcctgtacatcccatccaaatggaatgcccaaccccactttggtttcaacagatcacttattgctatctgaaggttttcatatcttcattgcttgtgtgtgtttcctatccaactcaaggtatgctctatgagggcaggaaattggtcttgttcccagctgtgtcccctgagcctagaacaatacctggaatatacaaggtgctcaataaatattggctaaatgaatgtgtgaattaatttctccctgtgggaacaggttcacaaagaaatgccttcttcaataactaaatctcacttaattcaggtgtgatacaaacatcttcaaatgatcatttcctgaatttccttattcattcatgttagattctactgttacaaaaatatgataggagaacattgctttggatttggtaacatcttcttagatatgacaccaaaagcacaagcaattcaagaaaaaataagttagactccatcaaaatttaaaatgttgtgcttcaaatcacactatctagaaagtaaacagcccacatactaagaaaatatttgcataccatctatacaattagattcttgtgtccagatatacaaaaatcttacaactcaagagtaaaaagacagttttaaaatgcacaaagtatttagacgtttctccaaagaagatctactaatggccaatgagaacatgaatgaatgctaaacataattagccattggggaaatgaaaattaaaaccacaagcagatacactttataccactaggatggctaaaataagaaaaacaataagtgttagggaggatatggagaaattggaacactcatatattcctagtgggcttgtaaaaatgattaagccactttggaaaacagtttgccattctctaaaatgttcaatgtagagttaacttataacctgacaaattcattcttcagtagatagccaagaaaatcaaaaacatatatccacatcaacacttctatatgaatattcataggaatgttactcataaagccaaaggcagtaacaacccaaatgtctatcagcggatgaatggataagaaaagtgttatatcgctacaatggaatattattctgacataaaaaggaatgaaacactacatgctaaatcatggttgaacctgagcatg

SEQ ID NO: 584989 - DNA, 4001 bp, Homo sapiens
tcatgagaaggattaaatcctcaatttgataagaaatcatagaatggaattgtgttctccttacacaaatggaaggtcaaagggaagagagatttttcaccaccacagaaggcttcttggaaatatccaacctcagtgccttgctaagattcatctgacaacagagactctctagacttcaaaaaaagtattattcagttacaaagcataggcccggcgctgtggctcacgcctgtaatcccagcactttgggaggctgaggcaggtagatcacctgaggtcaggtgttcaagaccagcctgaccaacatggtgaaagcccgtctctactaaaaatataaaaaattagccaggcatgctggcacatgcctgtagtcccagctacttcggaggctgaggcagaagaatcacttgaacctgggaggcggaggttgcagtgagccgagattgtgtcattgcattccagcctaggtgacagagtgagacttcatctcaaaaaaataaaaatataaatataaaaaagcatgggcctaaccataatggtacatcaaacatgctctttatactctcctcaccccaaattgttgaggtccatccatccatcagtctatttattcattcatccatgtattcacccaacatttaccaatcaccatctgtactaggcactgcactaggcactgcagctcacagattggccttcctaccaactgtgattactgacaggacttactttccatacccagcattgaccatggaaaaccagaacctaatgtatccctgtgccccaaagctggattgaagagtgagggtgtgaaggactatgaatgcctcactcagtcttcagtcagccacagccctgcctgatcatttctgggaataagtgatctttgaaagtctagaaactatggcccttactggggcgacgcttgacagctgcagatgcccagggttccaggaaactgcacacaaagaagaaaactggaattttcctgaagaagagagaagaaaaatgactgaaacaggagtccccgcagatggaaaacacttccatattttcaaacctagtaaacctaattaatgtaaggtgatcaaatcacagtatagtttttttttcatttctttttttttttttttttttttttgagacggagtctcgctctgtcacccaggctggagtgcaatggcgcgatctcggctctttgcaacctccacctcctgggttcaaacgattctcctgcctcagcctcctgagtaactgggattacaggcacgtgccaccacacccagttactttttctatttttagtggagacagggtttcaccatggtggtcagtctggtcttgaactcctgacctcgtgattcgcccgcctcggcctcccaaagtgctgggattacaagcataagccaccgcacccagccttcatttttactttgaaaccctactgagagatgtaaggaactcatgtttccagaccccactgtcgttgttgttttattgatctcaccttctcggtatctacctatctcactgttttggtacctatttctttgtctctggtttctttcacctttgatttccttcctctctttttctgtggccgtcactttctctcccttcctctgtctgtcttcggttttttgtgtctgtcttcggtttctcacgcttgccctcttgtcttactctctcatccgtctctctttctgtctctcaccttgaggctcacctactctcatcttaccactgctgcaaaaatacagacccttggttctgaggacccccagctccatctccccaccactctttccagggttattgtcttaccagcaggtcttcattttcccagttgattttctttgtttgccaacagtccctatgaagaaggggttggaagggagtcactgtcccctcacgaccccttcactgttaccctaggactatgtgttctgggcccagccttggtccctcctgcccccggtgagggctaaaagcaaagggagagaaccagaggcatctcgtgacactttaaactgaagcaaaggaaaggggtggggagaagcagcgctctgagcccaggcctaggggtgtgtcctcaaagctaacaaggttatactgaaggagggatttacaggggaaagtttgctgaaaagaaaaaaataaaatcaggatgtggggaaattcaccagaaagatccaggcaaggtgctataggaacacagtagatgcttttagatctgctataggagtacaatggcagctttcagaactgctataggaatacagtggaagctttcagagggctgaggttccagtaaaaatgtgcccactgggaggcagaggtgtggaaactcgtgggagccttggtgcccgatcaacctaagtttcaatccctgtttattctgaagcttactagctgtgtgtccttgagagagttacttcacctttctgtaactagatgccctaactgtaaaacagattgaaaatgcttacattaaaacaatggttttgagaattaaatgaggtatcaaaggcagagggtctaacacccaacaatcattatttgtcatcgtcttcatagctaacgcttcattatgcacctccgtctgttgaaaatgctcaaagcttaatgccatttaattctcacaacaacattataaggtaagactgaagttacccttattctccaaataagaaagttgaggaagcagaaaatgaagtaactttttcaaagtgccatgcctattactaaatacacattccctctctctacctcatggatagaaatcctgataaaatgtaacatcaagccccctacttgttgtttattcttaaactctgagactaccagagttgagcagaggacactgtatctggaaagaagcaacatattatcctccgttaacaaggtgagagcaaattacaaggagcacaaacctagagagaggcatgttatcagcatcgctaccacacatgccatgccgtctctccagaacctgagcacctaaagagaattccctatagcccccacatcacccccgttaccacccactcagcatggccaacctctggccttgtcttgagggacacgggtggttactccaaaaaccaagactctaaaggtcagaagatccaatgatctcaaaaatcacagtacaagcaaagtaatttttaggtgaactttttttttttaagagacagggtctcaggtctcgctctgtcccccaagctggagtacagtggcataatcatagctcactacagccttgaacttctgggctcaggggattctcccacctcagcctcctgagtaactgggatgatagtcatgcaccactgcacctggcttcttgaaatttttaaatttcgttttctaattgatttaatttttatttaattacaaaacaatagcgttgcttcttatttttcatttgtttatttcttttccaaaaaagtcctttcagtttctgcctcccccagctcactgatgaaatgtaaatcaggcaaacttaatatccatgcttttgcccttttattttctactcatagcccacctgttggagtcctgtctctctttcccagagggacacccatttcctcatgctgtttggggctttctacaagtccctgtcatttgccttctgtctatcaaaattcccattccctagtgcagccatcctggctctgtgacagaactacaaatgaccagatcttagcttatttgtttaagtcagtcagggctcatgagaaagaagcggtctattaacctcagaggagaaactgcagctggggaccttcctgacatcctgaagtcacaggaggtaagccagccagagattcacaggggaaaaggcattttccaaagggactgtccattgaagctatttatttgcatgattgatcctctcatattacttactctggtaagaaaggagagagggatttttcattataatgaagtgtttgggaaatcctttcattgctttagagatctcaattccg

SEQ ID NO: 584990 - DNA, 4001 bp, Homo sapiens
ccgggttcctaggatcctacccccaactctcgcccatgtctgatcctgcctttaagtggggtggcaggaaggggagaccctggtcctctctgaaaaaaaaaaaaaccccacaggagccctgggaaaagaataggaaagggcaggactggggaacagaggtggcctggagatagaaacttacgtcgatgccatcgatgcctggaactccaggggggcccggaggcccgggaggaccctgctcacccgggggacctctctggcaaaaatagcagacataggttagtggagcacatcgggcaacagggagcaactgagcgcggtgccctgaagcccccgcctccgtggggtaaaagttaccttccagaggaggccgggttttgcaacccaacgcaaaaatgtctcagacctccaagcaagcgcagctttggtctccgccatattctaatgagctaaactgtggggctagagcaggattgacgcccccaaggttgggggaggcttcactggttctcacctctgcagagtgcattaaacccaggaggagttgtggaaaaggaagggtctaacgcctttgtatcctcaaaaggatacaaaaatgaaaatggggctcattcgatacctcgatttatcagtcattgcaggtcagtgttttggccagaatggaacagccaagaacagagactccacaccaggatctttgtccagtagaatggggaggcggggcgtacacttgaggaaaagatttgggaggagtagggcagggcagccttgagaccagtgcctggcctcatttcagttttacctgcagtgacactccctcagtcccttgaattaggtctttgcatctcacttcaaaattacaccaaatttcagactgaccctggggcgtgaccccttttatcgcttgcaaacagctgcgttttgatggtgctagagggaatgctggcgtctgaaatagtataaacgtgttgcttagggaatgtggggctgtttttacccttctgaattaaaaaaagaaaaagaagagactctttcatcaaggaaaactttgtttttctaaactccaacgaccaaacaggttacaatggggtctttgtaagtgaaacctcaaacctcagctgggcttatgcgcccccgccgggtcctccctcgcgcaggaggcgggaggcgctggagcctttgggaaactgctgaaatgctgatggaagccagggccgccaagttccgtcccggagccgccagcaccgctagctggactcggggttagtgcagctacggcgggctggaggagcgggagagggagcgtgcctggattcccgccttttccagcaaggcctgctgttgacagtgaccaggaggtggggcgggggagggggtgaggtgcgggaagtaagaagcaataacaggctaagaattaaacctcggtctccagtcacctattaccttcagcgccagagcctgcagtagggaggacccagattggggaggagccccccttcctagaccaaggggtcatctacggctctggacttcgataggactcgcggcaggtgctcgaggctggaggaagcgcgggtctgagagccctggggatgctccgcgcctttctcacagctccctcgaccgctgcgccccgacctgtcctcgtgtgcgcttgaaaaatgcaaacactccctgcccccaacttacctcgtcggtggtctggctgggctggagaagaaaagatggggagaaagtgagaaaagcacccctcaaactcgatcgcaacttacttgagccgcgcacaagcagagccccaacagcagcagccccagggccccgcggtcccgcgcagtccaggccatgcccgccgcccgccgctaatcccttggcccggctctgcagcctggttcccctctaggcttccagacccgccactagcataggtggcacttcgtccctgcagaaaaagcacccccgggagtagcggttgccaaagcgtccaggcccgggaggcgcgcgttccccctgtttatgaatggccccggagagggtcctgggattggaggagagctagggggcaggggaggacggatagaatgacaacagtcgcccttaaccccttccctgccgccgcacaggcgaggactgagcacgcagctctgcctccatcccatccaccccagtgcagcttctggctgtcctcggagacttcccgggtggcctgtgccagtgctggccagtagaactcaagtgttcttggacatgtttgagagtaagggaggagggtccataagctaccaaagggacaaccacacacccgcaggtggtttctacctgccaggctgcaggtggtttctacccgccaggtcgaaagtatgaagtgtacttccctaatatttctctagtcagtacagcaaagcacaggctctcttagcgaaagagagtggggaggaggggtgctggggaggtggcaagatgggaaagtggtgaggtggagagggttgagctgggtagaagtggcctttgcaggtagtcaggggactcaccgttattctggctggcagctcatggcaagtttctctcctgggccgcagggggtcacaatggatcagcatccattgaagttcaaactggagaaaggtagtagacagtcaggtaaggttttttggacgactgaagctggtcattcaagagagagatgagttgcgtctaattgttaaataattggaaatcaacttgaactggttgagcacactggaccaggactcttgcttttccttgaatacaagttttctaatggaaatgggttggaagctttcacaagtttctctgattattaggtatagatgtctttagctttgaattatttcagcatacccctagcctggaaacagaccaccagcactgactttctatttctgttctgatgacaatctcaagatgtagatcctactaaaatgaggttcagagagaacagaaacggtccaagtcacaaaccaataagtgtcagagtctgggttgaaacccagggctattgaactctacagggaatatatgctgtaagattttagatgggagattagagacagaaaaaaaaagtggcaatcagaaggacaagtagaagaaagaaaatctagtcttggaaaaaatttgcacactggagaagatattctccgtggagtggtcacagcttaaaatggaaatgtaaggactgaagatgaaggcagtgagaaggaaatataagactcaggagaaaaagatataaaatatttaattttttataatcttattcattggttgaaaagatgtaactttctagacacttgaaatccaaatgtgttctgacaacttcttacattgttagcaggtgttacaggataaaaaagagggtagcaggaaacaaacagagcaaggaaaatgttgccaggtctgaatctgaaaagatcctcaggtgacaaggcaaaaaaaattaaaatgtcatatcccataggaagcctatagccacaaaccatgctggtatctcttaattaaggagctttctgctaggcatttcaaattggatccatatttctttgtcattgatgttatgcaaatgtctgggtaagcatccaggtcctagatctaagcattacttcttttctttcatgcaatagagatttccatgtcatcccacctgccaaatggattctagagctcctaaacctagaatgggaaattacataatttttttcactgttttggaatcatccacagttgagatcactggacagaagatcaaaattggagagacaatgaagaatgaagtctttccttcctacccacagaggaagggaaagtttaacaaaaggaagttttggctaaccagaaaacctatatcttttgtttcaatagttcattaaagttacttattgcaaatgtgaggtaattcattaaactgttttctcaaatatgtaattctctctggataaactggtacacctgtttaaatatgcaagctgcaattgtggcacaggataatg

SEQ ID NO: 584991 - DNA, 4001 bp, Homo sapiens
gcacctaccaggcaccatgctgatggtgaataaaacaggtgacagacttttaccctaccaatactttatttccagcaatgataatttactgtctggattgctctaaggtcttcctgggcctagacttgcctgactccatcccacattctatgtagacagctgccaagtgttatttcttaaacataaatctgttcatgttgcttcttcagtgatttccactgtccgcgggatagtctacctcaggaggtgtaaatggcctttcatgaatgtgtcatggccaaaaaggcctcttcctcatcccttgccaccccctgcctttaccttctgccctccacctacacactttacttttcaaggaaccttgcagtttctcacaaactttctcacagattctcgagctggtcctttcccctctccaactgcttttttttttttttgagacagagtctcactctgttgctcaggctggagtgcaatggtgtgatcttggcttactgcaacctctgcctcccaggttcaagcgattctcctgcctcagcctcccgagtagctgggattacaggcgcctgccgccacgcccagctaattttgtatttttagtagatagggtttcaccatgttggccaggctggtctcgaacacttgacctcaagtgagctgcctgtctcgaccaactgcttctaaaactggccacctccttcaagatttctctaaatatcccattcaagaagtttccttgatcccaaatatggattaaatgctccttctatgttcacccctcaaaaattggaactaggtttattatatcttttctaaatttttgattataaaagacacatgtttactaaaaaaagttcagaaaaagaaaagtatataaaggataaaatgatagaaaatcacctactctaccacaggcaatcactgcaaaatttctctatatatctccacctgtaactccaagttcactatacatactgatttgtaacttttttttttttttggctccttccaggaaacaatgaaactttactttcttaacactatatcttactacttttccatgtgggtacaaatagatttaaatcatttttattggctgtactatttttcactgtatgatagtaccaactaataacctttattaatgggcggttagattccccatttttttgttcattatatcctgatcttaggtttatcctaacatttttaaagagatccttgcggtgtcattcatttttaaattcccagtgctcataccagtgtctggcatacagtatttgttaagagttccatgtgaaagatgagcttaagtttctacttaatactgagagttcgaaaatcagactgctgtctacaagcactgagcagtgcattattttcttgatctcatttgcaaatgcagtctgttggattaacctattaatcaaaaagtaatacagctgccttaaattctttctgaaaaaaacagcaagctttgtgcaaacaaaacacagatacaaagctatgcataactacgaggcgtgagttattcctgccccggcaaaggaaagatgcatgaccttcagactgcagcacacgcagagcgggtcgccggctcctggggcaaggagctcagccacaagagacccgcggcctgcgcttttccagacaggaccactggtcctgagctcttttccccggcgtccgccaacgggactatgcgaggtttacaatggagagagatggggccaggaccaagccttaggtttcgcgctgacccctcgcgaggtccagagacaacccaccgccccacccccggcgcatgcgcagagacgccagcgctcgcaattgactgcatgcgaaggacctccgcacacacactcacccgccgaggaaattaagggacgcgcagcttttgtattacagcctccaggccccagcactcttaaaaaccaacccccggaggagcccagcttacggccactccacatcgcgacaaacgatcccacctcttttccggtccctcccgaaaaaagatccccaacataaaggttccgagatcactttcgccgtctgcagccgacttttttttttttttttttttttagcagagtctgttctgttgcccaggctggagtacagtccccatctcggattctgggatcactgcaatctccgccgcccgggttcaagcgattctccatgttggctggtctcgaactcctgacctcaggttatccgcccgccttggcctcccaaagggctgggattacaggcgtgagccaccgcgcccggcctgcagccgactttcatgattgtattgttgagtgttatgtatgtatggctatactttcacgctcatttagcaaattgcacatggaattaaactgcaagatgtttttactatcataaacaactttgaagatactttattgctataggacacctcaaacctcatgttcgaagttgacctcaatcaggccattacttcgtgctgtgtcttcttttattgccatgtagctctatttcacacttaacagatgtctcttcaaggacttttatattcctgtaagacattgaccctactgctaagaatgcaagagtatgggagcacttcttcctcaagggaagaattgtttcccctttcaaggcactcaaatatcagatggccagaaggccaaatgtaaaacttattttctgcaaatgactattatcttgtacagggtatatacatcatgtagtaggaggcttctgtggctcagtctaggcaaacttcatttagagctaggaacagtgatcagtaacattttacgtctaaatgcacaaagtctttctttgggtaagaacaatgacgaatctccaacattgaagacaaaaaattattctgtattttcaacaggtagggtcaaattggtaaagggttctttcagttagcgaaatttaccgctcaggaatctttttttttcttttttttttgagacagcctcactcggttgctcaggctggagtgcagtggtaggatctcagctcattgcaacctccgtcccccaggctcgggtgattcttcgtgcctcagcctcgtaagtagctgggattacaggtgtatgctgccattcccggcttaatttttgtattttcagtcagggtttcaccatgttggccaggctggtctcaagctcctgacctcaggtgatctgcctgcctcagcctcccaaagtgctgggattacaggtgggagccacctcacccagacagcaatagtctttcattcatggttcttagctaaaatattgacctcctcctaagggtggtcgcacttttcagttgctatgtcctcttcagagctcctctacccttagatacatgatcctctctccacatgaaggcagaaagctctgcacaaaagaaaatgtagcacgtcttgtatttattggagtgacacatccaaggaaaaagcaaagtgcaagcacaattaaataaagttctaggagctttatatgtactttctttgaaggtaccacacttcactgggcttcagagcctttccactacattttaacaagaaggggaatcaatgatttgctttatgctgacaagtatgtcttttgaacacccagaacaggtctggcccaaataagcaaaactagctcatagtatttctcgctacaaacatcaacaaagggctttcccaatgacccttaagcctaagtggtattggaaagttgtaatggctgtaatgcagtatatggccattgttggagatatttccccagactattattgttatggtctcacccgtaagtctgcgtatttattttgctctaaaactcttaatgtctgttttgtaattcaactttataaacattttttttttcatccaagggtaaagtgctcccttgtagctttgaaatgatatacagctgggcgtggaggctgacacctgtaatcccagcaccttgggaggctgaggtgggcggatcacctgaggtcaggagttcaagaccagcctggccaacatg

SEQ ID NO: 584992 - DNA, 4001 bp, Homo sapiens
aagtgtgaaactccgtttcaaagaaaaaattctattactaggcaggcagatcacttgaagtccggagttcgagaacagcctgaacaacatggagaaaccctgtctctactaaaaatacaaaattaaccaggcatggtggtgcatgcctgtaatcccagctaatcgggaggctaaggcaggagaatcgcttgaacccgggaggcagaggttgtggtgagccaagatcgccccattgcactacagactgggcaaaaagagtgaaactccatctcaaaaaaaaaaaatctgttacttggccaggcgcggtggctcacgcctgtaatcccagtactttgggaggccaaggtgggtggatcacctgaggtaaggagttcaagacccggcctagccaacatggcgaaaccccgtctctactagaaacacaaaaattagctgggcatggtggtgcgcacctgaaattctagctactcaggaggctgaggcgggagaatcgcttgaatccaggaggcggggtttgcagtgagccgagattgcaccactgcactccagcctgggcgacaagaatgaaactccgctcaaaaaataaaaataaaaaataaaaaaataaaaaaggccgtgcacagtggcttatgccagtaatcccagcgctttgggaggctgaggcgggcggatcacttgaggtcgagtccgagaccagcctggccaacatggtgaaaccccgtctctattaataatacaaaaattagtagggcttggtggcgagcgcctgtaatcccagctagttggaaggctgaggcagcagaatcgcttgaacctggagacggaaattgcagtgagccgagatcgtgccactgcactccagcctgggcaacagagtgagactacgtctcaaaaaaaaaaataaaataaaataaaataaaataaaataaataaaaacaacaacaacaaaaaaaaccctattacttgacagcaaatagactggcatgattccttctcaattaaaatgcttctctcattacatttttcctaaaaaattttaaagagggtatacatcttttaaagaagagacatgcactacatatccagttgaattaaataatgaaacaaatatgctctcgattttctaaaattacattgaggattttaatgaagcaaaacttcattaaataatttaaaaaataaaataatcattgtcgcatttttctttatcaaaatttggggaaatatttcacatgctcaaagtcgatggaggggtgaaggacaatgcacaatcgcctgacggaaataacactgcacttcagccatgactattcctaaagttccacccaaaattgaatggcttggtttttaaactgccttctcaagctcgcaaagctcaaaaccattgaaacttaaaacctttcagtaccagaaaaacacctttctgcttgatgcttccgggtgtcagacactccccacctgggtcttggttttactcagatcggagctactaacctcatcaatgaccgacagggttagaggtggtgactaagaacccaagacgggtctaacccacgagtctctggtcacttccccagcctctccactccttacatctacccagtaacggcctggggcgagaggaatagacggaagggaaagtaaggtcagggaaaaaggacacgaatcaaggtgacttcattagccgccttcggcacccctcccaggtgagggttttctgtcgtggtgcctcagcctcctctccactccctcgcccccatcatgaatgcaagatgagaagctcctcaccagcagattccgcagcatcttggctgttactgaccagcaaccgccacaactgaacaccaccaacgaaaatggccacgccggaaccggaactacctccgagtcttgcgtatgcattcacgaacttaaatctttccgggccgaagagaggcttgcgctcctaaccatagagagcaaaagaaaaactagagcggcagtacggctctatccgctctagccggctcgccgtctcagtcccgtgatctcgttcctgaccttttcgatgttcagtaggctggtccctggagctaaggctggggaaaaagcaaacgatttatgagacgaatgtaataagcttagatgaagtcaatgtgagaccaggctatcaaagaaaactagtgtctgttttgagcgagaaggcgtaaaactgggcaaccttgaagccgctagaaactgaacaaagactgggttggccgaaatacagctctgaagcctcataaaattcaaaaaagaattactcctcttacgcggatacagtcagttttttccaccgaaggaattgctgcggcacattactgttccttgtgttgagaatatgctgtaagagctgtgtcgagataccagtttttatattcttgtaccttcgactgctgcagaactccccaagcaagaagttcttccacagtgtccccaaattgtggaagaggctcgctcgcttctgaggaaacgttagggaacaagaaatgggatggcgaatctggactcaaaagtcttgctgtcccagatccagcagggcactacattcattactggagtagagaagcacagcaattatttgttgtacagaaaggctgtcggtgtcatccattttgcttaagtaatccccattacaagtgtttatttcttgtacttaccctcaagtatgtacaaatgcaaatatctaccctgtattacaataatctttccactttctacaaactcttacaaattatttgattgccatttcaaataagaaacccatagtttcagcaaaggataaaaattagtaatattaaaactattccttataatccttggggttttcttcttcacaatctactgtatgtcaatgggcccaccaagttaccagtcccagttaaaattctcttcctcaccaaggtttataaacaccccaattcatgtcttccttagattggtactgaaaggacctggttttctacacccctctggattatgcatataaccaaaactctgggcaaaattaccacgtgccaatagctagggcgtgggggttttttaagtacattgtccataatctgaatttgttagttgtatgtgctctcttatgttttctccacttagccaactctagattgtaaatttcccaagcgcagagatgatgtggatttcttaccaatcccctagcactgctaaagacagtattaaccaatacatcaattaattacattgggtgacagatctaagaagcttatgaccctgtccaaaaagagccatgaggccaggcgcagtggctcacgcctgtaatcccagtactttgggaggccgaggcgggcggatcatgaggtcaggagatccagaccatcttggctaaagccgtgaaaccctgtctctactaaaaatacaaaaaataaggcgggcgtggtggcgggcgcctgtagtcccagctactcaggaggttgaggcaggagaatggcgtgaacccagaaggtggagcttgcagtgagccaagatcgctccactgcactccagcctgggcgacagagtgagacttcatatcaaaaaaaaaaaaaaagccatgaattcacattaaatagatcctaaagtagacatagattcttgtatgcatgttattcagtacaatttccccctttactggatcattccatctattaacacattcccaaattaaaaacaaacgaacaaactcctttgattaccgttaccatcctatagatttctttatacttgtctctccttctcctcctcctaatctttttttgatcccattttgggcaggcttttactgctcttgtttagaatcaccaatagcttccaggttgctaaataaactgtcaatctcaattttcaccttctccatctattagcagcatttaacatagttaatccgtccctcaccatatacttttactttttaatttggaggtaaaccatacatgtaagaaagaatatgatagtttgaagcatggtcttaaagt

SEQ ID NO: 584993 - DNA, 4001 bp, Homo sapiens
gagggtgcatgggtctgactcagggtgggaatccctgccctcaaatgcttacacagttgctttgagaggggagggatgacgtctgcacacctgagacgtctcaagaggtttcatcctcagtatgtgagtgaccctgtggcccaggctgagtacctagggcccacgggacacagaagacaatgatttgagctgtgtgtctcatgggtgagaggatgcctgaaagtggggagcgtgaggccaggcttttcaggagtggggggatcatgaacttggggagataaaggaagagtgaaatctggatggggaatgggctgttcagaggcttggaggtgggaaggatcccaagacaactgaagatgacaggcatgattgaaggctgggagggagtgccaggcgcagggatgtgcgtgcaggagaagggtggggaggccgtgctgcttttgatggctgaggaggtgagactggagctaatgggccatcaggaatctcccagcagagtaatgacaagatgcaaatggcgttgggagatgatcctgacggcatggtgtatgggacctgggagctatcacaggagcccccagagggcctggcttaggggggaagctacgttcaaccagactagccttcactgccacttatccccaagtcttcaagagaaagtcacactgagtccttccctccttcacgcccctgcccagactctccagctctacctacacctcatcaatgccacaactttgtaatacaggactggggggcaacaaggttacctctcatggagggtctgaccaaggagcaacctggaagaggatgagatgggtgatttcgaacaagggcacagccagggctccagaaatgctgtcggtgatctggggcagggggcatggcctctgtgggggaacctcaaagtgggtgatgcttgcgtggcagcacatgatcctaggccagccacagagagactgaactagggaaaaatccccctttgccacccataccctcttactgccaggggcagccttcccctagctaggagaacctggggtcgacccagctcttagacagagaagttacccccaaaccctgtgtgacatgagtgaagatttgggcgtggtagcccacaaaaatattccccctcctcctctgttggactctacagtttcacaatcagtgttctattcctttggcttaagatttttgacccaagttatttttttaatggtgccactttaagttgttatcatgtatccacaccttagtatgaatgagtcaatctgatccttttccaggagtcgatttcgttgttgatagagatgaaggaaggctttaaaatcctagagtctaggacagtggggtgggggagactggtgaggggaggatcaggatgctggggcaaagaaggggcaaagagagaagagaggagggcacagaagggagagggtggacgagcctgggagggatgggggcaaatcactcacttcgtgatttggggatggggtgatcagagatagcctgagcagagaccgtagtacagccttttaccaactccctctccccacttgggtgcctggaccccctgttcctgtgtcttcatatctcctcgatgcaacagcctggagcgcaaactttctgggatatgaccccagcctggcttcctattctgccgtcgccacccgcagctggacaggacaggggctcttggcagatcggcaggggcgcagtcctggagaccaggacactctgggaagggggcgcgcggaggtttaggatcgaagcggcaggggccgcggggctctgcgtccagggccggggcaaggggacccggccagcgggaggctcacctgcaggacacggtgatctccaccttggtggccgggatgctgcccgccaaggagtcgaactcgctcagcgacgccatgtcctcaggctgctccatcgcccaccgcaccccccaccccaaattagtcaatccctgcgcgattcacgcctcctccggagcgactggagccctgggctctcccccaactccagagcctgggctgggcggcaaggggaggagagaggagcgcgaagagggggcgtgggaagtgagagagggaagagggcggagggagcgggggccgcggatcgaggagggggctcgggtgacgccgcgaggaggctaggggcccagtggggaagggcaaggagcccagggagcgggggcacagcggggaaggcagagaggggcgcggggagaggggctcggggagagggcaccgggagggaaacgcggagtcgtggagaggggcaccaggagagggacgcgcgtctgtgggcagaggtagaggggatgcagaagacagggagaggggcgtgaggagcgggaggcgccggatggggcgctggcggcgggggtggcggggcgccggcagcgcggagcccgagcgcccgggctgcgccgcctctccctgggtcttggcgccggcggcgacggggctgagacgcggctgcgagcgccacctcctcggctcgggcttcggctccggggcgcccgggctgcgggaaaatcaaatctgcccgaagccgcagcctcccgccgcccgggaacgccagagggggcgcccgcaggggccggggcggggccgcgggcggggtctgcgcgcagggtgagtgtgagcgtgtgtgtgtgcgcgtgtgtgtgtgtgtgcgcgcgtggcgggccgggggacgcggtccagatgctggggacgtggcgggtgacagcaagaggtggtcctggtcgcgcgcatcttcatttgcgcccgccccctctcaccacccctatctcccatcaggggtctccatcctgggggagggggagggttatgggaaccaacgggcgcctttttgagaaaggtctatgcagggttgagagggggcataagtgggagggaggtgtgcaaaaaagatcccctcccaggggcttgggtgtggagggtctctgctgagtgtgcgccctactcgggggcgggtctcagttcagaaacagaccctacatctccttctggggaggtgtgtgggggcgaccccagtgccaggagggactacctcggtttcccagtggcccaggtggggtcggtgcatgggcgcctcccccatccgtggttcccgccagccgcggcctcgccaagtcggctgccgaaaccacgcgccagcgcccttccactcccccgcccgtcgtgaccacacgactgagccagcctccaggtctagaagctcctgccacccagtctggtggcaaccagactgggagatcggcccgagctccctgggcttctatgcagccagcaccgagtaggcgcgtgctgtgtgcctggcgagcgaggggagagttgggacacctctcctgcagtcctcttcccagccaagcccctcgcgatcccccgccctagcccagccttgccctcccgggcatgaggttgcagcgcagaggcgtctccctgagtaaggctgcacacgtagacttgactctagcccatcctcagcctcagcctaagctttgccgagctggaacctccacttcctcgcccaccgcctggcacatcgaagccgatgtgcctcgggccggcggggaggccaaaaacctggtgctgggctgggcagagttgcgctctctgggccttgtttgtggcagcgggaccataaggggctcctccggattctgtttgaagtcaattcctggaacatcagatactgtcagtcaaagataaatacaagaacacattcctctgcctgttacaatttccccatggctcagaatcagctggactgggttctgcctcctggaacaggcagcaagggacagaggctgttaattcccctgacagccaggcacagctgggtcaggaggccccactccaaggagaataattctgtcttcccttcctgaggatgcaaaactgaactcggaatctctatgttccccatcccccacatacctggcataaacaatgctcaaagcatgcttgtggaatatgttctcc

SEQ ID NO: 584994 - DNA, 4001 bp, Homo sapiens
actcaatcctcaggaaacttgagctgatataggagctggccacagcacgggtgtcaggtgttggggagcacagtgtcattgcctacttcagggaatggagggaaagaacagggaccagaggagaaaagttgaagaatatgagaggctggccttatcccaatgactcctctcctttagatcattccttccatggccctggcctgggacagacctaagttcctggccagctttgcctctgactagctttgtggatggacagtcatttgccctgtctggatctcactttcctcacctgtaacacacgaggagaggggataatgccatctgcccaattaacctctttttttttttttttttttttttttgagatggagtctcgctctgttgcccaggctggagtgcaatggcatgaccttgactcactgcaacctccgcctcctgggttcaaatgattctcctgcctcagcctcccaagtagctgggattacaggcatgagccaccacacctggctaatttttgtatttttagtagagatgggatttcaccatgctggccaggctggtctcgaactcctgacctcatgatccacctgcctcggcctcccaacaatttacctcttaactcagcagctcacatgagggaatagaaagaaagaaagaaaaaaaaagcggggagtagatagagaagactttgccaagaatgaagttgtgagaatgtgaagcagagggctggataggagactgccacctggcccaacctccgctccagcttggggaagggtcgggaggaggactgggaggagctgagcccagccttacttttcttgccttgggggaggccagtccttggcctgggagggctgaagctgctggggctgagaggagtggtgcagccagggctgggagtggggggattgtacaagtaggagcctacaccaccaatgttcacccctgaagagagaataggggaggtcaggcttgagcccccagctcccagccacaaggagggttctgctgacccatggccccttaaggctggtacttacccctgggtccaaagagagccccatagcatggcttgtggcagtatggcctcccattgtgctgggcacaagcagagggaagtgggttactcaaggccagcgggagccatgccccacaggccttcaccccagacaggctgccaggtgtgtctgtccactggctgagtctggtgggcctgggaggggtgggggatgggctggcatgccagcatttccactgtggtcaagggaggaagagcaagagcagctcagaaggtgacgctgcttcccactcaccctgatccccaaaaccatgggatccacagtcacgacccaggttcccaaattcctggctggtgtggggtccaccaggtgggcggccttggggttggctactgaggttccctttggcaggcctccagtgctgaagttgggggctggtgcctggggggtgggaggcagtgatgtaaacagggcagtgctccctggccaggtcttacctctgcatgcccgccaggggacaggatgctgtggcagcgctcacatttcaggcagaagcggtgccagttcttgcccagggagctcaccttctcagctgtggaggacaaagtggaaccgagctgcgaggagcctgtccaagcatagggcccctcctttccctcttcggccctctagggaattaggttggcctgccctgcttcctggagatgagtgtctccaggaggccagctccatcccgctccggtttcacactccccacagagctctcagaggaagggagaagacccgagtgggagcgggtggtgcggagactaccagccgctgcaggtgaaaagggtgtctgggactacactgtggctagccctccgcgtcctcagggaatccagcggctcccattcgccccatcttctccccctccgcagcccgggcctcaccgaagaaaacaggttgctggcaacgcggacaggtccagctcatagctccgctccaggcagcgcacgcggcacacagtaggtacgccgctgcggctcagttccgccccctccgcaggctccacccacggctcagctttgagcctccctgggcggaatccgcggttcctcggcgctcattggttatcagaaatttagaaccactccacttgggagacaaagggctatttcgctgttacttcaaagagcattaaagcctcggtcagacccacggggaggagagaggatcttgaagccgtggactccagactaggaaggcacatgtgtaacgaagacacctggacagggagctctactagtttctggagcggtaaggacaggaaaaatgtccacagtgcagacatcattaaaacactactctctccaaagcgagggagtaggcattctttgaaatgcaaaattccaccttggcagtatagcaagtggttgaaagcaacaaaatctggagcccgtctctggtaccctactctttgacttcaggcaaattactgaacctccctctctgcctccattttctcatctgtgcaatgagtatgataacagtctctgcctcataggattgttatgagagttaaataggttaatacatgtagagtgcccaaacagcgcctggcatgtaaacgctgtaacagctatagctatcactatgatggatcccttaatgaactcaagactcggtttggaagcctcagaacatggtctgtatacaatcgtttactcctaaagctgtagggtggctggacacagtggctgacacctgtaatcccagcactttgggaggccaaggtgggcggatcgcctgaggtcaggagtccaagaccagcctggccatcgaggcgaaactgcgtctctactaaaaatacaaaaattagctgggcgtggtggcgcatgcctgtaatctcagctactcgggaggctgaggcaggagaatcgcatgaaccgggaggtgtggaggttgcagtgagccgagatcgcaccactgtactccagcctgggggacaagagcgagactccatctcaaaataaataaataaataaaaatgaaaaccaactacacatttctaatctggtttgctttaaaatttttaaatatttgtgtttttaatgaatgtatttatttgaggcagggtctctgttgcccaggctggaatgtagtggtgcatcgtagctcactgcagtctccacctgcccggctcaagcgatcctctcactttagcctctggagtagctgggactacagacacatgccaccacacctggctaatttttgtattttttgtagagatggggttttgccatgttgcccaggctggtctcgaatttctgggctcaagcgatccacctgcctgggcctccctaagtgctgggattacaggtatatgcccccatgcccagataaatatttgttaaaagtagttcaatagactctctggcaccattaaagagatcctggggactgcccagtctgtgggctgtaatgttgatggccgccaccctcatgacatcatagatgatatcaacagtggttctgtggaatgcccagccagttaagcacaaaggaaaatatttcaataaaggatcatttgacaactggtggaaaaaaaaaaaagtagttcaatagtgcttcaaaggatatttcaagaaatttaaatccagagaatggaagaaatatttgcaaatctgataaggatctagtaaccagattatataaataacttataatgcaataacaaaaagacaacccaattaaaagtgagcaaagtatttgaatagatgtttttctagagatacacaaatggccaataagcacatgaagagatgctgaatatcaatagtcattagggaaatgcaaattaggaccacaatgagataccattttatactgactaggatggttataattaaagagacaaatattggcaagaatgtggcaaaattggatccctcatacattgttggtggcaacataaaatggtgtggccacatt

SEQ ID NO: 584995 - DNA, 4001 bp, Homo sapiens
atatttttccaaatgagttttatcaaatcatacttccatcagcttcataccctcacctattatttgtattctcagcttttttcaattttaatctattatgtttgtgtaatactatttcattgcagtttttaatttatatttgtttaataacaagatattgagcttatttacatgtgcttatcagccactttgatcccatcttttctgtaatctctgttgaatgttttttccatggttgtaattaggttggctctttttcttattcgcttgtatgaattctttacatgttcttgatagggcaattgtcaaatgttttacgaataccttcccttagtctgtggcttattatttgaactatcttagttgtagcttttgttaaacaaaagtttctaattcaaataaatctagctaatttttattttcttatgttagtgcttatgcatgtgttggcatgtgtgtgttctatttaagaaattttggttatccaaaagtaatgagtcataaaggcattttcttctataagatagatttaacattgaaaaaatattggagaacaaagctgtaggatttacaataccaagtattaaaactcactataatgctgaagtcattaagacagagtactagtaacacaaatacagataaatggaccaatggcatattatgtaatacagaaacaaattcacatacatagtcatctgatttatgacaaagtctcaaatgcaattgagtggggaaaggatgatcatttttataaaagagatgaggtcaatggaatatctaatagagaaaagataaggattctgataactaccttccactaaaaacaaaaattgttttcccttgagttatagatttaaatgtgagtaccatcttatttttacaaatctaaatgtgcaaactatcatatttgtaagacataaataccagctatttgatgattatctgatattatttgaagtgtgcagtcatatttcttccaaattctcttgtctaatgattttctctcattatagtcaatttgatccattgcattatatgtaaaaggtctttgtgaaaacaaaaggaaggtggttggtggttgctttggtatatattactaaaggtaagatttccataagcagttttggagagaataattcagagagtacaaagcattaatgggattgagatagaaactggaaagggagtgagggagcaggaagggcccaaagggaagttgaggagggctgaggtggggcacaaaagttgtgtaatttacaagtccaagacctagcatgaagaccctggagacttgaaacaagggtggagactggcagatggaaagactgcagaaagaagtttggacagcttaaaatcctgcccgctggggcccatcactagttctcaatttctccttcatgctgtcttggttctgatagaggctgccttacagtctgtaaaataaatctttaatcgccattatccattaaatgtctagcaactcccgaaaacaaaatgtcaagttataaaagtgacagaggaccactacctgtttgactatggccccttattactggctaattcttttggcagcattttcaatattttgtgaaataaaagatgcctacgttgtcattttcagatctatataaccctatggtaattgtccctacgtgaaaaaatgtttcttctaagccctccccaagaagttcatgagaatgaactcaacatgtaatattactttatatttggatagtatatcagcttataaacacctttattaaaagcatggagataactaacatttacttttagataacaatagcattagaataaaactttgcatgtaatctcatttaacattataacaatgcttttgggtagtcacttatgaatcttattttcaaataaagaaactgacaaagatattatataacttacccaagtccacacagcctttaaatttgtgtcctgataagaaccaagcctttctctatgtagtgtatttgtgcttttaaatgacagtccacaggggagatttgttcaatgaggtagtcagtacaaggtaaatgcctataacagatcaagggatttacggtggacaccaggcatgaatacatgataatcagaacaaatctagagtctgtgaagattacaaatcatgattatggggacatttctagtttgtaaccaaggcaacatcatcaatggaactcaccaattttaaacttttaccctgggaactaactgcaaagattagttgcatgattcagcagagccacaatcagataacaaaggtcactgtaagggaaaatgacttgctggtccagaaacttctcaactttattaaattcattcagtaattatttattgaggtcttaagatgatttatgctctcttctagatgctgaggatacatagaatcaccaaacatataaactacacaatcttatggagtttggtaactgttctataatgtgtcacatacttggagaggctctgggaatgaaaagataagtagtccattttcctaagaccttcctggttaaaaggaaaacttctgcaatttgggagaattctaatagagatttgtccagaaacaatgtggaagcaactaactaccttgagaggtctagaaatactgaacactaaattgtaaaacactaaaaattccagaaatcatttgagtcacatgatgagaaatatcacaggacacttagaacaaagaaagaaatatcacacagacagaaatcacatatgagaatagaaaatttactctgaaactaggtgtaatcagatgtttttgaattgtcttattattctgaaaagttgggaaatgtttgtatatgtgagtgcatggtcgcttatattgaagtcatagcttgctggcctctttttaaaattatgaattaagtctttgttctttgtaagaaagaatacattattatttaataaaaaatatttttcttgtatcttgcttaagaaagggcaattgaatatctaaaaggaaagagtaaaaataaggtaagaattgtgtagtcataagttattttgtgttagttctggggtgagggttaggaaataaaaattaaaagaaagatcagagtctcttaagatagaactttctggtcttgttaaagtatataatgaatgtccagaaaaccatctgcaggaaaggagaactaaacatcactaaaaattgctcacctatacctagaagaatttctcttttggttgagggagatggtgttaatctaaaaacatagaaaagcttatctgtaaactctttcatagataagatgaattatctttagcttaactttaattggctttaaagaattttacatgatcttgaaattaacacttccaaattattgagcaactttctccaacaaactacattgtaaaaagaaagctgcaaaagaatgctattacttcaccaaaccagcatggtttatatattagaaatgtataattgtcatttatttcttgctaaactgctgtttataaaggagagtgttgattcaacatcaagtcaagtgtttatggaaacttaattgctctggttttatctgttggtcctggcaattcctggcattgctctacccaacacaatgctgtctgtatttatagcactgatgtcttcatatagagttgctatccagcttcatatatggttttaaaagaatttgggaagtgttggaaagcaaggaataacttgatttgcatgtgagtcccaaacatgggtgccagttggctgtttctgttcataaatttcctattttcatagattgttctctttctgtttaagctttttagcatagtaggaaactatctacaataacttttttccctaaaataataatctgacacatttatctagcatatcataacatgatagaatatttctaactggattatcccagaaaaatcttgagagatagataaaggctaatgtgtttacaatcacatcatgtttgtctgaatatatccatttttaaaagaaactttaaatcaat

SEQ ID NO: 584996 - DNA, 4001 bp, Homo sapiens
ataggaatagaggaagtcaaactctttgtttgcagatgacacgatcctatatatagaaaactccattgtctcatcccagaagattcctaaactaataaacaacttcaacttcagcaaagtctcagaatacaaagtcaatgtgcaaaagtcaataatattcctatataccaacaagaggcaagcagagggccaaatcatgaatgaactcccattcacaattgcttcctaggaatatagctaacaaaggaagtgaaggacttcatcaaggagaactacaaactactgctcaaacaaatcaaaaaggacacaaacaaatagaaaaatattccatgctcatggataggaagaatcgatattgtgaaaatggatatactccccaaagtaatttatagagtcaatgctattcccattaaactatcattggcattcttcacagaattagaacattttattttaaaatgtatgtagaaccaaagaagaccccaaatagccaagaaaattctcagcataaagaacaaagctggaggcatcactctacccaacttcaaactatactacaaggctacagtaatcaaaacagcatggtactggtacaagaacagatacatagaccagtggaacagaatagagaactcagaaataagaccacatacctacaaccatctgatctttgacaaacctgacaaaaacaagcgatgggtaagtatttctattgaataaatggtgctgggagaactggctagccatatgcaggaaattgaaactggatcctttccttacaccttatacaaaaattaactcaagatggattaaagacttaaacgtcaaaccccaaactacaaaaaccctaaaaaaaaatctaggcaacaccattctagccataggcatgggcaaagatgtcatgacgaaaatgccaaaagcaatttcaataaagcaaaaatagacaaatgggatctaattaaactaaagagcttctgcacagcaaaagaaactatcatcagagtgaatagtctacagaatgggagaaaattttttcggtctattcatctgacaaaggtctaatatcaagagagtacaaggaacttaaacaaatttgcaagaaaaaaacaccaccaataaaggtgggcaaagaacatgaacagatacttctcaaaagaagacattcgtgcaggcaacaacatatgaaaagaagctgaacatcactgatcattagagaaatgcaaatcaaaaccacaatgaaataccatctcactccagtcagaatggctactattaaaagtcaaaaaacaacaattgctgataaggttgcagagaaaaaggaatgcttttacactgttggtgggagtgtaaattagttcaacaatgtggaagacagtgtgaaaattcctcaaagatctagaggcagaaataccctttgacccagcaatttcattactgggtatacactcaaacaaatataaatattatattataaagatacatgcacatgtgtgttcacagcagcactattcttaacagcaaagacgtaaaatcaacttaaatgcccatcaattataggctgggtaaagaaaatgcgatacatatacaccatggaacactatgtagccataaagaagaacacgattatgtcctttgcagggacatagaaggacttggaaaccattatccctaacacactaacacaggaacagaaaaccaaacactacatattctcacttgtaagtggttgctgaatgatgagaatgcatggacacatgagggggaacaacacacactagggtctgtcagaagggaagatagggggagggagagcatcaggaagaatagccaatggatgctgggcttaaaacctaggttatggaatgatctgtgcagcaaaccaccatggcacacattcacctatgtaactaacctgcacatgtaccattgaagttaaaataaaagttgaagaataaaagaattatctcaccaagctctgtcctggtagctgcaaagaaactggactatgaatgcgtaaagctcacacacacacacagacacacacgaaataactttccaatttttttttgaactttaagaaaattcgagccctttaaagcttagatcttgcctttaggcttttgcagatttatttaagataaaatcaatataggcctactctcatagtatgaacctgatagcctactacaagcgatatgttcagtgattctttctggtccagaaattccaagcagatcagaaggagagagagcaaatgggtaggagtgaatcatgacattggatttatatagtcccacaaattactctctcacaaagttctctttctattagaatggaatgtttattgacaatatagatgaaaagtcgtggccttatataaatttgggagccaattttttaattcagaccacgagcagaaagacaatatgttccatgtgatattactttaaaatcacttccatcaacatgacctggagaaaaacctcaacagtcaaactaatagtcaaaaatctctgatctagtaatcacagtgcacaaataaataaaatgatgtatacaactatctaccagagtatgctgtatattatccgaatatttttcaaaagcaagcaaaaacaaggatgctaccttagtctctcacaaaggcatatgtttaattgtacctgttccaggttctgtttctttacctctcaccttgtctgctaaggggacgtttttctccactaatataagaagaggaagaattttcttaatccatttacaattcttccttaatgcagttaagaaaatgacaatattcctgtgtaatagaagatattatcatttctgtcttatatgcgaatggagtatggttctgagaagcaatttaaaatctcggaactatagaaatccaggccccatagcttctgagtctagatttttaaataatactgtcttctgctttacatcattttaaaacagatgaggtaaatgaaacaaaattaaaaatgccctttctctcttgcatagttttagtgagggtgatatttctactaattcataaattggtcaccaagaacaaacaatggggtcaatcttcagcaaactaggaagacattttgcacagagaaataattttgtggtgaaaactcagatgaaataatgtgaacacgattcagagttcaatgtgtttgatgtggctatattaatgaaacataggttgagtatcccttatccaaaatgcttgggaccagacacgtttgggattacaaattttttattttaaaatatttgcatatacataatgagatatcctggggatgggacccaagtctaaacataaacttattcacatttcatatatactttagcctgaagataattttatacaatattttaaaataattttgtgcatgaaccaaggtttgtgtacattgaaccatcagaaagcaaaggtgttactatctcagccacctacttggacaatctgtggttgcttggcaatgccattatttctgactctaaatatatatgcaatctataaccaacaattttcttacagttattcacacataaatacttaacagaaaacaattatgatataccattaatatagtgaaaaatcatgtgtttaggctaactaagcaatagagtagcatcaccagaatacctgtatctgctgttaaacagcaacaacaaacaacagcaagtttttagtctccacctataatgtgttttgattaaaagcttactacacactgtatttttttaacttcctctgtgttttctccctcccatgttttttatccttttctttacttttatttttatttttttggtacagagtgagtgtatatatttatggggtacatgagatattttgatacaggcatacagtgcataataatcacatcagggcaaatgaagtatccattaccccaattatttatcctttctttgtgttaaaaatctaattctattattttagtaatttttaaatgtgtgataaaatattgttgact

SEQ ID NO: 584997 - DNA, 4001 bp, Homo sapiens
atgtggcctttttggactagtatttctatattgacaacccaagacaggttaactactgtgaaggttaccaggattctgccttatagctgaactctcatagttcagctgtctatgatttttactttctaattatcaactacctgtagcttattggttacgggtgcattctttggaaaccatcaggtctgggaaatctatgccaagcttcagtgtttttcttatgtaaaatgtagatttttatatcacaggtttttgctttgaagactggaagggacaatgtatgtaacacctctaatacaataaacacattatgcacataatacaaataaacggaaattattcatgtttttattatcttttgcaatgtctgctagtttgttgagctcataagagctttctataaacatatgctgtttgattgaattgctaattactaagtgtttaagagacatgtgtttccttccaggtgttataggaaaatacaatcagtataatctaattcgagattcacatgttcaaggcctggttctattagacaccttctggctgactttaggaaaatgctctaacatctgggctgttgtatcctcatcagctcattgaaagccatacacaggagcctgaagagttttgtatagctcaatcacccagtgtatgcatctgatgagccagaattctataataggccatgatgccatactctcctctttgctgctcttctctctcataacctcaaccatctaacctatactcatcttcattgagtcaatgaaagcaatgtcactgttggtgagagtatattcaaggaaaaatatttttttctattccatataattacattttattcctttaaacccatattgatatatagttgaaaagttggctaccattttttttctttgctacttactaatggtgaagtactgtgctctttcttgcaggtgttttaagatcaggatgacatggttttcctagagtgtctttaggagggccatggtgtataattttataaccctagaacaaggaaacaaaatatttaaaataaagatgtgaagaatacccttatagatggtatctataatctttgtcacaaacttaaattttgactcaattgtttagtattgtttctaataatttactgtatttatttgatttcagcgttaagaccatattgtccttctgaggtcagattgtatttcaacgccctgatatttccttcaaacactaacaaaaaagtggacttcttgaagttcagtaactactagttggctaacttgcttggaaaattgcaaccttttttcaagactcccaaccccttatctaggacttcaacccattctttaaaagatcatttccataagcagtgtcccacatggtaagtattaactacgtggatttgggggtaacagctttgtctcttcattttttttttaaattctggaagccaatagatgatataaagtccagcagagtcaatgaccccaactctaattgttattacagtttctaataactgtacattcaaaacatcaattagaaactaagagtcttaatttgacttcgtaaaaagcagattgagaaatgacttcaggcttctactatgattcaatgggtcttatgtacttagaatgatttctcttttaaggtaggtaaagagtttcaatagactaaacatagagaagcatgttgaaagttatggtaggtcggcgctaagcaacaaaattgaactctcagtctgcccggcattagctatgtgccctccagatgccggaagaggagcgaaggaggatcagaaaccccctcacctcaacgatggttctctcccctgtgcttcaccccacctccccgtccctagccatttctagtctccaatccgggtcttacatttaccctggctccagagcacagaccttcctgcagttgggccggcgcgttgcggcgttgaggagctgcggcgcgcccctctcaccgcgattgttcacttgccaggcgccacgtgtgggcgacgtcactgggctttatgctttcatcgccgctatctgcctacgtgagctgctctcctcccatcgcccccgcctcccctactacggagaaaatcttgcacgttttcccttgtgaaaagcagagttctctttttctcattaccaccagttgatgaggaaagaaaatgtctgttcgcatacctgcgccgtactaggaggaggagggaggtcatataaggattcgggttgcccagggggtggcttgaaaaaggaggcgttcgcattcaaacaagaatgcctgaattaatgtagttcaatttaaagagctaattaggagtccacaggtgcttaagtttgcagtgcgctgccagtgtcatgccaacgacgcactccagttacacaggttgtcagtttcaggctccctcataaacacttcatgttcttgtccctcttccccgttggcaacagttttatggtgagaaaattcacgaagagtaacaggaacaactcttatgaaaatacgcagaactcctgacccaaggctactggctgcaagtttagcatacgtatcaagcatgggttaaagacatgttttctctctcagaaggcggatgagtaataggtgcattttcttctattcacagttgttttcaaagcgaaaaggagtgaattcgcttatgacctagaggaagagagatgggtcaaaagatgtcaagccaaggattaatatccgtcataccttggttctctgtaagccatgcaataagaggcttgagatttcaccaactctggagactcacttgggcacaactgaaactataacaaacttggtgctcagtgccattttcctttggcagtgttacaaggtaatttcaagggatcagcacacagacattgttttagttttcttttgctgcttatttcagttcatgcagcactgactaaaaattttggaatttagactgcttaacgcttatatctacatccaatatcaaaattcattactgacagtttgcctttctaaatatttatgaaatctagtcctcaatctgtccctcacttctatattcatgttttcaccatatcttgcttaagttattaattggacatttcaaatacctatatgcacaaaatctctgcctacctatttgttctttctttctagtgccgaacaattcattctcagcactataatagtctatcatttactgtgaatatcttatttttcatttttggagaagagtcattcctgtaattattacttgttcccatattcacattgatgatatcagaatgagagcaacttgagcgctgtggtgccagatattgttggtgaacctgaatttcagaaattggctatgtctgtcttgattattgctgtatctccaaaactaacacaataccaaatataggtggtagtttgtaaatatttgttaagtgagtaaatattgacccgacatagattcttagaaaatacagaaaaaaggacataaaatctctttcttctaagactcatagtactatgagagaaaggagtatgtatatgaataagtaaagaatactattaggtagtgtagtttaatgctaagtagggcgaccaaaaatatatacagtaattgagagttctgtgagttgatatgatctgggtaaaacctaggaaagttttgacatttgaactgttattgaataatgcgtatggcttgatttgaagggagaaagagttgaagaacaaaagcagataaatcattatatcacaaggcatattcaagacagaaagactgttgaaaaggttggggaaactttgtatagaagtctaaggagatttgcttctctgtataacatgggaaagtaatttcattgacattttggagggttgggaaattctttgatcaaaagaatgtttcataaaagccacctgatctcactgcatggggtgatttacagagctgagaaattgatggcagcaaaaataagtgtggtaacaattccccagattaattttgtagtagtagaaatagg

SEQ ID NO: 584998 - DNA, 4001 bp, Homo sapiens
cctgcgtaacatggtgaaacctcgtctctactaaaactacaaaagttagccgggcatggtggtgcatgtctgtaatcccagctactggggaggctgaggcaggagaattgcttgaaactaggaggtggaggttgcagcgagccgagagtgtgccactgcactccagcctgggcgacagagcaagactccatctcaaaaaaaaaaaaaaaaaaaaggaagaagaaaagaaaaagaaaaaaaagaaagaattaattgggttatcttttcatattagttattaagatagacttcaaacatttgttgacaaaaatttaatattattgtaggaacagataaatcaactggtggaggaaaatacaaaacttaagagacagaccaaacatcgtaacattaaaaagcaaaggaggaagaacagactatagaaatattttaaaggattacgtggattagaaaagatgtcaaaagcattaacacatgtgagtataatgtgtgcactataggtatagacacatttataaactagtcacagcacagaaaagtatttgatgcaatattttcttacttaaaatttaatagttaatctttattctgatcactttctttcatcttattatgtatctgtgatacagaaagcagcctatgccaatatgcaaagtttgcaaaactgctagacttcatcaagtaagaaattcgtaaagatatccaaataagaatagctgtcttgcatttcttgagaagcacttttttttcaaggatgaattccctcccttttacttgaattcaataaataacgtaactgaaattcatagcaattatcagatttacattacttgagaattctgacactcttcctcccaattcatccctgcctgttacaaatcagaagccccaatttacctcataacttatcaatgtagggtaactcccaggcttgaaacttgtcatcaatttaatttcttttgatccactttcagaggtcttagtcatacaggcagacattctagatttggttttaactagcagaagaggcaacaccggatcttctatggctattgcaaatactcccagagtttcctggatagcatttagccacagggaagaaaagcattttactttaaaatcttctgtctagtggtaaataacccctttcatgttgtcattaggtagttctgtggtctcctactatctgactcttcagaatcacttctaatatgctacggaagataaagccgtatgtggaaattgcttccttagatgaaatatgcacgatagatattatatttaaattacctacataaacatgactgagtagactgacttttgactgaaaaacttctaaaagccttttttttttgtttttgatctgagtgcatttcatgaggtaaattgcattttatgttgatggtctttaataaaatactttttaatcttgagatcagtgctataattttgttttgaccaatttaaaacttttgctatggcatcccatatagctgtatgttttaatattagtaaaagttactgatgtgaaagtatgcacacacatatattcatagtttttcatttttctattaaaaatagttctagtacaattgtttccacaagtcatagacatgggaattagttatattactttagaatgaaaggtaaaaatttatttaaatttcaaactggataaaagtgcttttggaataataaagctgtctatgtattagcttctcagcttaaaatgaatatattaagataattactctcattaaaagttatcaataaactttggaaaattgtagataaaatatacgaatatatcactttatcattgataaggtataaatgtgttgttcaccttgaaataaataatgttcaccttgaaataaaggagttatcacttaccagtggtttccagagcaggatgaagtatttgtttcatctattgacagaaggaaggtgcagagagagaaggttagagccgtatatatgaaacacctatttcctgttttggcaaattctggttgtgcaagtaactctagatcaacaaggcctgaaacaggatttgtcataccagtagtctcaaatttcattgctggttttctagtcatgattttgaaattatttggtgattcctcaaatggcttttaaaaataaattgctatatcaagttttgtaattgtgcatttattctttgaagttcatatattacaatttatccatgtttttgccagtcaatagtttgaaaattcttagcccaattattagcatcacaacattagagttttcagaattatttctgttggattgaaattaagctcataatttttatgaactctagagaacacaatgttttttacagctatctaaaatgtttattaataatctattggacattactgttttggataataattttatctttaatgtttgtaaatacaaggccacagtgactttcagaactcaatggccaaacacaccataactcattggtatttctatattcaaagatgtgctgtatttacttgtattttctggttgtataaaattaaagataatattgatctccaagctaaattatcattatttggttctgttcatctatggaagatgtcaatcattccaggcttgtttccatagcacaataatgaagtggggtggactaacaatttcagatttcctctgattctaaaatacaataatcttaaatattgagtttatataaataaagaagtataaattaataaatcacaagtagcatatacatagcacgcagacatttctgcatgctcatattggcatatagattgcaccttgtggtgcataattcaatagtttctgttcattttcatttttatatttagctttattgatcaatgtgacaaaatgtataatcacagatcaatgtctacacaataggcacattttaaaattatagttaattttgagttcaagaattggatacttctaaatgtctgttataagagagttgagaactcagaaactcaggtcagattttaccattaaaaaatggttaaccatttgctgccatgtctccaagtaactcctagaatctgtttactttatgaacatgtgaagtggaagctctcaataaaccaaatcagctatgtggaaaaaatcaccatggaacaaccttctacacaatcctctttctgtggcaaaatgtattttgtggggaaggaccagacccagaagcatccacagcccattctcttctctacttagtggtgtagaatgttgttaaaagcttgatatttctgttttaatggaaatgggctaaatttctataccaatgtgtattgggaaatttttatattttattattttattttatatcatattttattttatttgaagcaggatctcactctatcatccaaactggagtgcagtggttagatcagaactcattgtagccttgaatttctgggctcaagggatctcctatttcagcttcccaaggagctgagaccatggtgtgcactactatacacagctaattttttaaatttttttgtagagacagagtcttgctatgttgcccagctagtgtcgaatttctggcttcaagcaatcctcctgtcttggcctcccaaagttctggacttacaggcatgagccacagcacctactttattaggaaattattattctgattgtaaattttcatatttatcataaatgggaataatattaattgtatttaattgtgatacataatatatgtaagctgcctgccatgtagtaagtatttccagtgttaattctctcccactttatgcacttttcttctgtatctagacaaacctacccctaatatttgtaagctgtgggattgcacttgagttttaggacatggtttgacttactaagctataggcagttctgtgagaaattaccataagtagacacaaaacagtataaaaaggaaaaatatttttgcctcattattcaaacttgatagtttttctctaactttttactgagttatg

SEQ ID NO: 584999 - DNA, 4001 bp, Homo sapiens
acctcgtctctactaaaactacaaaagttagccgggcatggtggtgcatgtctgtaatcccagctactggggaggctgaggcaggagaattgcttgaaactaggaggtggaggttgcagcgagccgagagtgtgccactgcactccagcctgggcgacagagcaagactccatctcaaaaaaaaaaaaaaaaaaaaggaagaagaaaagaaaaagaaaaaaaagaaagaattaattgggttatcttttcatattagttattaagatagacttcaaacatttgttgacaaaaatttaatattattgtaggaacagataaatcaactggtggaggaaaatacaaaacttaagagacagaccaaacatcgtaacattaaaaagcaaaggaggaagaacagactatagaaatattttaaaggattacgtggattagaaaagatgtcaaaagcattaacacatgtgagtataatgtgtgcactataggtatagacacatttataaactagtcacagcacagaaaagtatttgatgcaatattttcttacttaaaatttaatagttaatctttattctgatcactttctttcatcttattatgtatctgtgatacagaaagcagcctatgccaatatgcaaagtttgcaaaactgctagacttcatcaagtaagaaattcgtaaagatatccaaataagaatagctgtcttgcatttcttgagaagcacttttttttcaaggatgaattccctcccttttacttgaattcaataaataacgtaactgaaattcatagcaattatcagatttacattacttgagaattctgacactcttcctcccaattcatccctgcctgttacaaatcagaagccccaatttacctcataacttatcaatgtagggtaactcccaggcttgaaacttgtcatcaatttaatttcttttgatccactttcagaggtcttagtcatacaggcagacattctagatttggttttaactagcagaagaggcaacaccggatcttctatggctattgcaaatactcccagagtttcctggatagcatttagccacagggaagaaaagcattttactttaaaatcttctgtctagtggtaaataacccctttcatgttgtcattaggtagttctgtggtctcctactatctgactcttcagaatcacttctaatatgctacggaagataaagccgtatgtggaaattgcttccttagatgaaatatgcacgatagatattatatttaaattacctacataaacatgactgagtagactgacttttgactgaaaaacttctaaaagccttttttttttgtttttgatctgagtgcatttcatgaggtaaattgcattttatgttgatggtctttaataaaatactttttaatcttgagatcagtgctataattttgttttgaccaatttaaaacttttgctatggcatcccatatagctgtatgttttaatattagtaaaagttactgatgtgaaagtatgcacacacatatattcatagtttttcatttttctattaaaaatagttctagtacaattgtttccacaagtcatagacatgggaattagttatattactttagaatgaaaggtaaaaatttatttaaatttcaaactggataaaagtgcttttggaataataaagctgtctatgtattagcttctcagcttaaaatgaatatattaagataattactctcattaaaagttatcaataaactttggaaaattgtagataaaatatacgaatatatcactttatcattgataaggtataaatgtgttgttcaccttgaaataaataatgttcaccttgaaataaaggagttatcacttaccagtggtttccagagcaggatgaagtatttgtttcatctattgacagaaggaaggtgcagagagagaaggttagagccgtatatatgaaacacctatttcctgttttggcaaattctggttgtgcaagtaactctagatcaacaaggcctgaaacaggatttgtcataccagtagtctcaaatttcattgctggttttctagtcatgattttgaaattatttggtgattcctcaaatggcttttaaaaataaattgctatatcaagttttgtaattgtgcatttattctttgaagttcatatattacaatttatccatgtttttgccagtcaatagtttgaaaattcttagcccaattattagcatcacaacattagagttttcagaattatttctgttggattgaaattaagctcataatttttatgaactctagagaacacaatgttttttacagctatctaaaatgtttattaataatctattggacattactgttttggataataattttatctttaatgtttgtaaatacaaggccacagtgactttcagaactcaatggccaaacacaccataactcattggtatttctatattcaaagatgtgctgtatttacttgtattttctggttgtataaaattaaagataatattgatctccaagctaaattatcattatttggttctgttcatctatggaagatgtcaatcattccaggcttgtttccatagcacaataatgaagtggggtggactaacaatttcagatttcctctgattctaaaatacaataatcttaaatattgagtttatataaataaagaagtataaattaataaatcacaagtagcatatacatagcacgcagacatttctgcatgctcatattggcatatagattgcaccttgtggtgcataattcaatagtttctgttcattttcatttttatatttagctttattgatcaatgtgacaaaatgtataatcacagatcaatgtctacacaataggcacattttaaaattatagttaattttgagttcaagaattggatacttctaaatgtctgttataagagagttgagaactcagaaactcaggtcagattttaccattaaaaaatggttaaccatttgctgccatgtctccaagtaactcctagaatctgtttactttatgaacatgtgaagtggaagctctcaataaaccaaatcagctatgtggaaaaaatcaccatggaacaaccttctacacaatcctctttctgtggcaaaatgtattttgtggggaaggaccagacccagaagcatccacagcccattctcttctctacttagtggtgtagaatgttgttaaaagcttgatatttctgttttaatggaaatgggctaaatttctataccaatgtgtattgggaaatttttatattttattattttattttatatcatattttattttatttgaagcaggatctcactctatcatccaaactggagtgcagtggttagatcagaactcattgtagccttgaatttctgggctcaagggatctcctatttcagcttcccaaggagctgagaccatggtgtgcactactatacacagctaattttttaaatttttttgtagagacagagtcttgctatgttgcccagctagtgtcgaatttctggcttcaagcaatcctcctgtcttggcctcccaaagttctggacttacaggcatgagccacagcacctactttattaggaaattattattctgattgtaaattttcatatttatcataaatgggaataatattaattgtatttaattgtgatacataatatatgtaagctgcctgccatgtagtaagtatttccagtgttaattctctcccactttatgcacttttcttctgtatctagacaaacctacccctaatatttgtaagctgtgggattgcacttgagttttaggacatggtttgacttactaagctataggcagttctgtgagaaattaccataagtagacacaaaacagtataaaaaggaaaaatatttttgcctcattattcaaacttgatagtttttctctaactttttactgagttatgactaaatgaccactagat

SEQ ID NO: 585000 - DNA, 4001 bp, Homo sapiens
agtcttcatccacctgtcaggacatggaagccaagagggaacccatatcaaaatcctcatctttgacctgggcaaaatgctctaagtgatgccttatcatcaacacaactgcatctgttgtgcttgtttctcactcccaactcagcagaagtacttgtgtctctccctagttcacctacactctctcccataaaagctttggcttttcttttctaaggataagtagatacagcaatctttttcttagacattcttttcaagatctttgtccctactccactcctgtatcccgtctctaggaaccagttttgtcctctcagctggctaaggaaggtggaagctgaacagcatggtttctgaacaaaacatttcaatgtgtagcatttcagttttcctaaaggccacctgagacaagtactagcagtgccactttagtaacaaaagatacaggccgggcgcaatggctcacgcctgtaatcccagcactttgggaggccgaggcaggcagatcacctgaggtctggagttcgagaccagcctggccaacatagtgaaaccctgtctctactaaaaatacaaaaattagccaggcatggtggcaggcacttgtaatcccagctacttgggaggctggagcaggagaatcgcttgaacctgggaggcagaggtggcagtaagccgagatcgcaccactaccctccagcctcggtgacagagtgagacccagtctcaaaaaaaagaaaaagacacaaattgactagcccaacgttatattgctggacggtggcagactcaggacttgggccccagttttgccactttagcacaggttcgtcggggtttataggggggactctttgctgataggaagttttcaaatagcatgtaagagaacagtgcagaagtggaatatgtgaaggaacgtctggtgggaagatatgtgaagctggcaagtagggaggttgaagagaactcacttcacagaagaattcattgccacggagcccacagaaccaggaaatccaggacacctcctctgagctgctcatcttcacgtcagctagaaaaagaacagtgtcagtaaagctcaagttctccttccctgcctctggtatcctccctcctcccacattcggccctccaaccacgggagaattcggaaccaccctttcttaaagcaacccaaactctgaagcactcctctccagctcctctaatttacatctcagccccttttctttgaagttaaacattctttggggtcccaccacttgaaagaagccaacagatactttgacccaccagcccgacccacatccctggagctcccgaaggccagggccctctctcctctgtgtcaactccggcagggacctcgactcaggctccctaccaatacaagtctctgcatgacccccacgcctttcccaagggtttccaagtttatcattctcaagcaagaactgggctcctccttttctcacgggttgggggcgattgtcaggtccctttcaccggaatccacacatcccccctccgctcctcaggccacctctccctccttcgtgccggacctggtcgcttcctcccccgcccccacatcaaagtccggagaccccatgtgccgctcccagcgacaagggactcggagcagcgacgacttcagactcaccggctggacggggaccaggactggggtggggtagggaagttgctacttccagggaacggcggcgaccgctacagcgcaggccgcggacccgaccgcggcaggcgaagtggggtggggggagtggaaattagggagggtggggaagagggcaacacgcaagcgccaagggtcaggtgccgcggtggatgccgggacacggagtccccggtagagaaagaaactggctaaatgagagaaagcgaactaccaatcccaggatgacccgcgcacgacctggctgtcacgaaggcccggaggagggcgcttgcgggcggggcacaacgagaagccaccggaagcggaagccaggtatggcgttcggggcccgggagtctgggcaatacagttttgtgctcactgggtgaagaggctgacttagggcggggaaaggagggagccaggctggatctctttccgcagctctcctcacgttcccctctagtcccggcgcggcgctgctgcccaggggactggcctatcctcggccaatccgctgggtccttattgcctgttgggcccctagtgcgaatcagtcccgccagagacccttgacgggcatactgtttcctccgggctcctgcctcatgaggggagaggtgcggcttggctccgtgcgtagggacttgggtggggtggggtgggcggtgtgagaactggaacgtcccagtgcgctaacctgaggtggtgccagccattctgctcgtccctttgcacttctccatttccccttaggctctaagtgtgaccttcgaaccctggtcagagtaatggtgaggggcaggcgtgacgttatttcattacacggcttctcggcattccacaggtttccctccgcctcctgagggcctttcctaacccacagagtggattcctggctccagaaaatgggcttggagcgggggccacgttgaggaaggcgaagggcattgtgggggcgttatgtaaaagtaggaccccaaccgacagatcctagtgctcgcgccacctgggcgcgcggagctttgctcgtttactattgaaaaagttccagcgcgggaaactgaacccggagctttgcgcacgcccgagccctcaagtaatgtgggttgtggtttttgttgttgttgtcgccacgcatgcgtcttcgtgccgtgtggctatttgattgtgtcaactcttctgattagaatggcgccattttgcggtacggaagctacacagcaacacgtataggagactctccccgagatcttctagggagtgacccatctatttttgtttgggaagaggaaactccgaaatgggatcgcggaagacttaaagggccaggctgatttttttttcctactggtatgtcttacggggtgggaaagtggtttcagaaagaggctggtgtttattgttggtgaggatgggggtgggggccggacgcaggacctctggacaacagtctcatggagttttattaatctttactaaggagcaaagtcggtattgtagggttccatgtttttacgcaaagtctctctcccttaggccctgcagagtcctaagttgtggggttactttagtggcaggaaagtgtttttgactactttttctcatcccagcaggtctctgaggctgtggttgctacagggtcaccacgagcttggcttacttgtctcatccttcccttgcctggtatcattttctcagttctcccaaaagccatgtcccggcccttgctcatcaccttcaccccagccactgaccccagcgacctctggaaggatgggcagcagcagccacagcccgagaagccagagtccaccctggatggggctgcagcccgagctttctatgaggccctgattggggatgagagcagcgctcctgactcccagagatctcagactgaacctgccagagaaagaaagagaaagaaaagaagaataatgaaggcaccagcagcagaagcagtggcagaaggagcatcaggaagacatggacaagggagatcccttgaggctgaggataagatgactcaccggatactgagggcagcccaggagggggacctgccagaacttaggagactgctggaaccgcatgaggcaggaggagctggggggaatatcaacgcccgggatgccttctggtggaccccactgatgtgtgctgctcgagcgggccagggggcagctgtgagctatctcctgggccgtggggctgcctgggtgggggtctgtgagctgagtggcagggatgcggctcagctcgctgaagaagctggcttccctgaggtagcccgcatggtcagggagagcca

SEQ ID NO: 585001 - DNA, 4001 bp, Homo sapiens
tcatttctactggattccatttctgaaggcattgacctatccattttatccaaagaagtcattttaaaacttctgggttctgctggtccagacagtctttcagaattagaataaaatctgtcttccctttgtggaggaagagttgaatcaggatatgattgccctggtggaggaaacatcatcctacggtcctgttccaccggagatgacagggacccagtgtcagaaggagccctgtgaggatcgattaacctgtcatagcttggttctcctctttcattggtaatctgatggtccaggggattccctgggctgcttgggcctcttcctcctccccctggaagcacaggtgagagtctgagtggatcctccaacaaagtttgaggagagggaaaagctctcgtttcagatgaaggccgacccaatggtgagggactacatggggaatgctctctgccaaatgctgtatttgaaacatcgagtgcattaggatctttttctaaaagttcaaatttcaactctctttcagttaatttttgtttgttgtgagcattttctttccttaaatcactgaggtttctttcagcagtccgagctgccaaccaattatcatgtcctcttttctcgtaggaaataacctgcttttgataaaaatgaacagttctctccaattcttcttcaagatctttggctagctttctataggtctccagctcttcagtggcatggctgatcttttcttccactctagaaagcttctcttcttcctctattcggtaattttcctccactgttaatttcctgtagagtttcatttcattttcttgatagaattcagtcattattttaagtttctgttgaagcttctgattctcactttcaaaatatatgttttctgattgcaaagatgcttgttgagtctgaagatttttaatatgctctgtaagctcttcctttgttttgtccacttcagataactgaataataatgtggtttctttctccttctaagctttttaaagaaacatttaacttagcagcatgaatcagtttcttcaaagctcctttcggaggatcatctaagttagcaccattttcccattgactgttcacttttaattccaggttatcatcatccgttgtgtcttcttcaagcacagcagcctgatctttcatcattggcaagtgtccagtcagggtcttgatgtgattttctttatcattcagaacttgttctgcgtgtactttggagtcttcaaatgttattttctgtttattaagttcactcacttgtcctttccatacttcagcttcttgctgaaaaagctgtttatggcttgtctgaagttgagaattttcattcaaagcatcttttattgctatagcccgtcgttcttcactcattttaaatgtcttgcagatgattttggcttcagctatttgtgatttgagggattttgactcatcttctagagactgtatactttttgaaatatccgccatcaattcatcttgttgagaatgtttagatttctcttcttttaagtctttttctagacagaggatttcatcctcaagttcagaattggacctgctcagcttttcacaggttgcctccaaacttcgtgcttcttctgctgccgccttctcaaagctggcatcctctaaagatgactctacttcatagccttcatactctttttgaataaggctaaacttttcaagtagtttacatttttcttcaattagtccagaaagcgttgcaccaagtttttgctctcttcccacataaagccgactcctaaccgatctaaaacttctccacaaaaaaaggagaacaacaaaaaatccaataacagctgcacataccaccagttccgatggaaaaccataaggattctcatctggtctcatactctcaggtagtgctgccacaactctgcctagctcctccaggaccagccccaggtagggctgaggggtagcaccaggctcctccatagcgtcgaggctgctctggcggtcaccgcagtaacactggccacaacaagcggtggagaacacgcagccttgggtctggaacccgaatgcgcacgtgacaaccaaccggagcggaccactgtggagcgggctgcggggggagctggggaacgcgggcacccacaggcctcacaggcccatgttgtcccccaccacctcccctggccctcttgttacactttacatcctgaggcagcgctggtctgagcccggcccgccttagttctggcagttttcacatcacatattttgaagctttattttttggtgaatacacttttaaaattgctgtcttcttcatggattaaacctttgatcattacataatctctggttttggtagttttctttgctttatctgatatgcatacagacactcttgctttcctttcattaatgtttgtgtaatatatcttttttcatcctgttaatttggcctgccctgtattggtaaaattcaagtgagtttcttgtacacagcatacaagaaacatataagaaagggtcatacttttaaatacactcttctattatctatctcttggtagaccattcataattaaatgaattattgatactttaatgcgtaagcctgacattttttgttttctctatcaattcttgtttctctgcttatttttcatgacttcatgtgggttacttgaacatttgttttagaattccattttgttatttatagtgtttatagtgtatcttcttttttatagtttttttggttgcattttatagcttagtggttgcattttacagcttagtgtatattcatttatataaacattatcacagtcaattggtatcatctttattccagtctgagtgaagtatagcaaccttctgtcatattatgtctctttactctatcaaatttgtagtataatggtcttacatccatttagaataacactagacaatgctatgatttttgcttgaaacatcaaacataatttaggaaattagaatctatgaaaataaagtgagcattttaaagcttccagaaagaaatctgacacaacctgttttgtctttcattttttctttctttcctttatattcaccatagatgttatgatgccctatctgttaactccaatatctggattatctatgagtttgtttttaataactgatttatttcttatcagtctgttttacttgcttttttgtatatttggtactttttttaaagtatgctgaatttatggataatatgatatagaactactcaagaattttgaattttttttctgggcagaatttgtaattacttgcagatcatcttgctgctctcaagacctagttttaagctgtgttatgataattatattttattttcctcttagaacatatgcctcactcctgggatactgcacctctcctaagagaatttttagagtcccaactgagtttctcagttgtttgccaacatttccccatttggctggatctgaactccagtagctttccaagaagtttttagtccctgatgatctcttatgctttctgtatcccagcagtttctttctccaaggtctcccctcttcttagccaactgtcacatagctaaggagtcacagaaggaccaaaatggcatgtatacacccatttctaggttctttctctctcccatatggtacattgacccccaattcctaaccaatttagcagctttgaactctattcattgcttcttttggttcccaagaccactaacccctggttgggtcccattttcctgtaccaaggtcaggaagatgcctttctggaaaatcctggcaaatgtggtactaacctcatgtgcctcaccttcctgaaagatctcatacctgacttgctacaacaatgttcttcaatgcctgctgatatggtttggctgtgtccttacgcagatcccatcttgaattgtagcttgcataattcccacatgtagccagcccacctgaa

SEQ ID NO: 585002 - DNA, 4001 bp, Homo sapiens
acctcgccgtcagggcacttgaactccaccggcagggtggtggttctgtggggggtgcagcatcggccgtcggtacatactccacagaatttagctcggtatgtcttcatgctggtgcagccagaaagctcaaacttgataggcttggagattttgggagtacggatgcactttttgcccttctaaggaagacaagggaaaagagagaggaaaaaaaaaaatcagcgactctacaagaggagtggctttcttcaaccctctgtgttttagtcttctgttgtctgacttctgtttatattttgaggggaggaagtttgagtctcatttgctatgtccaaaaatagccagagcctctcttggaatgtcttgaattaactaaccctgtggaagatttcgtagtggaaaactggtggttgctattacacaagctctcattccagcaaaacagctcaatggttagatagttttggagataacgggcttatactaacaagcgtggcaagagccctaagttgggtcctatccactgtttttcctgtgaaaaatagttaataggagcagaacatgtaccttaatgttctcttccaggtcagcttcgcaaggcctgaccatgcacaggcggctctgcttctctagcctgcaggaggcgttgtcattggtaacccgggtggagatgcccatcccacaggtcttggaacaggcgctccactctgtggtctggaccaggcagttggctctaatcatagttgggtctgggccaaacgtgtcttccagtcggtaagctgcgagagcagagcacacaaacaccatgtaaaacgcctggataaggtatttcccccgttcggtcggcacagttaggactccctccctgggagagaatcacgaccctgacttagaggaagactcgactcacccgcgagggcaggcccaaccacggtttggtccttgggctcgtcacacacccactcctcgcagcatttcccgggcagcttgaccctcctcgggaaggggcagtcagggctgggcagacgaacgtccatgctgcacaggggcatgcagcccaccgccccgtccaggcacgtgcactggtacttgcagctgctctggaaggactctccgctgcggtacaccgtaccaccgaagatgcagggagcaccatctttggctggagaagaggaagggaagagaggggtgggggatgcagaggtcaggcattggggcactctcacatccagagcgtcagggatgcgagttgggatctgggctgcagggggcgggctggcagcagctggagaaagaaactcagtccgagcggtttctttttccagcgggcgggtgggcgtgagggaggaggcggccggacacctagcggtgggggctgcgggtcttaccggtgcacacgccgatcttgcggttggccggggagccgaagtgacagaataggcccttgtgcgggtcgcatgggtcgcgctcggtgcacagctcgcccagctgcttggcgcagacgcggcagcagccgcagccgtccagcacgaggctcacgcccgccgggcagcgcggcgccggctcgtccgggcaccggcacggcccgctgcagttctggccgacggccggctgcagggaggacagggcggtcagcggcgctcggtcggcgcgcacgccctccccggccggccccgagtccctccctggcagccgccggccgcagcgggggctcccggcgcttacccggctgcagagggcgaggaggaccacgaaggcgacgcggacggggcccatactggcggcggtcatggttggcactgcgggcggagcggagggcgcggtggcggcgagcggggagcggcggggcctggagcgctggcggtggtcggaggtggggaccgggacgcgccgggctgtcgtctcggggctgtcggccggggcggctgccgtcgagctggagggtggagtcgcactggctgtctcctctcagcggggaagagttgttgtgtgagtttggggcgggcggcccgaggcttttatacgctccgggcggccgcggctcgccaatgagctgaatggagtcctacacaaacagggacattcctcgcattcctccccaccttcctgcctcatcaactcacaccggattgatcctgaccccttgacactcagcattcctccgtctgaaaaagctggcacactccagctcacagaaaaaaaaaaaaaggaaaaaaaaaagcgcagtatttccagcaccaaatagaatttttttttccctatcctcttcgcaccactcctgattcatatcatttataaacacactggcaattatttcttatttctttttcgaataagtttgccctgttctgtccactgacatacatcctttttaggaagtaggtagctgaagaggcaaacagcaggaattcctaaaaaattcgaaaaggtttctcccccccaacccttagcaatgatttgcgttttagaggctataggctcttgaaactctccaaagagtagaaaaggagtgagttgcttttaaccatttgaaatcctcaagatgcctacctgtaaaaccctgaattctatatttgagatttgatcatttgtcacttgaggtaacggttttgggacaagaaagagaacaaagacgcgtgtgactcaggatgcagtctcctggggcagatttccaaaactcttgcttagttttctcttaatatatgtaggagttttatataggcaaggacaagggaggagtggccatcaatgtttccagaaaaagggatccattgttctatcagagcaaatgattctgtgttgggtaggtaggggctctgggtgtcagggtgggaacactgggatgcaaagggggttcacctaggagcatttaaacacagcttcactagggtctttgagaaatgagtgcattttcttatattaaaacctataatcttcaaatgtggattggatttggtttgtcttgttaaaataagaagtctgattccattacaagagcagtgtaccctgttgtatctggatataaactaagattgacagtgaataatatatttttagtgactccccacacatctatgaatagtgattgtgacttctcattacccaaggaacatgcagcctgagggagtgaggtcaggacaaggaaagaataggctttattctccctgggtgtgtgcagatgttgaatatggccaataaacctaagcatatctccatttcttaatatagtgctacttagcttcactaaagacccaactaattcactgtgctttcatttggaatctatgttgtttagtggcttttttgttaatacctccagttcccattttatataaagagagtgattctagggccataccatttttgtattctgtaatgccgcatcatttgacattggtgttaccaatgagtagattcctttaagttgttgatgcttcagagcatgggttcaagataagcatatctgtttgtggtgcaaagatcggctttagaaacaatgcattatagatttatcatttgaaaacagcctgtttaaactgatcaaatttttaaagtttcagtacagtctgttgaaaaatagccaagaagaaatataaccactccaacttcagcatagagcatatcatctgtgcacgattacctcgttaagccagccacatgttatagagtgtagttgcatgtcaatagtgtgaatggccagcaaaggggtgggggtgccctctgaagctcaggaagaattttcgtcattgttatttaatgtcctttccaagcattcctcaaaaagaagaggcctaagagttcctatttaaagaaggaacattccaagttaacttaatagccacatgtgtattaaaggcaacttggccctcaactttttcttcccttgtggatgattttaaaagtccaaaatatgtgggaagccacagtgaaacctttcaagacctaaacccccaattacatctacctctaatggttggaaaggtgtggtggctggggaa

SEQ ID NO: 585003 - DNA, 4001 bp, Homo sapiens
acaatagtctaaactctaaattcttcctttgcataaaaagcaactaattaatatgaggttcttgaagatagtctttcctcttttggcagataacccccaccctcactcccatgcccacctccttttcttccaactctaagagaagggcaacagaatcatttacgtactgatgagatcagaggctcctgccacagtgtcctgtgagtccctgagccgacccagcccttctcctgctttcccttcctccccacactgcccctcaccagcgtcatgggaggacagggcttgtatcatccggcctgcactccagcgaatctgataatcaggactactcaacatgtgcatgagcaagtccaggacccttgggtccttgaatactccagtgaggggctcaatgctggcataggcgctgagcacgtggacagtgtgaagtagaggagcaggagggatagtgcccacacactcctccagctgccgaagggctctctgaatgagggacttcacgtcggtttccatctcctccagcacagatttgtccagggccccaacctcccctgcagactcctgggagggcccgatgacctggccatcctcgcccagcatcttgtggcagttggcatagatctcatccttggacatccacagcaggatgtgctcagccttgcagtccacttggccagagcccccgtccccctcatcgccacgccgcaggatgagccaacggatctggtactcaggatgcccatcatggcccacgcgctggcggatcagctcatcaggataggcatgtaagccgggccccaggggcaccctgaattccctgtagcggagttctcccaccatcctggcacctggagcacacaaggaaaagagaacagacaagctagaggaaggagaggtcagaaaatcaaagatatccaggaggtggggaagcaaatggcaacagctgtcaggcggggtggggtaaagccaggcccaggagttgcatgctgcacgctgggtgggggcaggcctaagcagagaacactggggtgtttgttgtgaaagaacacaaaatttgggggctaaaaggaaggtccccaagaccctgtggcctggagtgggttgatatggaacagtgggcggactagtgggggcagggcagccttggagttacaagtgaatcccaaggccttggaacaggcagcaacctatggggtatgtgaagcccagaggggtatgtttgggagggagatcgtgagtgtgtgtgaaaaggggtgctgtctctaaggattggagcatgggagtgcgagacccaagttaagagtcccgagatcgcagagttaagagacctgagaactggtggtggagtgggagggcaaggcgcgatggactaggaggaggcactggtgggttggaggcgcctccgactggagcaactggaacaagagggctggtgagggcgccgcgagacccagggcagggtgcacagaccaggtaggcgaggggcttggggaccgaggttggagactggagaagccaggggcgcgcggtaaggtgggggagaggggattaggccccataagctagaaccccgaggcacggtaggatggggaccgaggttgggtgagcgcgaggctcgatgggctagtgggcagggaaggagaagcaaggggccgcggtggggctctggccacctcagaagtccaccggggtcctggcgcgaggcctgtccttcacagagcaagggacgcggcacagacgctggcggcgacttgggccccacctgggccccgcgagggggtcgagacggagagacgggagggggcgtgcctccgcggaacagagctgcacccgcgtgagtcggcagccactggggcagggtggggcccggtccctgccagcggctccgccagccaaaagccacggctcatttccgcccgacccagcggaaagctaggggccctgggagagcgccggggcggagccgaggatgccaccttggcgacgcagcacctccttctttgcgccgccctttcctcttcctttagtcctccctcctgcggaagtgccctccccgtttcccaaagtcagaactggaaaagaccttggacgtcatttatttccatccccggctccattacttgtaagggaattggggtggggacagacccagtgtcctgtactttctcttccacactttttacttcttttccccacgtttagtctgtaccatcccctcccccgcaaaaaaaaaacaacaacaaaaaaaacaaaaaacacccaaaacaaaaccacagtaacagattaaaacggggggggggggcattttattagagtacagggatatcagctttgggcagaagcagaaggcagcttcacgtaactcttcatggggggtagtggccgaatctttcggccagcccagccccccttgcggtgccaccgcccactgttaggcctcttgcccagccagcggttgcgacctgccttgccaatgacccgtttgttatgatcaacgttggatactcggcctactgttgctacgcacgtttccagcacctgacagagaaaacagatggagattctgtacaatgggggggaaagagcttgacaatgttgagagcacacccttggggggcttcttagactcaaggagagaagggcgagggaaaaggaaaagcataagatggctgacactaagtgaaggtcctacagtaggaactaagtagttgaaaacaaagagctcacgccagtaatcccagcactttgggaggccaaggctggaggatcacttgagctcagaagttcaagaccagcctgggcaacataatgagatcccatctctacaaaaataaaaaacattagccagggtcaggtgcagtggctgacacctgtaattccagcactttgggagcctaggcaggcagattgcttgagctcaggagttcaagaccagcctggccaacgtggtgataccctgtctctacaaaaaatacgaaaattagcctggtggagtggtgtgcgcctgtagtcccagctacttggggggctgaggcagaattgcttgaacccaggagtttgaggctgcagtgagctgattgtgccactgcactcaagcaatagagtgaaaccctgtctcaaaaaaaattaagtagggccgggtgtggtggctcactcctgtaatctcagcactttgggaggccaaggtgggcggattatgaggtaaggagtttgagaccagcctggccaacatggtgaaaccccatctctactaaaacacaaaaattagctggctgtggtggtgcgtgcctgcaatcccagctactcgggaggctgaggcagaattgctagaacctgggaggtggaggtcacagtgagcccagatcgtgccattgcactccagcctgggcgacagagcaagactctgtctcgaaaaaaaaaaaattaattatggtgccaatccgacaaagcacacctgagtcatgtggcagaaaaggacagcctcagctcaaggcagttccttgcatcataaaacacctgggagctatcccagacaggaaagttacattccaaaaattcctcctttgctgacccctcccatccatacccatacacacctgcatctgcctcttagagggcagctggataatggctgtgccattcaccttccgcagtagcacaccacacgtccctggggaaagaagctgatttgccaccctccacaaaacaggggggtgcagagggacttacacaggggacataccccacatgctgcccttgctttgctctttaggagcagatacacaaagaaggacgcatgctatgttttaggtaaaaacacatgcatatcttcatcctcatgtttgttttttccttaattttctctgccagtaccagatgtggaaccatgggttcagactctccttgcctttccaaactataggacccaggcaactcctttccccatacctgcagctcggatatattgggcaccccggcctggctcactttccacgttg

SEQ ID NO: 585004 - DNA, 4001 bp, Homo sapiens
tttaggaggccaaacagaaaaggcaaaaaataggatggaataaatagctgaacatactttgggatttataacagaaggagaatggagtgaagacagagaggggatgaagaaggggtttaagaaatggaagagttggctgcgcccagtggctcacgcctgtaatcccagcactttaggaggccaaggtgggcagatcacgaggtcaggaattcaagtccagcctggtcaacatagtgaaaccccgtctctactaaaaatacaaaaattagccaggtgtggtggcacatgcccgtagtcccagctactcaggaggctgaggcaggagaatcacttgaacccaggaggcggaggttgcagtgagccaagaccgcgccactgtactccagcctgggcaacagagtgagattctgtcaaaaaaaagaaaaaaagaaagaaagagagagagaggaaggaaggaaggaaggaaggaaggaaggaagaaaggaaggaaggggagtttacaaaaagagaattaaaacagtaataggcaaagtaacaataaacagagtgacagttaagcaagacagtttaggcaggatagcagggtggctgagggttacagattaggacttagaagaatgacatgggtggacaggaaggacagcagcatgtgaggcagtgggatcagaacatgtgaggaaaagtaggatagcggaggggcaggacagggagcataaatgacagagtaaagctgcaaggtggatgtaaagggtgggccatggcagatatagagaatggagatgacaaaaggctgggatgttggggcaaatgactggataggaaaagtatattcgagtcttgtgaaagggggagggccctagggaccagataaaattatgggaaagatgaccaggtcccaccctgcccttatactgcatgtatggtaaggatttaagtaagttaagtagataagatagaggtggtaatcatggggttaaaggtaggaaatgaggtcaggagagaagcaatattcagagacttcagtatcagataaatgtgactctgaattctggctttctgtctcactgtctgcatagtttggaacaagttacttaacctctgagcttgtttcctcttctgcaagatggtagtaatattcatagttacttcatgaatttagtaggatcatgtatgtaaagcacttggaacagcatctagcacataaagagtgttcagtaaacataatctgttattattcttagatggagaaggtaggggagtcatcaaataaatgcaaagttattaagaccgattataaatgggagtggaataatcaggaaagatatgcgtgatatgaagcagtgcaggggcaacagggaatagtgagaataagaatggaagaaggtaaacccagatgaagatatagtggtcagggcaggggtcatgttggggtacagggacagaagatgagagtagaggtgaagaggagggagaaagatggatgtggacctcaatggaggtaggggtccacttaggatggggggcaagcctggatggtagccagcgatgtgccagcgggcaactgattagcagcagggggaagtaaaagaatcggataggaggaggtaggaggtgtaacgtcggcctagaagagcaacaataaactgaggtgtgggggtgagctctggacgcatggatgagaccagcagatagcaaggtcaagcccaagcttgcagagccgtggggaggtggaggaggccagcaccgcagagggaacgggtttggggggagggggaaggatggttgggggcgcggtccaaaaaagctgaaaagatccagtgaatctcagagagcaagacctggttcccttcgtcagccccatggacagtggctaaaggaccggggaggggacaggagaaggggagggattgggtcggcgcagaactctcctctcacctcccaccgcccggctcagccctcgctgggacccagcggccggtcccgccgtcctggccccgcctcctcagagctcccttccgggtcacacggcgagtgcacgcacggccgggcacctacgggtcccaccgcggcccacgccgagcgtggcggaacagcgcgcgagtggagcatgcgtgctaccgcgggcggctgcactggaagaggggcgtgggggcgcgctaccggaggagcctgggatcgaggtcacgttgctcctctctcagcagcaggaagaagccgtttccatccagtcaactgtgaagccccctcctcttcactgggtcggccctcctaatcctccctctcccatcacagcgatcatgctgacgaaacatggtaacccacattcccaccttaaggctgccctttttgacttttcagtaggtcaggtgcccatgagtttcccaaacccttcagcaatgctttggattagttgtgtcacttttcctgttaattaaaatttgctcctctgcgttggccttaacacctagcgaagccacgcacagggagaaggtcctcggccccgcaaaactttccttaaattaaatcgtatagaattaaacagcccaaagcacaccttagcattaccgttctcatcaagcagcccggatcgctactcagagcagcaattttaggagtttgcctcgcgttcatacccccatccctccctaagtagaaaaacagaaccaaagaccccacagtctgtgcacaaaaatgatacatttattgaaagagtatttttttttaatacaaaagaaagctctgtacataggactgtgaccatgtccactattcctgggtcagcatcccaggggaagtagaaaccactgacatacacactcacattcaagcacacacactcactcaggcgcacacacccacacacacataccccagagccaccgaggaagggaaacaccaagggtcgctgcacataaaaatatcacctcaactcatccctgacacacgcatgtcctcccaaggccacgctcacacaacacacattataagcactttgcctgattcactcactgggtctgtcttttgtgggaaggagaggaagaattcatcaaaggtctcctccccatgggtgggggagtggggagtgagtgagtgatggtggagtgaaacaagagcagagaaaaggggctgggcagttacagacctgagtcccaagctcccctgctctctggcccctgatttgccatgccccagccttgaaagccacccataagccccagctatctccaggagaaagcccagaaaggtgacttccatcttggcaccccaaactggggcaagacagcaatgagggttagaggttagggggttctcaaacatgtcggcaaatcatccccttgataactaggctgtgcataaaatcttcccccatcccttcacctaatcacagaagccagcttgttcctactgaaggcagtcttaggggttaagaaaatttcaccccactgctgccctgtttctgaaaaagctccccttctggatataggtggtgaaggtaggctctgacacagggtaaaagaccctcccccctatgctggcccaccctcaaggtctaccccaaagggggaggaggggggtggggcatggcccctgtacaaattacataaatactgaggttacacttagaaaaataaagtcattttcttcaaggctttttgtcttaatttaaaaaagttacagtagctgctcactccctgggagaactgcccatttctggctcccctttggctgcactcagcccaagaagctgctcccacttcttctgacccccattcctgcctctcaccccctcccagaccccaccctgctcactgcaacttgggccccaggcagctgcatgcctgggacagcgcaaggctgcaatgcccatgcgtgtggcacaaatgaagtcagttgcctctgcctgacgccctcccaccccaaccccgacatttggtctccctcttccctctccctagcaacagccctaaagggcaaaaagaggcccagagctgtgggtcacc

SEQ ID NO: 585005 - DNA, 4001 bp, Homo sapiens
ctcccatccttcccatttcctttgatgttattttgttacagctttttaaatattttttaaaattatttaacccctgggggcagagactgaggagggaggatgataagggatcccggactctgtatgattgaaataaagagaaataaacaaatctagcagctctgagtcattctgaaagatgtagagaatacagggactagaagcacttatattctcccaacaaatttgcatacatgacaaaaaacaggcaaaaggcagagagacccaaagacgggatttattgggggcccagtcatcacctggaagtcagaaggcgttgaagtatcgcggggatcttcatgatgagcaggaacagggctcatcatggcaggactgtgatagagtcagaaactgactctgtgacctggcgcacccactgcaggtacggaaagttcccctgttccacaggcaatgcaattacctcggccacttcgtaagggtgcacagaactacaaaataggtgggtgggggaaggggatcactcaaagatttacccaaaagaacccactcccttacacgcaagccctagactgcccagcaagtcacacccacacagtacacaccctcaccccatccatctcaaagttctcaccgaacaaaatctgtcaaagctgggaccaaggaactttgggttttaatcatctaagggacaaagataaacatggttgaatcaaggagtgggattgagttcagtttctcagaagaggggtaagggctaaaggggtcagggattggggatattttgttgggtgggggaaatgtttctcaccatcagcacctcactgtcttcctcgatcttccctttccactcatagctgaaaggtcagagggggagagttgtggggagcaaagaatttcccccaggaaagaggttcccagtcagctcctacagttaggttaaccccccaactcctatgactcacatggatgtaatctgagggatgaggttgacgcaggctgctaggcgcttctccaccacggccctggagtgaagagacagtcccattcagagtaccccataaccccagtttttgtactggcagcccagagacaggcttccagagctggagaaaggagaaagcagcactcttctgccccacccccaactgtcccttcatgatcatcctttctcgctgcacatcgaggtccctacctggcgatctccttggcgaccttctcgttggggcaagtaacaaaggctgcagagaccgagcccggaacgtagccagagccggaatccgaggccggcgagggctgggtcggagggcttccagaggccatggtcagcaagactcggggtagcaacaaaaggcgggaggccacaggcagcagcgccggcatccaaacaaaagacaggagcagagaggcctgagagcaggaggcgaattcgatctctcctcacaaacagcccaggaaattacacccggggaagccttcgcttagatcctcaggctctgccctccctctgatgcacccccgaagaatgcccctgaaggtgagagagaaacttggaaaataaagcaaaagctcatttcactcacacctcagggggccaacctctgggatttagggtgcgggtagcggtcgaggcttcgaggaccggaaggggcggggcggggccggtcactcaccactccgccgagcaggaccgcgggagcccgccccccactcatgcggcctacgctggtacaggagagttgatctcaaaggccacacgtcacacggagaaacaaccccaggaagagcggcctcttcttacctgggtggcagccacgtgattagaaaacagcgcgcaccatgtgacagtagaagaaggaccacctgcgcctccagagccagccaatcccgaccctatcatggcgcggtttgcccacctcctgatgaaggaggagccatgggagacttgaccaatcgactaccgcatctgcagacgtgcgcggaaatggcacgcccgtttccgtgtgaacccgaaactgccacttgctggctgaggagagccgctgcggcgttccactgtcacgtgagggggccggtcctcttcggcggcggcactcagtgagtgacgccaagtggccaatcacaggccagcctcgcaggccacgtgaggcgagagctggttccaggaaaggggggccagagaccccgcagagtcgatgcgtcaggctgtggagtggggaatcatccttaaaccccacaatgtgcctagtgacctcccctgcactgtttccgaggtcttaaggagtgggagggtctgagaaggacccttcaccccaaactcaggggttaagagagcgccccctgcccttttagttgggcagagatatgcctgggtttgggaatgaacaacggtgatctagaagcccgctgtccctgggtagcagggagtgattaggcaggcacgggcatggcaagacaatagctagctgaggaaagaagcattttaaaacagagcgagaccctgtggtagaggatggtgaaaatggggcctagccatcttaattgaaaacccaaagcttgagacagactactgaatcagagggaaggagaacgagggctgcaggatggggacagtggtgatggtccttctgtcccctcttccctgcctattccactccccaggattggtccacctctcagcctcgggtctcctttccctaacccatcccccaaggagccaggacctgccctacataacttccctggggcccaagcacatcctgtgacccaaaaatggagagaggggccaatgagaggcagagaggtgggaggaggtgcagagaaaaaagctcttgccactgcccccacccaatatttcccctcccttcaaggtctgaggtcattggtctggtggtggggatgcctcggagtttcccaggctgacgtcagggttatacctctcggaggttctagggcagggaagtggggaggggaggttccctgagatctctgtctttgagtttggagtttgtctctgagacagatttcggaggggtctttcagtatttgtgtggagatctttcttaggattgagtttccttttatgcttctggtttggggggtttctatgtttcagggtctgtggtcgcactctgaggtctttcgaagtcttcttcatgaattttgggtctctgagttgtccatctccggaccagctgaagtctctatctccccttaagtcaggagtgtctctgtctctaagttatcagtctctgagatctgagtctggggtctctttctaggtctgagttctctaagctctaattctacatctggctctttctgaatctgggcctcatctttttctgagtctaggtctcaggtcctggtccctgaaatcatcatctcagggtctggagtctaagatatctgtaggtatggagaaccctttttagactggattttcagattttgatattgagcttctctctctgggggatctggggtcgttttttcctcaaatcaggagtctcttttcctctagattttggccctgtgtctcaaattaccccacagtggggggtggtgaagtatctttctctgtgggtctagggtctctctgtctcagggtctggggtctgcatctttaggacctctgtctctctctggtgtgtttttgagtcaggggtctctctctctctcacaatctgggcctcccggagtaggggtgggggctgcagagtctctccctcctcctcctcctcctgctctcttcgctctcgctcgctcccccgccccccctctctctcggctgccgctgctgccgttggctcttattctcctcctcctcctcctctctcctcctctctgcttctctctgctcctctctcctcctctctcctcctcctcctcctccacctcctcctccttctccccctctttctccccctctttctctcttctttctcccccgtccccccgccccctccccccaggcctgatgagcaggtctcgagcctccatcc

SEQ ID NO: 585006 - DNA, 4001 bp, Homo sapiens
atacacacccaatattcacacagactgggaccatttagacacaccaattaacctaacttgcatatctttgggctgtagcaggaaaccagagtacccagagaaaacccacgcagacacagagcatgcaaactccaaagacagtggccctggccaaaacgaattttttttctcatcaatattataactaaatgctgttgaatgaaacaacactatttgagaaccttttgtataatacacgaccttcccaacttggttctattttctcaacctctacccatttcatccaaacctgactcagtttttacattctcagcatcatcttgtttcacaaagaaaagaggaagaagactggagtctgacttttccttagaattgcacaataatcttattttgttctctttttggaccaaaaactcacctttgccatcgccccctgtgtgactttttgtctttgcttctaagttttctcctttaaatggatgctaagaacacagttggtatttttaacgaagaagggcagtaactcatattctaattcagagattctttctggaaagactgttattcagtcaagtatttagcttcaagaaataggtcaaaaaccaatgagaaaaatatacatgattggatggctagatgattgatatatgaatcagtaaatgaaatttcacagcagaaccacaacacaagcctacgcaatttagggcaatatttcttagccagtttccttttctgcgaaatagagacaataaaagctttcacttcaaaggataattgtgaaaattaaagttaatacatgcaaagcactgagaatatacacggccacccgtaagtacttaagaaatctctggaaagctaatgaaaaccacagatccctgaacctatattcattctgaactagaatcagaacgccaggtctaagtggagaaaaataagaaaatcgataagggttccaaacgatgctaagactcaagagttaaccgagtggcccaagttaagtggaagtgtcacaaacgaaagataaagatatggttacagaatgaggaactaacaaataggaacaaacaacattcgcaaaagaacaaagaacacaatttttattgaattctgcaaatataaaatatatctgtacagtattccacctgttgctaacagcaactgtgctcaacaagaactcaagagtattattatatttgcttcgaagttagcaagtgatactagtagaaaaggcaatgacaaaacaatcaggtaccagaggaagaaagaaaggcagtatgtcttggatagtgtctgtaaacctgacctagctccccaactccagaagtccccatccttgcacggacggtcactgtcgccactgccaagcctttccctcctgcgagggaacccacatcgagtgatgtggtacaactccttcaggcagtgaagaacaaaagaccagggagaagatgaggttgagggaaggcggctaataccgagagcctataataccgcaaacacagtgcctggctctgtcatataaatttaaatcgcgggaaaggacttggaggaagggaacggatagagcgggataaaggaccagaaagaagagggactgctaggggaaagggaggaggtaaggagagtttagggactgtagacaaagtgggatcagaaagaggttgcaggcaaggacagcagggaacgacagcttagagaggggtgcaggagctgggagttggggcggaagaagagaacacactgccagagctcgaaacgcagcgaggggagagactcacggagccacccgcttaccttgctacgccccccggaggcgacacgctgctgcgacctgggggccgggaaagactgggaagggacgttcagcatcttcaaaccccggccccgggccctgcccggggatcgccgccagacgggacagcacctccagctccggctctgtggccgggcagaggccaagcccccgacccacttccggggtcgccaggggtgaggcgcattctgacgcagcacgtccgcggagggcggagccaacgggacggagggagggccggcagggaggaagtacgcatgctcagctagttccgcatcccgaacttcagcaccggagcaaggtgacagctatttcgtggaaagattagagagtgaagctgttccttagccttggtgctgaccgaatgtgggaacaaattcttagtcctgttaacccggaacagcaatgtctgttcattgttaagcagtaccatcacactacttgaaatatggactaaaacacactacttgaaatatggactaaaacgaattttagtttctctgaaattctttcctgtaaggcactaggctgtaatgcaaagagcatctcacacctttaagagcaaaaatatcaaatgtcaacagccactactgtggggtaagaagaaaacctcacctttaatcatccttaaacttcacctttaagcatgctgagggctaatgaatgcgcgaaagacgttagtaaagtcaccttctgctctattcacccactcacaaattctccctccttatgtaacttcctgtcttcactgggaattgtgtactgatgcagctcacctccagctgtggtgatgaagtaacgtttaaaagtcagatttggtttgcatgccatccctgcacttaatgactgagctgtcttatgcaagttactttagtatctcaaagtctcattttccccatctgcataatgggtttattaaagattaaaggatcatgtgtaaactacatactgcagtgcctgattaatattaggtactgaataagtggcagtggctgtttgtgctattccaacatattaatgggaaaaggaccaacactgtgcaggtaaacaccaggctctaatgctcaaaatctgatggtttttgtttgtttgattgattgttttgtgtgtcccttggggaacacatagatcttgagagtagaatccaataagggagaaagttttcaggagaagaaacatagttctaaataatcctccccatcctcctttaattactaatttttcctaactctgaacatattgtcatgctttaaactttctctgtttaactacttagttcttaaagtgcctaaaaaatcaaggttatgtttgcagaatcagaagaaaaagtgtgtgactatatgtggccattcaaatacaagcattcaaataaggtagccacctatgacattcacctctatccatttttatttgcaattgaaatgcttattatgagaagactgaatttgagctaaaagaacctcatgactataattaactgtattactttgactttgcaaattgcttctgtgttctctctcattaaatgatgacatattcttctagagtctacacaagaaaaactaatcactgagatttatttcacttctcgtgagaaaacttttacataagaatatcaaaagcagagaaccagagcaaggaaaagttaatattgttgaagaatgttccatgctttccaaatttcttagctcccctttgtacagaaatggaagatgctatcaacttctggcctttagactccacttttttagactccatatcaatcactcaaatttaaacgttttgttttaattctagggatccctcaatgtagtacattaagtattaaacatccatactattttactactggatttaaggactgaagaggagtattaaaatatgagttactttgctcatcatttatttaaaatatctataatttaaaagccctaagattgattccctttttcaattacaggtaatgatttaatgtgtttttctccatctgctaagaaatctttactaataaatgagtgatttctaacataagtctattttcttcattatctaataagataacattgatatgtaactacaacatccaactggcatcagtaggaaatagcagatgttaaaagattcagtcttgagaattaaatactgtcattctttgcaaaattataactaaatataaatgtgcaattta

SEQ ID NO: 585007 - DNA, 4001 bp, Homo sapiens
ccggtgaggcaagcacagccccagccgcacagtgctcagagctgagtgagggtgcccaccgccctggccaggttgctgggaaggagccttttgcttgtccccaggacgcacctcagggtggtgaagcaaaaaaaccacggcccaggagagggtgtttgctgtggtctcagtgccaccgatcaggaggtccactgcagccatgtgcacgtgcccttccaggagctgtccagagccctcttccatgctcggctgcgccaccccttggagcatgtagtccatcatgtccctccactggcctgccacgaggctctcctgcagagggtgaaaggagcgggctgagcggctggcctggggagaggagtacagagtggcaacaggcccataactggggtatgcaaaagaacccgcctcatagcaatgctgaggccggtagcatcactggctgtgggccgaggggaggccgtccacgtacagtccccaccttgtgctgcctcagctgcatctccacgatgtgatccctcttctctatggcctgcttcagcctccggagacctggattggggaagaactgcggcaggaagcatgagaatgcagctgtgggaaggagcctctccctccaccccagcctctcccctacaacccaggggtgtctaggctccaggtcctcaccctgagaaagggaatcacgtccacaatttggatggaccagtggctccaggtttttaacacctcctggatacatttgtaataggcaggcattaagttgtcgtcctgccagaaaaggagggagtactttcagttcaggacaaggagaggctcagggaggggctgggggtgggcctgaggggctgtgaggcaccttgatcttgtctccgaaggtgaggtaacagatgatgctgcaggtgaggagagagaattcctcctcaatggccacaggggtgccgggctgggctctcatgcgctgtggagaaacagtgtgagttcagcaggccgctgtgcagcgggcagggcgggggctactgtgagaggcgaggctgacccgaggtggcctcaggagcccagccttacctcacagaactcctgggtcagctgctccaccactggctccatggagtcacggatgcccagcagcagggctgagcgggtgagcttcttgtgggctttccagagcagggagtagtctcccaaggacaggtccgggtagttcctagacaccagcttgtctgcaggaggaggtgggggctggagggtgggaactgatgaaggcagctgagggcctgaccttcttcggcctccccaacccctgctttctccccaccagatatgcccccccaagagcttccagggacctggattggggatgccccaaaggtggctcacacttgaggctgaggtgggaggatcatttgagactaggaatttaagaccagcctgggcagcatagcaagaacccatctcttaaaaaaaaatttttttaagaaagaaaaaatgcccccggcccttacaggtaagtggctcaggtctgccagcaaagtctgcccactttttgaccatggcttcctcaatggtcctcttggagttcagcaccaccacatctgggagacagccaaagcagcgtcagcggagagaggaccctctccgtcacctccgccccctcctatggtgagggccagagcgagatcagcctctcaccttgcagcccaaggtggagcctgtagatgggcccgaatttctgagtcaggccaagcagatagatggggaggtcgggctgcagcaggtgcaagaagcccggggcaagaggcgggaggtggaggctccggagcttccaccagttccacagcaggcgggcgccagccagcaggggcagcagcagcagcaggcccaggagcagcatggcgagacgcccgtcagggccctgaggtgccacttatagctcaagagccccagccatccctcctgctgtgtagactgttttggggcctcccttgaccccaccttcaggtaccctcccaccgacccgcccacagagtggcccttttctggaatgacaccagtctcattggccttgggacgtccgtatttcaaaaaaattgatcacccatcaagaagcaaggaagggaaatgcaaccctgacctttttcctgcatccagagtcagctttctggttccacatcaactgtgcaggcaatagtgtccgcccccacctgggccctctccctctgccaccccaccgtgggccagtttactggcatgatgtttgtctcagagagaaaatggcagtccctgcctaataggccttcctgaatcgcctgaagaacaaaatgtgatttgtgtgggttgtttgttagtttaagctacagatagagtaatacagtttaagcctggtttgcctggggcattccagtatatacaggtatcccagtgtgattgttattagtgcctcctttcactcacaaaagtgcccagaagacaaaggaggaagtggtttcccgctgcggagtaatagcatgtaccagacactgctctaagtgctttgtgggcactcactcaactcttcacagccatgctctatatgcaacacgggtattgttcgcatgttgtggagggcaggattccagcctggaaatctagctgtcgaatatgtacctttagccaccaggagcacctttctttggttgaaaggaaaacagcccaccttgagctggtttgagataaaaaataagaattggggaatttcacagaactcaggaaaaagaagcagaggaggggaccccactggtcttagaaagtcaaggatagggaacagaaaaagccccggagacgggcggtttcctcgctctgttcctctctcctctttcttctctctgcagtcaagtttcttgtgtttccaggcacaggcagaacatgactgccctcaggactacagtccacaggttctactccagccagggaaagtatggattcccagcacaactgggcatgcccccctcaaagtccaaagtccccaggaaggggctggatagccacagctggatcaggatcaagggtccagccctatttggggaactgaagccataaggggtgggggtcccactggactgacactcagagaccacttttgtgggtaaggaggcagtttggggatttgggaagaggccatgccaaagaggagtggccgggttcagtgagaggccagggcctcctggatggtacctgagaggtcagaggcgacccagccccataccttcccccccatttctggctctgtgccagaccctcggaccagtgggggtctctctcccctcagagcttttccagactgtgctactgcagagccagagtcaagaccctggctgtgccacccactacattggcgagttcgctgctgctgaatccatgatcaggactgagagggagaaaacaggattgggatttctggggttgggcaatgacagctactgccttcttcatggttgacctcccagaccgggccatgtcttgctgcaactgaatccctggctccggaaaatgggcttatgccaccaccatgctgagcagctactgggagaaagatctgatgagcaaccatagggccatgtatgcaagagcctcaggaaacctctgccacagtgggaaaggcccaaacttctcaaagttacgtgggataagacagtgctcatcggaaaggagcgcacctggaaggctgacgtgcttactacttgtctcaccatctccatctcttccaccacttccaaatccaaactccgaatgtggtcaattacatgcaatgtccccaaaggtaccctgtcctgcccccggcctctgggcctttgtatattctccttctgccccagatgccctcatctacccctgctcttttcctggctccttctcagtcttcagagccccacttggaggccacctgctccaggaagccttccctgtccctgcctggcaatgcccctgacttggttagatgccccacaggaccacactgctcc

SEQ ID NO: 585008 - DNA, 4001 bp, Homo sapiens
tagtcaggaaagcaatagagacctcacaaatatttagccttctgacacaagcttgtaaaaaaacagttccttaaaaattatcaagatcatatgcataaggaaggctgtgggagacaaaggagtatttctttaggagatataatgtttcatctatcagactagcaaaaattgcaaagaattatggtattcagtatggcccaggatttgagaagttaggcaattgcatacagtcaatggaaaataaaaattgcatattcatacttctttttccaaaagtaacacattcatataaacaatttaagtgtgcatgtcctttgactcagcaattctactcctaggaatttattctgagtaaacaatcagataattgcaaaatgtacaaccacacaatcaatacatgcacacaaacacgcaagaatgttcactgaagcactggctgaaagaaaaaagtttggcagcaacctataaacccaactattgagatttaagtaaactattgtatcctcctatgacaaaatatagccataaaaggaagattcaaagtatttcatggtacaggaaagtcattcacattatatgttaaaatcaaaagcacataaaagagtattatactattattccattgttgttcattaaatagttgtaaatacataggaaaatgaccaaaataatataaatacactaaatttttacagtacagctggtgtgatattctgggttatttttattttcatcttagttctctttaattttctatatgttttttactaaattggaatctcagagattttgaaggcaaatgatcagtggtaaaataatgctactacgtataaattcattctacaaattgggctaaccagatggaaaatgggtcaccacagaaagtattataattcataagaataattataatatcatacaaatttattagacaatcaaataccataaaatatttgtgactggaaattgaataaaacttaaaagacattaataaaggtctgttccttaaagtgctcagacatttaaaagatactttcaagacaaaaacatctactacaaggaggattactagtctcttcaggccgtagtgaaaatggagtacatcatcatcaaataacaacgtcagctaaaaatacagagcctgtttattgtgtacggaccaactgtgcaagcaatttgtacaatactttggtgttaactccaatttggatacgaattactcattttcacaaacttaaattggattacactttatctttcccaattactgaaaacatttacttaacacatacacatttggaacttaacttcgatgaagtaaaaatacgaaaagttaatctctacttccaaaaatgtcgatgcacgctgcaattgtatttcatttctttcgcaaaattttgcacaggatattgttgttaattgttagtagaggaattcagaaatgactagatcctttagttgaggcaagcaggtatgttccccgtgttctagccctgcacttaagagtcaatgaaagaaagtttaaaaaagaaagcattgtctcctctggagaccccgtctgccacgaccacataccttgattcttgctttctctataaattctagaggggctttcccaaactcaaatccaactccaatccaaggaatccagcccttgatgcacgggggtctacgcaaattcttccgctgaaggagtaagaacagagcaaggcaacccaggattataatcactgttggggaaattagttccatgtttttgtccagcaccttccagaagcagaaaagtgtgaaacagtcctgccgtcccttgcttcttttctgtgggctacggaacctgtcgggactcccaacctttctgctgcaacttttgcagctctccttcgtaactgtagcttccttcctctgtcccagttttcaggtgatttttccattgtcgctccctcccacctccacttctctttgaatctcagccagcgcggaaaaaatgcaaggaggggcagggccgggctaggactgacgggcgagaaccagccgcgttgccatggaggccgggggcggagccgcagagggacccgcggccggccaatcagagacgtagcggagcccggcggactacattgcccagtaacctcctgggctccgctgtgtttttctattctggggtgtaaggggcagctggaccactccagctgggactgctaggaaggttgcgggtccacccggccgagccgaacgagggaaatggtcctcacccggccactcgccggttgaaaaggggccgccctggcagggaagcggccgccgcggcgcggtgcagcgcagcggcgagaaggagtgcgttatcgtcttgcgctactgctgaatgtccgtcccggaggaggaggagaggcttttgccgctgacccagagatggccccgagcgagcaaattcctactgtccggctgcgcggctaccgtggccgagctaggtacccggctgcccacgcctgggcctcccgggccagtggcacgcgccgcgctgggggagggtgcgcgggcggcttcgcgcccggcagtgcgcatcggagaggtcgccccttccatgcccgcctggcagaggtggcggtggaggccaggcccgcggtgggaggaggagggattgaggtctccacggccttttccttctaatctcttctaatgcttcccttaggcatgtgctgtggtgcttgaatgttgtactttaagaagcttcgcgagctgtcattcctctgtaggaatcattttccttttcatgaggatgacctttttaaaaacgtaatctgttttccatccttactgagatcatctctgtggtttatagtcttacacagccacactgtcattatcttgtgggtccaagttgtggacctaccttgtgggacttccgttattaacctgccactcacagagcatcgactacttgacctctttgagtgtaattcatctatactgtttaccttgcaggattctgagaagtcaataatatatgattgctaaacccaaggcaggacacccattagttgcgacatttttataattcctacaataccagggactgtggatatatatttgaaaagacccagttctgaccttcttacaggctgctggggagacagagaaagacaattataatgtgctacttgttataatgaagatattattaggtgtcataaaagcatagaagagcagttacatctgcctacatgagtaagaaaaaactttaagaggccatctagagtggaatgatgatgcccttgaatgagcaagtagcgtttattccaaggattttgtgagtagtatactcatgtgtttcctgtgaagccttaactgtgtattttaagattacccttacattttcttgcctgttacaaaaaaataaaaagaacagttctgatgcgttatcatttgtaaatgttagttggtcctattttaagagtttattttttaattctagcatagccagccatgatcagttgtttcgtgctcttccatttttgccttttagcccctctattttttaatgtctctcctttcgaaaatgatggagaatttttacttttcattgtttttactgaaataaaattcatcagcttaaaaagatctaaaagcagattgctgaatgatatttccaggttttatttttaattgatgtgtccccctctgactcaatggcttttatacaggactattcctcgttaaaaattcatggagagaattgtgtgtggagaatggatgggaatcaaaatgtgggatggttttaagtacaaaccacttcaggaacctgaagcatcatttaacaaaccagcgagaaaacaaaacttattttgaaagacataatctgtgtaatatggagaaatctattaagatttttcaggtttcatatgtcaataaaatattgcttgaagtctatgcaagctacttctgttctagggaaactgtcagcaagatactaacttttccaaaaaccagtggtaagatttaat

SEQ ID NO: 585009 - DNA, 4001 bp, Homo sapiens
ctaccagggagcaagacaataatagcacagttgtttgcataaaggaagaaatgggggttagatggagttcccagcacagatgaagaaatagaccatttatcctcccatgtctaaggccatggccatcaccacacagtcatgtatgtgtaaaaacacataggcatgtgcatctcatggggaccagtcactcctgtttacatgcacccttgtttacattgcctatgggatgatttcctcctccttcattacacttcagttgacaacgtactcctgaagttaaatgagtctgtttctgacattgctgcctgctccatcttttatggagcttccctggggttcaatttatataatttctaaaatccttcctgaatcttaacttcctgtgggtctgtttttacatccagatttcctccctgtcccttcattttctcatttttctaggacagagggagagtccagtaatcttcctcccacccagacattgtaggttggctctactgcaaaatacaaaaccagagacctggctagctcaaagctgaaaattcagtctgtctgtggtcactcgtttgtggaacccagctattgacaggcagtgcctggcactgtgctactcagggatgatggatcgatacagcctcactgctgcttttttcccctactctccgtggagcacactttccgccctaggccctagggaaaatccatcccccgcttcagctggctttgcaaagaaactcaggaaactaacaccaaactcagaagggggaaaacacaagactttgaactttttaaagatgggaagctgctttcattcccacgtgggcatcaagggaaaacctatggggactcttttccggagaggtgtgattttcctctaaccctccgagaaacgttccaaatccactccaaaactgtggagaagtggccgaggcagagagagaagagttaaatcaagcccagatctcagcaatctgtgttcaattttgataaaaatctccctctcccccaccgccccccttcctccaccccacagctcagacacgtctctttatgttaggagcttgcatcttgtttggggcaccacacgcggcactcctggagaacctggcacgtacctcaccgtggccatgtggcagaaccaaccatcccactcccaagctacggctggacacagggccacagcgtcctggccatcaccaccacctccccctcttccttctcatcctcttcacaaaattacctgccgccagaccaagtccctcattccccggttaagtcagagtcccgacgcctggtaaagtcagggcatgaggttggtttgcgaccgcaggtgctgagagccccagagtccggggacccctttcctgagatgctccttcccccgcccagggtcccactgccactgagaacaagaaccttacggctgccctgcccactggccagaggccaggcctgcaagtgggagctgggggcttgtgaagacttcagcccagccaagtgaaggttcaagccgaacccggaaaagccaccaccaaaaagttgtcagttttgcggggtatcttctgtgtttgtccacttgtgacaaccaggggtcaggtttcaaagccgcaaaaaacatttttaaaaagttttccaaagacatttcctatgtccagatgtgccagtacagacacacgcaatcacactcatacacacacacaactcacacacacacaggccctgggagcccactccggggtcggcggctcctgcaaacactttggagaaacaaaaccgccagcctgcggagctgctgcctccccaagccccgcggggcatgctaaagaaagcagagggagagaagtgtgggagcccagcggagagggctccccgcggcccgggccccaagacggggagcgccagggccggccgcacttactccgaggaccccagggcgcccgcgctcccgcagcccgaggtacggcgccgccgcccgcgctccgctcgctgctgcgtgctccgcgctatccccgggaagccgcggctgccgcccctccaggcccggcctcgcgcccgtccgcccgccccgctctgacgtcaggcgtcttggagcgggatatttatggcaaggttactctgaattttccctaggtagacttctgattgcagtttcttgggatttgtaattttcacactttcagaccgaacgcaggcggggggagagcgccaccggcagggcgaggcgtacaatgagggtagctgttccccactttggcagggagcgttctcagggccccttctgttttggaaacatggaagggtcaaagaggcaaaagtggccacctgggcagcgggtttctccccggctcctcctctgggctacgggcaaatggcctggtctgaggccggctcggaggtgaaggtcccggtgccaaggaatcccctgtccctccccaaagtgtccctgcactggacagtgtgtcccaaggggtgctgggcaagacaggagcgaaatcaggcacaacagaacagctaattaggagtcctggtccacgccctaacaacttttccatttcttttttgggagtgtatatatatttttttaagtttatttttattaaattatgttccacactccctgcctctgtatagcttttccaattcagtgccagtcaattcatcttacttcattgcttgtatgcatagtttgagcagtttacaatagctcttattcatacttttaaaatttccttttagtttttttttttcttttttttttaaatgtgattgtggtctgtctccttgactgaactagagattgctttggtcaagagcaattgtcctctctgggattggcaacaccctcacggggagtatttgatcttctctgtttcctattttccccagctccctctgcaagcaaatggtgcccccactgggtgatgacctgtatacagttttctgggtgttcagtggttgttctgtgttagtggttgtctgtttctccacctcaccaaaggggcttagggaaatggcttggtttaagggccacccttccagagaaaaaaagagaatgtaatgcatgatcttccagaggaaaaaaaaaaaaaaaagagaatgtaatgtgttatccttcatggttcccaaggattggagaatgaaatgaacttaaaatgatacacgtgagatgcaaaatacttatatggttagacaacataagtgtttaggtattcatctcaccatgaatgggagggggcacggataattgcaaatcatcattaaaacacaactatagtgaactttccattagcccaaactggtagaggcggggttgtgttttaaccacagttacagtgcagcagggactcaaggacttggaatgtgtttacctctttggcagcagctggttagagctgattgccagaaggagctgtcttagggctgggcctctcggtagaggccacgctgttttgacccaagccaccgagggccctgcagcagggagctgctgtttggtcactgtgggattgctctccctggcataataccccacttttacctccttccattccctctctcatatcaaggctccactggcaaggtgagctctgttcttcagcagaccctgcaaataggtttccagaagccattgacaaacccattctcccttgcctttctcaactaaagaagttagaaatctacaatattcaccatcccagactccctggtagctcacaattgctatgagaccaagttctgaccagtgagattgtaatacagaagacagaggatgccttccacaaactctctttaagagaagatcagatttggccaggcgcggtggctcacgcctgtattcccagcactttgggagaccgaggcgggcggaccacgaggtcaggagatcgagaccatcctggctaacacggttaaaccccgtctccactaaaaaatacaaaaaattagccaggcgtggtggtgggcgcctgtagtcccagctacttcggaggctgaggcaggag

SEQ ID NO: 585010 - DNA, 4001 bp, Homo sapiens
tgtagaaagagttgaaaacccagttcttgcccctcacctgtccctgaggagttgtatgctgggataagagtatttctgggaatcctgttccgaggggtcccttctgtccctgggtagtcttctatgtttaaataatggaaatgaatgagaacatttaaacttgttacttccattggctctagtaaaatcaaataagaaagcctcatctttcattatctctatgctttctctactgcctgtacttaccctttatcttcattctttacacctggatccaaggctctttagtaatggggagtttaatctgttttgcatcaaaaactttggagacagtcgggaaagaagactggggagagaacatgttctcacagcaagcagtagtatttcaacttcctccacgctcaccaaaaacaaaatcatttacaggccttcctattggtcttgcctgcacagcctccgccttcttgagcccctgactctctaagttctaatgcccaggagaatgttctctcctctttttgtcctgatgggggcacgagtattccctcagcatccgaggcgctggaggaaaagctctgaaaactcagctgggagttaggagccagagtttgcaactaccagggagcaagacaataatagcacagttgtttgcataaaggaagaaatgggggttagatggagttcccagcacagatgaagaaatagaccatttatcctcccatgtctaaggccatggccatcaccacacagtcatgtatgtgtaaaaacacataggcatgtgcatctcatggggaccagtcactcctgtttacatgcacccttgtttacattgcctatgggatgatttcctcctccttcattacacttcagttgacaacgtactcctgaagttaaatgagtctgtttctgacattgctgcctgctccatcttttatggagcttccctggggttcaatttatataatttctaaaatccttcctgaatcttaacttcctgtgggtctgtttttacatccagatttcctccctgtcccttcattttctcatttttctaggacagagggagagtccagtaatcttcctcccacccagacattgtaggttggctctactgcaaaatacaaaaccagagacctggctagctcaaagctgaaaattcagtctgtctgtggtcactcgtttgtggaacccagctattgacaggcagtgcctggcactgtgctactcagggatgatggatcgatacagcctcactgctgcttttttcccctactctccgtggagcacactttccgccctaggccctagggaaaatccatcccccgcttcagctggctttgcaaagaaactcaggaaactaacaccaaactcagaagggggaaaacacaagactttgaactttttaaagatgggaagctgctttcattcccacgtgggcatcaagggaaaacctatggggactcttttccggagaggtgtgattttcctctaaccctccgagaaacgttccaaatccactccaaaactgtggagaagtggccgaggcagagagagaagagttaaatcaagcccagatctcagcaatctgtgttcaattttgataaaaatctccctctcccccaccgccccccttcctccaccccacagctcagacacgtctctttatgttaggagcttgcatcttgtttggggcaccacacgcggcactcctggagaacctggcacgtacctcaccgtggccatgtggcagaaccaaccatcccactcccaagctacggctggacacagggccacagcgtcctggccatcaccaccacctccccctcttccttctcatcctcttcacaaaattacctgccgccagaccaagtccctcattccccggttaagtcagagtcccgacgcctggtaaagtcagggcatgaggttggtttgcgaccgcaggtgctgagagccccagagtccggggacccctttcctgagatgctccttcccccgcccagggtcccactgccactgagaacaagaaccttacggctgccctgcccactggccagaggccaggcctgcaagtgggagctgggggcttgtgaagacttcagcccagccaagtgaaggttcaagccgaacccggaaaagccaccaccaaaaagttgtcagttttgcggggtatcttctgtgtttgtccacttgtgacaaccaggggtcaggtttcaaagccgcaaaaaacatttttaaaaagttttccaaagacatttcctatgtccagatgtgccagtacagacacacgcaatcacactcatacacacacacaactcacacacacacaggccctgggagcccactccggggtcggcggctcctgcaaacactttggagaaacaaaaccgccagcctgcggagctgctgcctccccaagccccgcggggcatgctaaagaaagcagagggagagaagtgtgggagcccagcggagagggctccccgcggcccgggccccaagacggggagcgccagggccggccgcacttactccgaggaccccagggcgcccgcgctcccgcagcccgaggtacggcgccgccgcccgcgctccgctcgctgctgcgtgctccgcgctatccccgggaagccgcggctgccgcccctccaggcccggcctcgcgcccgtccgcccgccccgctctgacgtcaggcgtcttggagcgggatatttatggcaaggttactctgaattttccctaggtagacttctgattgcagtttcttgggatttgtaattttcacactttcagaccgaacgcaggcggggggagagcgccaccggcagggcgaggcgtacaatgagggtagctgttccccactttggcagggagcgttctcagggccccttctgttttggaaacatggaagggtcaaagaggcaaaagtggccacctgggcagcgggtttctccccggctcctcctctgggctacgggcaaatggcctggtctgaggccggctcggaggtgaaggtcccggtgccaaggaatcccctgtccctccccaaagtgtccctgcactggacagtgtgtcccaaggggtgctgggcaagacaggagcgaaatcaggcacaacagaacagctaattaggagtcctggtccacgccctaacaacttttccatttcttttttgggagtgtatatatatttttttaagtttatttttattaaattatgttccacactccctgcctctgtatagcttttccaattcagtgccagtcaattcatcttacttcattgcttgtatgcatagtttgagcagtttacaatagctcttattcatacttttaaaatttccttttagtttttttttttcttttttttttaaatgtgattgtggtctgtctccttgactgaactagagattgctttggtcaagagcaattgtcctctctgggattggcaacaccctcacggggagtatttgatcttctctgtttcctattttccccagctccctctgcaagcaaatggtgcccccactgggtgatgacctgtatacagttttctgggtgttcagtggttgttctgtgttagtggttgtctgtttctccacctcaccaaaggggcttagggaaatggcttggtttaagggccacccttccagagaaaaaaagagaatgtaatgcatgatcttccagaggaaaaaaaaaaaaaaaagagaatgtaatgtgttatccttcatggttcccaaggattggagaatgaaatgaacttaaaatgatacacgtgagatgcaaaatacttatatggttagacaacataagtgtttaggtattcatctcaccatgaatgggagggggcacggataattgcaaatcatcattaaaacacaactatagtgaactttccattagcccaaactggtagaggcggggttgtgttttaaccacagttacagtgcagcagggactcaaggacttggaatgtgtttacctctttggcagcagctggt

SEQ ID NO: 585011 - DNA, 4001 bp, Homo sapiens
cccttcccatgtgtgtaacacgtctgtggctgtcgtgtgctgagctgaggtcacgcagaagctgcgattgtgtctggtgcaaacacacaacagcatctcggcagcacctcccttcccatgtgtgtaacacgtctgtggctgtcgtgtgctgagctgaggtcacgcagaagctgcgattgtgtctggtgcaaacacacaacagcatctcggcagcacctcccttcccatcacatgtgtgtaacacgtctgtggctgtcgtgtgctgagctgaggtcacgcagaagctgcgattgtgtctggtgcaaacacacaacatctcagcagcacctcccttcccatcacatatgtgtaacacgtctgtggctgtcgtgtgctgagctgaggtcacacagaggctgcgattgtgtctggtgcaaacacacaaacgacctaaacagacggccaggatttggtcactgggtgagtaaacaaagtctgtacaccagctactttcctctcaggaggcatcaggggcagagttgggggcccaggttaatcccacacagtctaccacctccgtcttccacaaggtcaggagataacggggaacctgggaggcgtcccagacactggacttcctgattctttaatccagaagggtttgctatgttaacaacctggctgagcgagcgaggcagacggtcatgccgcagcttcacctgggcaacatttaaaggcagtaacttttaacaggacagacttaaatttctaatgtaaaagaaatttcacttagtgtaacagaggtaacacaagtaaacatatctttctccagcctttttagtttgtctttaagaaaatacagcaactacgaaaacgcttgtgagttgtttccagtaagtttaacaaaatcatacaataacataataagcagaggggtaatgagtggagttcctttcattgtgtgaaaggaggggttcagagcgcccagggagtgctgaagagggcccgtggcagggaaatcagagtctctctcctctggatcagaggacacgcctctccttacaggtcaggtcacattttaaagttgaagaggcctttgtcagttacatgctttcccccaatactttattacagtgacgcgaccttaagaaaagtcagcacattcctgaggacaagtcggggtgcgctttaccacgcggacactgttgcccctaacccaagacagcaggggggacctggtccccggggggggagtgatgccaggatcccgagccgacctccgccaggggaacgccggtcagtgcctgcaggtcagatcagtgctgtaaccctgtaacgaacagggtgtctctcccaaatctgccagcttcgggatgctggcgtgggtaggcgcacatccacgcacggcggagcgcgggctgcagccccgggcagttttcagggtcctcacctgtgcgcttcacctctaggcacctgcgcgcggggcctccatgtccccctccttggagaccgaactgcattccattcaaatcccaaaggacgtcccctccatccatcagacacccccgtcccactaacacacagtcgctgccgaaggagcagcgcctgtggcccgcacacctcgcagccccgagtcccggcgcccggtccttaccagctgctcctgcagcgcggccagcgccgcctccagctgctgctcggggccgtggaggccgtgggggccgcagggcgcggcgggcgcgggcgggggctgcagggccagggcgccccgtacccgctcctgctgcgtggctcgcagcccctgcagctcctgcagccccgcgaacgccgcgcgcaacctcgcgcccaacctacggcggtcccagcccgcggaccccgggggtccgcccggcgtccacatctcccgggcagggtcccggcctcccgaaccccacgagcggcgccggaggcccagcgcgcgcggatcccgagctgtgtcgcgggtcctcctgcgcctcctctctccgcccccggctccgcaggtcgccaaggtgggctggaatctgtggccaggcgcggagggcggggtctgcacgcgccccgaggtcaccgcggcctcccccggacccgccccgccgaccccccagggcccctcgccggctgcgggcagggcgggcgcacccagaccccggggccagctgagcgcctccgtgacttcagcggggagggccagccgggaggaggagcccgggggagaggggcaaagaggcgcaagtggaacaaaggcggagaaaggcttgttaatgttttaaaatgtttataaagataaactattgggacattatcacattgcaaggaccgtgttaccattacagacgcagtagagatttcaaaaccgtgttacccacgtttcccaatgggtatctgcagtttggaaaccgcacctcgcttttttttttttttttttttttttttttttttttttgagacagtgtctcgctctgtcgcccaggctggagtgcagtggcgcgatctcctctcactgcaacctctgcctcccgggttcaagcgattctcctgcctcagcctcccgagtagctgggactacaggcgcctaccaccatacctggctaatttttgtatttttagtacagatggggtttcaccatgttggccaggctgctcagcttgctttttaaatttttaaaataattgcttaagatgcagttcacataccataaaactcacctaatttaaggtgtacagttcgtttttagtatattaacgaagttgtgttcaccacccccaaaagaaaccctgttctcatcggtagctacccccattccctctcctgcacccccacacatagaaccaccaccccgcaggttctggaagttcatggaaatggggtcacacgccaggaggtctctgtgggggctccttttggtgagcgttttcaaggtgcgtctgtgctgcagattgcgtcagaactgtattcctttgtgtggctgaataatactccactgcatggctgtgccaagttttgtttatccattcatctgctgatgacatgtgagttgttccattttttagctattacgaataacgctgcaaggacattcctgtatgagtttttgtgtggcaatatgttttcattatacctaagagaggaatggctggatcgtaggtgactaccgtgcttaatcttgtgaggagctgccaggctgctttccaagtggaatcacagcagccagcggggtatgagggttccatttcctcagtgtgcacaccaaccgctgtctttagtccagcagatgtgaagtggtatctccctgtggttttgatttgtgtttccccgatggctaaggacgttgagcatctttccatgtgcttgttgtatacttcctttggagaactgtctattcagatccttggcccattttaaaatttaggttgtcttttcgttattgagatgtgagtattcattatacaattcccttatcagacatgatttgcacttcccttatgaaatacatgattgacaaataatttttccatgttgtgagtttttttcatgttcttgatagtgtcctttgcagcaaaaaatgtttgtaattttggtgaattccagtgtatctactttgttgttgttccttatgctttgggtgatctaacagagcattgtctaatccaaagacaaagtttacagctatgatttctaagattttgctgtagacttagcacttacatttaagcctttgttctattttgcattaatttctgtatatggtgtgaggtaggggccccttcttttacatacccagttgtcctagtaccatttgttgaaaaaacaattctttccctgttgaattgtcttgggacccttgttgaaaatcagttgatccagaaatcagtttctggtttctcagttctgttgcgttgcaatatatgtctattcttatgccagtaccacactgtttcaatcattgtagccttgtaataagttttgaagtcaggaaatgtgagtcctccaattttttctt

SEQ ID NO: 585012 - DNA, 4001 bp, Homo sapiens
atgacacggccggtcagtgaagagcagtctttcagctcacatagtcgcccaaagaggcggatcagcttacgcttcaaccgtgcctcctgcaggtatgcggagtctgggtcatccaattctgagagatccaactccttttcctgcagccgccggatctctgccacatagagcgccagcagctgctccaaacgctggatctgccgccgggaaccacgggtccttggagactgagaggcagtgttttcagcatttgtggggtccaaggagaggtgtgtgggagggttattcccagagggctcattggaggtggtggcggcaggggccaagttcagcttctttttggctgagtgggccttgagaacagtgcagagctcattgatgtagacatagagcttggctggccggctccgggcccgagacaggaccctagagaggatgttgcagaactccgccgaggccaaaaacagagagtgggcacgttgctgccggttatagaggaatgggaccacctcagggtggtctgctgtctgcatcttacaaagttcaaggaactagaaggttcaggggaagaaggaaggggaagagagacaagggagggggttgagagaaaggggaggtggggttagtgggaaagaaaggacaggagaaccagtcagccatccccctccctggggtacaacaatcttccccgctaaagctcacctcttcgaacagcttctcattctccagcttgtagcatttcttgccgcccgaactactgcttcctctggccccatgaggctcagaggagctaggggcttctgccccaggtgaggccgcattggggagtgggtgggagggccctggctgagcagctgcttcatcttcgtcatcatcatccagcacgatgatgctgttagcggtggccataggggatcaaatcccccggagggaggaagtggtggggatttcagaattcctgctggaaggggatggggcctcagaatgagcccctccagcatagccccatcccttcacctcacacattttctgaactccttgggtttcagtaacatccagccctgaccaacactgtcttcaccacctgatttcaataaccattagttctatatgctttttggggcccttcaagtggtgtggggggggggcaaaccacccccacaccttaagttgccaccttctgctccacccctcacgtcgatttccggtctttctgttgcatttcccccctatttcttagagttggcaagttgattcttcctcccacactgcaccccaaatcgtcctgacacccccttgcacagacaacacactcctgtgggcgccacctcatgtgtttgccccctctgctctcaaacaagtcaaccccacacccaccctatcctgaatgatcaccccaactcctagactctctgaggtgaaagaggttccctcccaacagtccgttctcttttctcctccttgaattatctccatatttcaccctccgatgagtctcctcaaactggggctttaggttgaagatattttacccaagtcccctccctttcaccccaccctaattttccccattctctcggtgacccgtaactgatcaaaagtccccccgcaccgcgctacgctctcgcgattcctcttagatcccaaccgtgggtccggccggtccgctagatgcgcttcccgccaaatccccctcccccagttcagcccccggccgctccactccctttcagggacaggaaggtaccacagctttcccctcagactcagcgcccagctctccccaatacctctccctctatatccccgcccccgcctctgatccccgcaccgtccggcccccacctcagaaaccgtctctcgaggcgaccctcgccgcaattctcagaacctcgcatggttccctccgccttccttcccactcccaccgcaggccccactacggaccggaagtcacagagtttccgccttcatgcaactaagcgccgccatattgtcgtacggaacacaggcttcctgtggccggaggtgacagtaggcccgccccgcgaacacctccagtgcggcccacatagtcagcggtctcttccaggtcggagtttgtctccccgaacccaggcgtcccaaagcagctgggggccgccattttgccgtacggcactggctacgcccggactccggtgcgcagccagtggagctcttttcacccggtgcttctacgactccgccaatcagaaacttcctgcctggggcccaaccgccggagagtagcgcgtagggaggaccgagcctcgtttccaaggaggggcaggggaaccgaacagggtggattaggaattgggctttccaaagctgtgcagagtttcagggaagggcagaagtctcttaaaagggaagtaaaaccttttctttcagttgggctattggcaagctatctggccctgctttcctgtcccccaggttcccatttccacggcttattcggctgacccagccccttcccctgcaagggcggcgcgctccttgccgctgtccagcagctgtttctactgccaggtgctgcgtcccgcgatcgttataacacatgcgtacaaatgagcacaacgcgccataaaagtgttattgttattactattgttgctgatttgcttttcaagcttcaccacagaactaatgaccagccagaccgttgggacctgaatggttcttctccagagggggtcctcgaagggccgtctgtgctgaccaggtggccgtgctttgtcgtgggaggcctagggtctgcggatgggcgatgatggggtggggcttggaggagagtttgtgcaaattgccgctgcgagggctgctgtgaggcgaaatgaggctcataaaatactttgggtctcctcctcctcctcttcggggagaggggaaaaaagaatgaaggatgaagaaacagatttgatacccacctcgttgtgtttagggaggctggagggactcgtggaggcaaggctgggtccagaggtgagcttatgaggaaaccagaaagattaacagggtcccaatcgctaagattcccatttccacaagtggtgggcatcttgccacttaactagggtcacagagcttattagatccctaacgctgagtcctagaatcgcaaacacccgtccgttgaacaatcccacatcacttctctccagtcgtcaaagtctacagctttcaaaatggggaacataaaaactctccgcgaggactgggacttggaagatgtaagggatttaatttcaagaacctcaactttcccaaaattggtcttcctaaggaaacacctgcagtacaggttctcattcttcacttctccttttacaatagagtcaccctcttaagaaaaaaaaaaaaaagaatagttctcttttttcccctcccccctcaaaagtatagttctcaaccatgaaatctcctgggggtaatcttacctgtttaaaataaagggaaatgtaccctgtttctttcaccaaggcaccatgaataccaccttttcttttttttttttttttttttcctttcttttgtcttttttttttttaaatgcagggtcggccgggcgcgatggttcacgcctgtaatcccagcactttgggggtccgaggtgggcgtatcatggggtcaagagatcgagaccatcctggccaacatggtgaaaccccgtctctactaaaaatacaaaaaaattagctgggcgtggtggcaggcgcctgtagctccagctactcaggaggctgaggcaggagaaccgctcgaatccgggaggcggaggttgcagtaagccgagatcgcgtcattgcactccagcctgggcgacagagcgagattatctcaaaaaaaaaaaaaaaaaaaaaaaaaaaaaaggaaaaaaaaagggtcttgttctatcacccaggctggaatgcggtggtacggtcatagctcactgtaacctcaaattcctgggctcaagccatcctcccacctca

SEQ ID NO: 585013 - DNA, 4001 bp, Homo sapiens
gcccagtaagaatctaagcaaccacacatgcctgtagtcccagcaccttgggaggccggggtgggtggatcacttgagctcaggagttcaaaaccagcctgcgtaatatggctaaaccctgtctctacaaaatatacaaaaattagccaggtgtggtgggatgcacctgtagtgtcagctactcaggaggctgaggtgggaggattgcttgagcccaggaggttgaggctgcagtgagctgagatcgtgccactgcactgcagcctgggcgacagagtgagacactgtctcaaaaataacaataatgataataggtttttaaaaagaatctaagcaatcacacttgttcctagagaaccgctctcacaaagtgcccagttaacagcctggatgaccatacaaaatctaaatctttattgggaaagataagtgacagctttggccagattagtacaggaacatactgctggactgattctcacagacgtatagtattaaaggtgcaccttcaaactgtgagttgagaaaaaaataaaaatatttaaaacatccattataaaagtcctacgcatttaacaaaatcttacgtatttattacaattttacaatctgcctagtattgtgctacagtaccagacaaaatcactttagggttttggggattttgtttttttaaacaaactggtatgtaatataaacttaggaaccaccaccaccatctcgagtatcaatgtttcagaatggaggcatagttcagtgaaaaaaatgccggcattggttttagttttgattcttgtttcaccagaaagcatggtggttgggggagctgtcaaagtactccggatagactcagcgccattaaataagctcaggcatatacggccaggagcaagggaggagaggaaacactgaaacaactcggcagaaagctggcccttgctattaaaaaaaaaaaagcactaattaatgaggacgaatgaaatagggacacccagggctggtaaagggggttgctgctttaatatgctggacaggcagagggtaaactcggttgtgggttaattaggtctaactccaagtcaaagaccagctccagagaaaaagcagcctggttgagagtctaccggctcaaatacacaggaagccacacgattccaacttgcggcgccagcaggacactcgagaggaggtggcagcaccgcctgctcgccagcgtccaaggccaacctcggcaaacgtgccccggccattccgcacgagccccgaacgcacacgccgggattccaattccgcgcgggaggagcgacggcagggagggcagggcccagcgccggccgaggagcggctttgtcaaaaggcagctggaaagaactggccctgcacacggctgtcccctaaggcgaccctcggggtcaggtcacttctcacggggccagcagagtcaggaagtctggaaactaagtgaaatgggctggggggcggcggagagaaagtgcagagacgccaggttaattctctggttttgggggaaggaaggagtttggtgggggagcgacaaggaatgcagtaacctacttcacccccagccccgcgggtagagccggactccgcggatggcaggcggcgagcccgacttcctcccgcgctccgtccccccaggcccggcccgccccgtagccctcggcccggcccggcccgccccgcagccctcagcccgcccctggcgcctcgggtcccgccgccagccggacgcgctccactcacccagctcctccgcctgcagccggagcggggcggagaccgcgagcagcaaagccaggaggccccgcccggcagcccgcgccagtgcgccgccgccgcgggcgccgggcaccatgaccccgctgggcgccagcttggcaagctcggcctcccctcgacggatcccgagccgcagctgcccgggccgggccgcctcctctgcggacgagcgcggcgccgggacggggcgcagtcgctgccccgcaccgaatcccattggggcggctttcagcccagccctgcgggggcgtctcccgcccggccccgccccgccccgcacgtcggcccctagaggaggaagtcgcgttcccaggcagtgaccgacggcgaagccggaggcgagcgaggcgccgcccgcgctcccctccacgtatctggcgcgccctgctgcgctccttccttgccttcctccccacctgcaccagtacacgtgaacctgctaggcagcaggacacctcgccgccggacccgcccctcgccgcgtggtgcgggagtcattcctagatgggctgagcccgcggcggtgccttgggaggctgccccctccagggttttgccagcccgcggggatgggcatgccagggatagcaacaccgagggactcgaaatattttgatgataggatgatgacagtgccaagtaggaccttcactgatttattcactcattcattcattcattcaaaagttactcagttcagcagtgtgcttgtcaggagcagggctaaacccatgtggcacttgcagacaaaaataatcaggcaagtattcaatgcaaattgcaatcagtgacatgaaaggtgctgttgaagcacatttagagagctgtaattagatggcgggtaacaggggtgagggcgggaatcagctaggaaaggcctaagtggcatcaaagctgagattaaagcaggagccaaaacagacaagttgtgcaaagaagctgaaggaggaaagggccaggtagctggagcacagtgaacaggtgggtacacggccagatgtagaagctagtgtacagagtaggggccaggacgtgcagctaaataacctaaaggatgtttaacttggtcctcggagtagtgagcagccacggaaggttcagaagggggaaggactccacccgatgatcctcttgaggagttgcggagaagggtttggggaggacagattggagactggagaattacagggttatcaccgagtagttgaatagggtggtggcagtggaaaatgacgaggacagattagatatgtattttaaggactatctcacgtctctggtcccctgtagtccccgtttacttcctctgcgcgctgccctcaccttcgcaccaccgcgcggcacgctgaagtttcacctagaggtgcagcgcagggaagcgtggaggcggagaggaagcaacagcccctccaatggcaaacattggcccctcgtgatctttggataccctggacagactcatttcatacatgcgttccttttttcctcttccttttctttttttaactaaataaacaagctgataaaatctcaaatgagattgtctttggggctttgctttctctgaggcagcatatcttagatgaaagaacttgggctttagaaatggaggggatcccggtttgattctggacctcagctttgttgaagagctgaggtccagaatcaaactgggtatatatgtgtatattcagtgtatactgaatttgtatattaagttctatcatgtagagaaagtacctaactgaatgtgtatattgggttctagcatgtagagaaagtacctaataaacggtaggttttatcattttttaacagaaagtaaattcacacccataaaaatattgagtattcttacactcaaaaacacagaacgatactttgatacgttgagtctcctcctaacttcagttttcgctttttcttatttctcttcattctttctaagtgagtttgggcagctgcttccaggctccaacaggtttgacactgtgagctatgaatgaagcaaagacaatggggagtattgtttaacagtgaggaattcataatgtgaggcaggtgggctttcaggggtgacttttttttttttttaacttcagtcagtaccttgatgggaatggaattatctgctgtacacctgaatcctgagccagataaggggaaagatttaggatctggtaacaatgaagaaacagaaa

SEQ ID NO: 585014 - DNA, 4001 bp, Homo sapiens
aatattattaaccatagtcaccacaatgtaccttagatccccagaactcactcatctgttaactgaaaaagccagacacagtgagatcaatactgtaagatctccctcatatgtagaatctttaaaaagagagaggagagatagagagacagagacagagacagagattggttttttaaatgatttctgcctcagcggcaggcttaagatgctgctaagctggcctggctgcagaacagcagaagtagacgcactattaaaacttttctttgagtaattctaattgcggcacaatttactctcttaccaggagtttgttgtgattctttacacagattcttagagtctttacacagaaaatatatttaaaagcggggtgccatggctcatgcctgtaattccagcagtttgggaggctgaggcaggagcaacacttcagctcaggagttagagagcagcctgggcaacacaataagatctcatcactattggaaaagaaaggaaggaaagaaaggaaggaaggaaggaaggaaggaaggaaggaaggaaggaaggaaggaaggaaggagaaataaaagaaagaaagagataaagaaaaaagaaagaaagaaggagaaagaaaagagagaaagagaaagaaagaaagaaagaagaagaaggaaagaaagaaggaaggaaggaaggaaggaaggaaggaaggaaggaaggaaggaaggaaggcaggcaagctatttaaataaagcaatttctcctccatggtgatttcacagtccagccatggggagaaaaaactttcataaaactgggcaagctaagctcaaaatcctttcaatactccaggcaatttttcatgtccttcacttacaattaaattatttttgtcactctcaatgggagcaagaccctctaagattaggagttaataaaattgttgctcattttcttctgcttgactctacagactccggcaaatacctcaggaatgatatcaggtgctagttactgcatcaaactaagttttgtttttctgtttctcagctctcaattatttatatgcataatcactaagtaaacaggtataaaaatttcatgtacattagtcagaagcaatgtttaaaaaaatcaataaagccaaaatatattaggcagtcaatgccttttttccccctaaagaattgaagtctatgatttggcttgctgcccatacaaattattatcagatttcattaaagcaaaaatttaagtagtgtacatctgagtttgctggttttttgttgttacttttgctaaactgtgctaatccttctgtaatttaaggtttgagcaatagaacaatgaaatgaaactggattcaccctgtttcaaattttccaggggcttctttcgtattttcacactactgacaggctaaatttctcctctgaccttaattctacacaacctcagaacaaagtattcttttctttttttctcttcaaaagactctcactatcctttaataccaacaattgtgtttagatggccaagtgtctgactccatctcatcaaaaggctgctgctggtatagtccagtttggactatcagttttttagtcagtaactttcatggatttttttttagttcatggacagttactgaggtcaaacagtactatctcttactactcagaggtttttgttttattatagggtaaaatgtcttaagtcaccgtgaattataatagcagactcatgaaagaaaactaccccctaggctgggcatggtggctcatgcttgtaatcccagcactttgggaggccgaggcagtgggatcacctgaggtcgggagttggagaccagcctgaccaacatggagaaaccccgtctctactgaaaatacaaaattacctgggcgtggtggcgcatgcctgtaattccagctactcaggaggctaaggcaggagaattgcttgaacctggaaggcagaggttgcggtgagccaagatggcaccattgcactccagcctgggcaacaagagcgaaactctgtctcaaaaaaaaaaaaaaaaaagtaagaaaactaccccctgctgcgaacaactaagagagaagttaaccattacaaagtaacaattgtgcaggaaattatgtcactgatacagaagttactggttaactggagtccagtttctggaattaatggaaagggctactttaatgaactatgatgttctgatgtcaaaggttgaaaattttaattaaaaaattttgtatcagttgataagactgtgagcagcagaggagataatattattaaggatagacatcctaatattttctactcacatatattgggttccagcttactcaaaaactacagaagattcagtaattgcccaatatagcatttttcaacccctcagtttgggaatctttttgatcatttcccagtgacattttcagataatacaatgaaaccatactgcatgtagattttaaaagcacattttgaagcatctttatgaataaaaaagttttaagaacatttaacttaaaaatgcagtaaaatgttactcagcacaccctgaaccctacctaaatgtaatttttcaaccatgatcaactccattttaatctgagggagacaaatggcaaaacgaatatcaggaatttacttaaaccagaggaggagaagagaaaggaagaaacaggccgggcgcagtggctcacgcctgtaatcccagcactttgggaggccgaggtgggtggatcacgaggtcaggagatcgagaccatcctggctagcacggtgaaaccccttctctactaaaaatacaaaaaattagccgggagcggtggcgggcgcctgtagtcccagctactcgggaggctgaggcgggagaatgccgtgaacccgggaggcggagcttgcagtgagcggagatcgcgccactgcactccagcctgggtgacagagcgagactccgtctcaaaaaaaaaaaaaaaaaaaagaaacaaatcaccacacttcattttttcccagatgcacttttttttaattgttattatactttaagttctggggtacacgtgcagaacatgcagttttattacataggtatgtgcgtcccatggtggtttgctgcacccatcaacccatcacttacattaggtatttctcctaatgccatccctcctctacactcccaccccgacaggccccagtgtgtgatgtttccctccctgtgtccatgtgttctcactgttcgactcccacttataagtgaaaacacgtggtgtttggttttctgttcctgtgttagtttgctgagaatgatggttttcagcttcatccatgtccctgcaaaggacatgaactcatccttttttatggctgcatagtattccatggtgtatatgtgccacattttctttatccagtctatcaatgatggacatttgggttggttccaagtctttgctattgtgaatagtgccacagtaaacatatgtgtgcatgtgtctttatagtagaatgatttataatcctgtggatatatatccagtaatgagattgctgggtcaaatggtatttctagttctagatccttgagaaaacaccacaccatcctccacaatggttgaactaatttacactcccaccaacagtgtaaaaacatttctgtttctccacatcctctctagcaccaagatgcacatttttttccacatctttaaatctctgaaataaggatgtgccttacagtcaatgaactcttacaagtaattgtcctggccaggtggtggtcacggcataggtgattgcatgagcaaatcagaacttcatcatactgttcacattgtcatcactttagatgagatgtgtgcatggttattatctcagatgttaagtttaactgacttttacaatgatttttgatgttgttgttgttttgttttgttttgtttttagcggtagcaaagtttattgtgaagagcgaaaggacaaagcttccccac

SEQ ID NO: 585015 - DNA, 4001 bp, Homo sapiens
aatttcactcttaggtatacaccaaagagaaatgaaaacttgtacacaaatattcatagatgcattattcataatagttaaaatgtgaaacaacccaaatatacatcaaactgataaatggataagcatggatataaaaggtaatatacccaaatcatggaatgttattcaacaataaaaagaatgaagtattgatgtatgatacaacatggatgaaccttgaaaatgttacagtaagtgaaataagccagacataaagaccatataccgtatgattccatttatatgatatgtccagaatagacaaatccatagattcagaaaatagattagtggtttccagatgacaggggacagaggaaactgggaggtacaaatgttttggcgggaggggtggaaatgaactacaattagttggtggtgatggttgcacaactctgaatacactgaaagccaatgaaatggttggacttcatgccatgagaaatctatctcaataaagctgtaaaaaaaaaatggaatgtaaaattctacctgtcctataatgaccaccccaaccaactctcaactcacaattcccacataactttatttttctatgcacatatccctttgtagcttgcattaaaattgttagtgtgcaggtagtccagttagactgaaagctcctaaagacaaggaatcatgccttgctcatctttgttccctgaactgacggtttcttaattcactgaacactcactatgagtgagctcaagagctgggaataaggacccctgcccttgaaggtctaatcacgttgctggagacagacagtcgacaaatacagtcagccagtaaactcttcctgcattatgctaacagcataaacatgcagggggtgggagcagggtcacaaaagtgagtgttgtcaattctacttggaatgaaaggttgaaataatttaaacagtacgggaaatgcagagcaattttctcctctggtgacaatatagtgtccaacacttggaagtgatttttaagaatgtttatttaaattaaaaggatggatttccaaggaaaaaaaataaggaaaaggaaagaaaaaactgaacagaaaacgcaaaagtatcagtttggtcactaacctttgcaaggatacctttttattttctttaagattcctgttgtttatacacagattttaagtttactcctactgctgacccaagtgaaattccttctccagtcacagtgtcaacctctaccccccaactgcaacgagagttttgaggggcatcaatcacaccgagaagtcacagcccctcaaccactgaggtgtgggggggtagggatctgcatttcttcatatcaaccccacactatagggcacctaaatgggtgggcggtgggggagaccgactcacttgagtttcttgaaggcttcctggcctccagccacgtaattgcccccgctctggatctggtctagcttccggattcggtggccagtccgcggggtgtagatgttcctgacggccccaaagggtgcctgaacgccgccggtcacctccttcaggaagacttcgaagctggacaccttcttctcatggatgacgacgcggcgccccgcgtagaaggggtccccgttgcggtacacaagcacgctcttcacgacgggctgagacaggtggctggacctggcgctgctgccgctcatcttccccgctggccgccgcctcagctcgctgcttcgcgtcgggaggcacctccgctgtcccagcggcctcaccgcacccagggcgcgggatcgcctcctgaaacgaacgagaaactgacgaatccacaggtgaaagagaagtaacggccgtgcgcctaggcgtccacccagaggagacactaggagcttgcaggactcggagtagacgctcaagtttttcaccgtggcgtgcacagccaatcaggacccgcagtgcgcgcaccacaccaggttcacctgctacgggcagaatcaaggtggacagcttctgagcaggagccggaaacgcgcggggccttcaaacaggcacgcctagtgagggcaggagagaggaggacgcacacacacacacacacacaaatatggtgaaacccaatttcttacatcatatctgtgctaccctttccaaacagcctaatttttcttttctctcttcttgcacctttacccctcaatctcctgcttgctcccaaattaaagcaattaagttcctggatgtagttgcccaggtttttctttgctggaagataaatgtgcaaagccagatgcggtggcttacgcctgcaaattccagtactttgaggggcccaggcgggagggctgcctaagaccaggagttctagaccagcctgggaaacacagggaaagcccccgtctctataacgcgcctgtgatcccctgaggcaaggagtttgagaccagcctgacccggtctctacaattaaaaaaaaaaaaaaaaaaaaaaagtaggtgggcagggtattcgcctgtggacccagctatctcggaggctgaggcgggaggattgtttgagcccaggaggtcgaggctgcagtaacctatgattttgccactgcactccagcctgggcgacacagcaagaccctgtcttagaaaataaaatatatattttttttatatatatattttatatattttattttatatatattttatttatttatttatatattatatatttttatatataatatataaaatatatattttatatattatatataaatatatatattatatttatatatatatttatatattatatataatatatataatatatatgtattatatatatttatatatataatatattatatattatatatattatatattatatattttatatattatatattatatattatatattatatattttatacattatatattatatattatatattttatatattatatattttatattttatattttatatatattatatattttatatatcatatatattatatatcatatatttttatatattatatattttatatattatatattatatatattatatattttatatatattatatattttatatattttatatattttatatatattttatatattttatatattatatatattttatatattatatattttatatattttatatattttatatattatatataatatatattttatattttatatatattatatattttatattttttatatatattatatattttatatttttatatatattatatattatatatattttatgtatattatatattatatatattttatatattatatattatatatattttatatattatatattatatatatttatatatactatatagtatatatatttatatatactatataatatatattttatatataatatattatatatattttatatattatatatattttatatatattttttatatattttatatatattatatatttttatatatatattttatatatattatatatattcagagagagaaagagagaatccgggtaccgtgactcatgcctgtaaccccagcactttgggaaactgaggcaggaggctcacttgagcccgggagtttgagaccaacctgagcagcacagcaagaccccatcccggaaggagggagggaaggaaggaagggaaaaataacatttaagtgaatgaatgaatgaatgagaaacagagcgaagactcgcgtgtctaggacccctaaccccctccccgatgatcagcgccgcctggcggcgaagctcgggtgcgcatcacgtgaagacagcaggcagcgcgcaagcggggccctggttggggaggcgggcccaggaggtgccctccgccgtagtacctaccgacactcgcgtgctggagaggggaggggagctcgggcgccggccgcgcgggggcggggcggtgcggctcgggtggcacagtggtgaactc

SEQ ID NO: 585016 - DNA, 4001 bp, Homo sapiens
gactggcacagtggagacggcgaagtcctagggagagcgaagggaggtattcaggggcgcgggaggggtgatggggtatcttcaaacataggctgctctctgcctctcatttcctcagcgggcgcccaggcccttccgacccccacctgcaccccctccctccctaggctggtcccgctccgcacccggaacgtgtccgccacgatctcagctcctcggtgattggtccatttggagaggcctacgaaaaactcccggcctgagtccgggaggccgcggaggtttgagggcgggagtgagttagaaacaaggctccagacggccgagtctcccaaactctacttccctgtgccaagacctatgcctccccccagcctcaccggtgaagagaacgtcagtgccatccagcgtcgcgttctcgtctcctatttccacaattcggagccccaggtcttgcagggctttgcggactccatcgaccttaggataggagaagagggcacggagctgtgacacccccatcctcaattcttccccaaagccccgacatccagttccttctgcctttccccataccacacccgcgccacggcgctcacctctggcctacgagcggggctccagggccgcgtgattagggccgtgtccccttggatcacggccgtgtcgccaagcagcggtcccagcggcaatgactcctcaggtggcagttctagcagctgtagccccagtcgttgcctcagtttacctcccagcaccccgtgctccctttgagctttggccagatccagagcgggaaggccagcccccgcaccttcccccgacgccaggctctctgggactccccggatcagggcatgggagcagcggcccagcccctcccccggcgtccccatcccatccacacagactccccctccaaccgctcggatttcttagttttcttgtttcttcacctgtctgggagaagaaacagaaaaggaggagacagagaaaaagacatgcagacaagggcgttgggggtggttaagagcgcccaggtcttcctcctgccatctctaggcgtccctcccactccgccccacccactccagaccttccgctcctgtcgacctcactctacccagcaccctcaggggtcagattctttaagaggagcctgaggaacaaggctagggtctctaatctccaaaacacctgttgcccctgcttgggggcttgtgaggtccctgtcgggcgcccctcttggcagccactaggatgcgctcactccccaaaaatgcagcagccccgcccccttaaccctcagctgctcgctaccgcagggactggaagtccagcccgcgacccgcaggggttatgggacagaaggagaaagctggagaggcaggggctggggaatggaagtcctgaatacccgaacgagaagggagagaggtgggtaggaagggaggagttcgagcctaaggagttaagcatcctctctccgccctggctggtcacgctgcccctagcgcgacctagtataaaccagaccgagtcccgaaggactgggagaggtctaaaacgaaatgcgaggggcggggtaacagggggcgtggttccggggcgctggcactactcccggctccaggacccggttccccgtctatgtcccaaagtccaccccgcctagctccgcgcccaaataccggctccccatactctctgtctggtgcaggcatgggcccggcacccccaaactccggcccccacacggttcagggccccccacgcaagactcacctccagcggccacccccactcctgtcgcgctgtgatctcggctggggccccaccccccgaggacagagttggtggagaagggagtccccgtcttcaagcctcggggactgggagctctggcttttagcgcgggtccttgtgtaggcgagctcatatactacgatggggcaggggcgcgacggtctggcggctccggggcattgtctaagcgggacggggcggggcttcttcgggccacgcccattccgccctgctaagcctcgcccattacatccagactgcgccccccttgccagaaatcggcaccgcccagcgagcgctgcccaggcccacccagatctggccggccctggcgacggggctgcaaacgcttcgtagacctcagaacagcgcaacggcggaccggcggaccggcacgaaacatagcagccccaccacaaacatttcccttcttaattcctggcttctgccctgagctcaagatcactgacccacccctcattccatgtcgcccacactttaaatccccattgcgtaaaaacacttgatttttattctgtattttattactgaaatatgttgtcctactcatcccaccccacaataaaaatctgacccaggccccccatttctttccctcatcccctcttccaccacaccatcccggaacaagtgctccaggattccctgcccactggccattttggagtgtgtccattgggtagcaatgtggaaaccaccagggcctttgtggagaaaatggagggggttgagggagtcccaggaggggcttatttgagggcctttgccacttgctcataggcgagctcgatctcctcatcatctggacaggtggaagcgaattcttcccgggcgtaggcattgctcaagtaccgatgcactccccggaaggcctcggggatggtgaatccccggtacttcttacacaccacctgaggatggggagaggagagggaccaacatgttagacccagggaagccaccttggctttcccttctccccaggccgacatgataaaaccagctcaactcctcactgtcttgtactgtcgttagccttccttctcacttactgaaatcctggcttttaataaccagccatttttcctgagtttttaaaacttgagatataatttacttataaaattctcctcttgaatttccacagtgactttttccccctataccacttcaggcactgacacaggtgacttttgtctctatatttttcatcagacttttttttttttgagatggagtcttgctgtcacccaggctggagtgcaatggcgcgatcttggctcactgcaacctccgcctcccgggttcaagtgattctcctgcctcagcctcccaaatagctgtgattacaggtgcccaccaccatgtgcggctaatttttgtaattttagtagagatggggtttcaccatgttggccaggctggtctcgaactcctaacctcaggtggtccaccagccttggccgcccaaagtgttgggattataggcgtgagccaccacgcccggcccatctgacttttcatcatatattcttaactttcatgtgaatattttattgtctcagatttcaaccctttgagagcaaggcccagtcaccatacacttgtgtatctttcaatgcttagtacacagatgttcactacatagttgtgtggcagactgatgtcaggcccatgttgcacaaactaaaccatagctttgagactatgacaaaaacatgggaaccagcagttttgatcttccacaagaggaagtgaagactgaagttataaagaaagttaaagctttgactttaggaaaagcctgctctgtctaatctgggaatttggcagtgataccgagacaggaagagcattcttcaaaagtaatactgggatgtattcctctttgctagtctgtttgcacccatgacttacatcatggaatataattatctcaagcagtggtcttgttagcaatgactgctgcaaaggactggggtggggtctgccattggtagcaatttatgaaaaccaccctaagaaagaaatcgtctttagagtggttgtcaggggaagcccatgtgggagctccttaaagggccactccagtggtcatcctctcctcccgcaataaccacacacctgtactatgtgtaactttggcaacaggttgcagtcagccagggtgagct

SEQ ID NO: 585017 - DNA, 4001 bp, Homo sapiens
ctctgatggtgcttggtgttggagttcctgccctctctcacctcctggctgttgggcagatccccacctccacggtgcaggaggaaagggggcacaccaggcaacccaggacgaagaaagagacagtcagcagctgcgtcatctgggagggtcagggaggcatatgggtgatctgtcagcactgccattgcctagaggaaagaggaagtgttcgagtctcagaacctctccacagctgtgtctgcctgctcaaccaccactaagggctggggacggactgacatttgtggaaaataatgacagcaagcacatagagcttacgatatgtcagacactaagtactttagttacctttgctaatttccaccttggaatcacatgcagttattttcaaccccctaccttccccagcccctcctatctgtcctacccatccttagagtcacagtttaggtgccacctttggggtttcctgaaactccggaagagcaaattaatcacccctgttcccagtcctgctgttgtaacttcttattttctcctgtgttctttcatgtaagatggacagcccattgagggcaggggttagggctaatttcctaagcctcccagctcccggcctcccgggcccagaactgcgcccactttcgttggccccgccccctcctcacccggacagccttttgggcagcgtcgctgctgcctgccacaacagtgcgaggtccccccatgccgcagagaccgcgcaggtgggagggacccgagactggcacagtggagacggcgaagtcctagggagagcgaagggaggtattcaggggcgcgggaggggtgatggggtatcttcaaacataggctgctctctgcctctcatttcctcagcgggcgcccaggcccttccgacccccacctgcaccccctccctccctaggctggtcccgctccgcacccggaacgtgtccgccacgatctcagctcctcggtgattggtccatttggagaggcctacgaaaaactcccggcctgagtccgggaggccgcggaggtttgagggcgggagtgagttagaaacaaggctccagacggccgagtctcccaaactctacttccctgtgccaagacctatgcctccccccagcctcaccggtgaagagaacgtcagtgccatccagcgtcgcgttctcgtctcctatttccacaattcggagccccaggtcttgcagggctttgcggactccatcgaccttaggataggagaagagggcacggagctgtgacacccccatcctcaattcttccccaaagccccgacatccagttccttctgcctttccccataccacacccgcgccacggcgctcacctctggcctacgagcggggctccagggccgcgtgattagggccgtgtccccttggatcacggccgtgtcgccaagcagcggtcccagcggcaatgactcctcaggtggcagttctagcagctgtagccccagtcgttgcctcagtttacctcccagcaccccgtgctccctttgagctttggccagatccagagcgggaaggccagcccccgcaccttcccccgacgccaggctctctgggactccccggatcagggcatgggagcagcggcccagcccctcccccggcgtccccatcccatccacacagactccccctccaaccgctcggatttcttagttttcttgtttcttcacctgtctgggagaagaaacagaaaaggaggagacagagaaaaagacatgcagacaagggcgttgggggtggttaagagcgcccaggtcttcctcctgccatctctaggcgtccctcccactccgccccacccactccagaccttccgctcctgtcgacctcactctacccagcaccctcaggggtcagattctttaagaggagcctgaggaacaaggctagggtctctaatctccaaaacacctgttgcccctgcttgggggcttgtgaggtccctgtcgggcgcccctcttggcagccactaggatgcgctcactccccaaaaatgcagcagccccgcccccttaaccctcagctgctcgctaccgcagggactggaagtccagcccgcgacccgcaggggttatgggacagaaggagaaagctggagaggcaggggctggggaatggaagtcctgaatacccgaacgagaagggagagaggtgggtaggaagggaggagttcgagcctaaggagttaagcatcctctctccgccctggctggtcacgctgcccctagcgcgacctagtataaaccagaccgagtcccgaaggactgggagaggtctaaaacgaaatgcgaggggcggggtaacagggggcgtggttccggggcgctggcactactcccggctccaggacccggttccccgtctatgtcccaaagtccaccccgcctagctccgcgcccaaataccggctccccatactctctgtctggtgcaggcatgggcccggcacccccaaactccggcccccacacggttcagggccccccacgcaagactcacctccagcggccacccccactcctgtcgcgctgtgatctcggctggggccccaccccccgaggacagagttggtggagaagggagtccccgtcttcaagcctcggggactgggagctctggcttttagcgcgggtccttgtgtaggcgagctcatatactacgatggggcaggggcgcgacggtctggcggctccggggcattgtctaagcgggacggggcggggcttcttcgggccacgcccattccgccctgctaagcctcgcccattacatccagactgcgccccccttgccagaaatcggcaccgcccagcgagcgctgcccaggcccacccagatctggccggccctggcgacggggctgcaaacgcttcgtagacctcagaacagcgcaacggcggaccggcggaccggcacgaaacatagcagccccaccacaaacatttcccttcttaattcctggcttctgccctgagctcaagatcactgacccacccctcattccatgtcgcccacactttaaatccccattgcgtaaaaacacttgatttttattctgtattttattactgaaatatgttgtcctactcatcccaccccacaataaaaatctgacccaggccccccatttctttccctcatcccctcttccaccacaccatcccggaacaagtgctccaggattccctgcccactggccattttggagtgtgtccattgggtagcaatgtggaaaccaccagggcctttgtggagaaaatggagggggttgagggagtcccaggaggggcttatttgagggcctttgccacttgctcataggcgagctcgatctcctcatcatctggacaggtggaagcgaattcttcccgggcgtaggcattgctcaagtaccgatgcactccccggaaggcctcggggatggtgaatccccggtacttcttacacaccacctgaggatggggagaggagagggaccaacatgttagacccagggaagccaccttggctttcccttctccccaggccgacatgataaaaccagctcaactcctcactgtcttgtactgtcgttagccttccttctcacttactgaaatcctggcttttaataaccagccatttttcctgagtttttaaaacttgagatataatttacttataaaattctcctcttgaatttccacagtgactttttccccctataccacttcaggcactgacacaggtgacttttgtctctatatttttcatcagacttttttttttttgagatggagtcttgctgtcacccaggctggagtgcaatggcgcgatcttggctcactgcaacctccgcctcccgggttcaagtgattctcctgcctcagcctcccaaatagctgtgattacaggtgcccaccaccatgtgcggctaatttttgtaattttagtagagatggggtttcacca

SEQ ID NO: 585018 - DNA, 4001 bp, Homo sapiens
taggtcttcagccactcagaataagacttagcctattggtgtttcttgtgagataaagaggataaccccataagctcactttccattaaatattggtgtataagcaacaagatctccatgggcttttagagagtaacacaaaactggcttggatttgcctttagaacacctagccagtaagtaggtctgcatttggaggagttttctactcattcttcacccttcccttttttttccccctgaaagggggtcttgctctgttgcccagcctggagtacagcgacgagatctcggctcactgcaacctccgcctcccaggttcaagcaattctcctgccttagcctcctgagtaactgggattacaggtgcccaccaccacgccaggttaatttttgtatttttagtagagatagggtttcagcatgttggctaggctggtctcgaactcctgaccttgtgatccgccggccccagcctcccaaagtgctgggattacaggcgtgagccaccatgcccggcttcatccccctttcctaaaccattttccctatgggcacaacctagggaaggttgacagaaaaccacagagctgtagtctttgctcccagaactacctgaggagcagtggtgaggggcatgacccatgagcaactcaaaactcaactctgtctacaaagttgtttctaataataaggacattacagaaagtttcagcagctgaactcagtctcctctgccatctgccactgtcaccggccccctgtctgtcctggacaggttctgtaacctgaggagcagtccgtggtctcctagcctccactccctcatctgtaacacagaacagatggattacttgctcctttgggtggtaaataagagagacccagtgaggcggtctcataaagggggctccttgggagagtctgaatggaaatgcaggggacagacatcccggagcccgggccaggtgtcctgaggctggcaccctctgtcccacccctcacccacggagccttgctccactgtcagcatccccgcctgcctttgcttccctgtttttggctttccccatctgttcctgctctgactctttctgtatggctcaggtttaaactccagagagagaaaatgcagttgtaccagttggtcattgcatcccctgttggacaaaattctagcaccaggccaacttgctgggctaaaccagcctctgaatgtgcccttggcatagttgcccttctctgtccaaagcacagtaatcagggtactgggccacatggtacaaaccatggccacccacacacagaggttcacctttcctctggaaggctgggcagcttcctcagcaagggctgttggcaggaaaaacgtgggcttggttgttagtggcctctgctttctcttccagttctgaagattctcgcactatgagactttaaagccctccaatgaagtttagtgtgatattcctattcctcgagcagtctatgcatttctgtgctaatttgatacgttaatttgattgctgtacagtgggctggtcagctgagagagagtgggcctgccagggctgagggaagagaagggaacgggcccaggccagagcagtctggtgggggccagcttgagtagagctgtcctgcagccaccagtgaccttattgacttcgctgtttcacatcagcctcccatgtccagcaactctctcaaaacagctctaataaactaagttgaaagggcaagcaatctgtggctaagaataaccagctgccagggaggaggagtgagcgagcaatgtggtgtgtcctggcacagtggcctgtccatcactgtcccctgaccctattcagacacactcccaaactcccagagcatggacggaacgacccctcagctgaaagcaagaattcaagtacctgtctctgaaaaagcagtcttggaagccaccaaaatctctggcaccaaaccttgtttcccagtgcctggctggtctcatgccctgagagacagagagaaagcgaaactgattcccattggtgacttgattcaggacattccccctggtcttcctttccattggcctgcatggctgtctctgtcacccattgccccggagaaaggagcaagtgacctcaacctgtcatctccatggcgctgtctctgccaagcccttccctttctggcccacgagccctctgtctggccgccagcctgggctttctccagctgatttgtaggtatggtgaataatgggtgagcctgtccaacttccaacctcgtttggctgcccacagttagccgggtgcctggctctgctgggtcagctggtgggggaagcaggaaggagggggtgagggctgagtaatgttgttgattgattggagctggaaacactattcaggagataatctaggatagaaccacatgattctttagcccagcagtccccagccttttaggcaccaggggctggtttcatggaagacaatttttccacagactggggatggggagatggtttcaggatgattcaagtgtgttacatttactgtgcactttatttttattattattcgttgtaatatataatgaaataattatacaactcaacataatgtagaattagtgggagccctgagcttgttttcctgcaattagatggttttctctgaaagtaatgggaggcagtgacagatcatcaggcattagattctcataaagagcacacaaactggatcccttgtgtgcgcagtttacagtaggtttgtgctcctataagaatctagtgcctcagctgatctgacaagaggcagagctcaggcagtaatgcaaatgatagggagtgggtataaatgaagacaaagctttgcttgctcacccacggctcacctcctgctgtgaggccagttcctaacaggccacggactggtagtggtctgtggcctggggatttgggatccctgatttagcccacatattcaaagaagggattcaatatttgatgagtgtctactgagctctaggcatgaggcacagttaacaagtttgtttccagggaggcagtgtgatgtgtcaaattagtgacaataatattttcaataatgtatatgtagcattaaccatgtgctagacacatgtatgacatcatatatcacaaccaccctatgaagtaggtactattatcactatccccattttgtatatgagtacattgaggctccaagacagtaaggaagggtccagggtctcttaaatggtaaaatccagtctggatatctgacgtcaaggctcaagctcttttttttttttttttttttttttgagatggagtctcgctctgtcacccaggcgggagtgcagtggctctatctcagctaactgcaagctctgcttcctggtttcatgccattctcctgcctcagcttctctagtagctgggactacaggcgcccgccaccacacctggctaattttttgtatttttagcagagacggggtttcaacatgttagccaggatggtctcgatctcctgaccttgtgatctgcccgcctcggcttcccaaagtgctgggattacaggcttgagccactgtgcccagccaaagctcaagcccttaaccaaaacacaaactttggtttcaagagacctgcatttttaccttgagcaaatcacctgacttctgagttggattgcccatctgaaaactgagaatgaactaagaatcccttgcaagttgttgtaggtctctgataagttgagatatgtacaattctttgtaaggtggtctgagggccggtgagggggtggtggggaaaagcaactttttctctggctatgctcaatactgtcacagtcactgaatacagaacactttctgtgaccaggtgtgtgggggttgtctccctacacaccaagcatcccattctgcagattccctagcagacacttcagctgcatgtcctctaattcaattcaattctgacaccagctacctggaga

SEQ ID NO: 585019 - DNA, 4001 bp, Homo sapiens
cccattgtgcccagattctccccaatcctcacagccctgcacccctgcctcagcttccccttcatttcagcccattccctctgttcattcagcagaagttggctgagtgcccgctctgtgccaggcgcgttctcagtggtgaacgtcactccccacccttgtaggactgagatcccagcagggaaaacagctgcgaagaacaagaggcaggaagtatggacagagcagtgaggtgggtggccagaaaaggctctctaaggaggtgacacctggcagagaactgaatggagtgagggagagcctgtggttatttaggggaggagctttgcaggcacagagaaaatgtccagaagctgtgggaacgagccctggcttgttccagcaacaagaagaaaggcagcgtggccaaggaggcgccaagaaacaagtgatgcaggcaggagccaggtcaggctgagcatcctgcaccagctagggactcagcttttgttctggcagagtggaaagccagcatgggggtgtcagctaggtgtgacgtatctgatttacatgctctaaggtccactggatgccgcccccccaggtggagatttgactccaggcagaaaagggcagaagcagggagacgcgtttggcatctactgcactcatctaagctggagatggcgggcaggtggcctagggcagtagaggtggagtggtgaggagtgactggactcaggaacactatggaggtagaacagacggggctgctgatgctttggaaggaggtgagagaaaaaaaggaatcaaggatatcatcttaacttatagcctaggcaaccaggcaatggtgataccacttcctgagctggagaatgccaggggaggagcaggtttaggctgggaatgggaatcaaattcagcttgggaagttaaacgtacgtttgagatgcctattagacatctaggtggctggctacagtgcttgtaatcccagcactttgggaggctaaggtgggaggatcactgagcccaggagttcaagaccagcctgggcaacacagcaagaccccatctattagaaaaaaaaaaaaagacatctaagtggagaaatccaaaaggtggccaggtttacaatattgtttggagctcagctgagaggcttagtctggagatgatataaactggagagtcgtcagcgtataggtggtgtttaaagtacagctggaagtgaggagagccaacctcctctgggtgctgcccctgccagtctcacctcctgaccccagcggtccttccagcccatccagcggcgaccatcccgggagtaacgcagccggtagctccgggagaactccttgcccaggcccccggcatgccgtccctgggtgcccaccagagccaccaggtgcagtcgttgtagatccacctgcaagtactcctcctccttgggaaacaccgaccctgcggggcaccaggccccatccccgtcactgctctccaacctgagggtgaagaggggcacagagaacatctggccccaggtctgcctccatctccagtatttaaaccccacttcatttgccccctcagcctgcaggggtttcactggcatgggcagaggggttggaggggaagtagaggtcccaggagctcctctcggggcagctacaagtgtgccaggtgtgccaagtacctgctgtggcgggcggcagtggaatctgaccaggagctggaagcagagatgtcactgtctgggatggtccggtcctgcatgcccagggcatagcggcacttggctgagtaaaaagcaggcatgtaacaggtcaaggcccccaactctctacctcccaagccctggccctcagggacccatgattcagtctcctcaccaggatcaaaatgtcccttcatgtcagcatctccacttgccaccaagagcagcagcagtaaagatgacagggcctctggtcccatagctcctgatccctcgggcctaagggggtgggggcagcatctctgcaggggataaaatgggtggtgcgtaagttaatcaggggactgagtcatagctgacagcaacagacagaatgggccgctttggggataataacagtaaaacaacaacaacagtcattgtttaacagcatcagctatatttttagaatgcttcccctgtgccagacactggcctaaacccttaaacagaatccataattttatcttcacagtcacttcataaggtagatactattactatccatatttaacacatgaagaaactagggcagagatcagttaaataacttcctaaagccccatttctccaatcaggaatgggcaaaatatccccataaacaacggcttagaacaaacaacaagtgtgcaaaaaatgtttataacacatacaacaggaaaaggtttaataactacaataaactaaggccccttaggaactgacaagaaaaaatatataagtaacccaataaagaaacagccaaagaatgtgaatagtcatttcacagaaaagcaaagccaaattgccaacaaacattttttttaatggtcaaattcaccagcctcagggaaataccaagcagactgacaagatatttttttaaggctgtaacatataaaagtggtagaaagtgatgaaaagggaggcaccatgctcaatggcagaaatgagtgttatcttctatttggaaagcaatctagcaatgtctattataattaaaaatgcacatcctcttcgacccagcattccctcgagagagaagcaccaggaagtaagaacatatgtgcaggtctgggtctggtggctcatgcctgtaaccccagcactttgggaggccgagatgggaggatcacttgaggccaggagttagagaccagcctggtgaacatagtgagaccccatctctttaaaaaaagtgaaaaataaaaataaaaaagaagatttcaaagatgtttattatggtaccttttgtaagacataaatctgtaagatatgtgaatgcccacaggggacaggctggaattaaaaaaaataaggtttattgactactatgcagctatgaaaagtaacaaagaggcaatatattcctaactttgtgtgatttccatgtatatctgttgaatatgaaaagcaagcaacagaagtataaaaaatatcccaccttttgaaaatagaataaacaagcacccatgtttgtatatatacctgtgtgtacgtctagaaggagagaatatataatagaatataacaatagaatacaatataacaagagttaacatgaacggggcaaaagaaaagcaaatttaaaaagacaggttgattgtactatttttctaaatcttgtaacataaatgcatttatgtaaaatcataagatatgtaaaagaatatgaaaatcattttgacttttaaaaaataaatatgtcccaggaaaggttgggcaattccttgttgaggatatgatagaattaaacatcagataagcctggaccagctcaccctgctgccctcccacataggagtccagaattctaagagaagggcagaggggaccccagcaccttctagtcttactgtcccctatagccctctaggcccagggtggtccctggaccatcagcaatacctggaagcatggaagaaatcagaatctcaggctcacccttgacctgctcaatcaaaatctgccttttaacacaattcccaggtgacctgtgcccattaaagtttgaaaatccctactctgttcctcaggcccaggaagcttaccccacataaaactattctaaatggcatctccttacaaacccaagtaactactctcccctcccctgctgcaggaaaagctatcctaacctgtactggtctcagagccctgtactgaagtctccaggccctggagtcctgagggactcgactgccacctcttatcaggttcagggcatcttgggcccagttatccctgctctgccttcctgagacccagacatccagtcccccca

SEQ ID NO: 585020 - DNA, 4001 bp, Homo sapiens
gacctgtgcccattaaagtttgaaaatccctactctgttcctcaggcccaggaagcttaccccacataaaactattctaaatggcatctccttacaaacccaagtaactactctcccctcccctgctgcaggaaaagctatcctaacctgtactggtctcagagccctgtactgaagtctccaggccctggagtcctgagggactcgactgccacctcttatcaggttcagggcatcttgggcccagttatccctgctctgccttcctgagacccagacatccagtccccccagttcccacttccagaaggtggctgcctctgagggactgaggaaaggctgagttgccttggagacgagggcgggtctaaagacaaggaaggcaggtcaccccaggaggtaggaggagtgggggatactcccccatccctttgtcctcctccagctgctcccacaatgcactagggcaggaatgtaagaggcagctgagaccccagagctctgaagcagcagctgagggggacgactgagttgtggggggcactcagaggctagaaccagaaggcatcacgcctggtcccttagggtccagcgccggggagcaggctgccagagtcccaggagactggcttggaattcctgggtgccgctctccaaccccacctctctcgggaacagcggggctcttgttcccctaagtaaccttcatgcctatcccagatgagtcatcagagccacacagagccgagaggagcccggggcagagatacaaaggcaggcagaggatacgaggcaggcggagacagagcgagagccacaatgcaagaggtaaatagagcaggctcagaaacacggggcacagagccaagcagaggaacacggagaagcacagagacgtctgggctgtctgttctccaacacccccagtcacctcatctctctccactgggtcttcagtccacagtcagagacccagagggcaagagaggacaagcccagaagaccttccccaatcccacccccttccactccattacaaccaaagacaaaccaggggccaggccaccctgcctcaagcccttcacgctcctctcccaacccccaagtcccactcagacaacacccacacagctctgtacacacacacacggtgaaacacacaaacttactgaactggctgtaaacagcgaggctaaatgtggcatgcacacacccacctctcagtgtccctgacaaccctcacagagtttctgagacagagcaaacacagaagctcatgcatacatcaacccgtccacaccttggcattccttcaagtccaaccccatcgctcagtgaatagccaccttcagacacctgtgaacatgaaatgacagacaccacatgctcctgtgaccaaaagacagcatgagacacacacacccgggcccttgggcacaggatccccagagaactggggcccagcctctaacacacatgggtgaccaagccagagggacgtcgagggggcagggaacaggtgggcgctgggtgggaagagtggcaataaggacaacagcctttccctgcctttccactcactcccctttcacctgtctccaccacaccactcagtcctggacacacctacaggccctcagcaacagccagcgagcttgggcgcctgcctctggctgctggaagcgctgggaagaaatgttcagccaagagccaggcatgggggggtgggaccctgaagctggcgctcaccggcagtgacattctctcatgccagagctaattgaccatccagccgggaagagtggtgtcactggtgggttagagtggcagtccctctttttgctggactgtgaccagactgaccaactgggtgttggctgagcggaggcttagcagttagatgcccgcagggactggccaggtggagggcaggcgatagatgagctgactcagtggggctgcacaggagcacctcctcccggggctcagttcctccgcactgagtgagaggggacttgcctcaaggctggaggctcaaaactctttctgggaggtcacgggcttcacctccacccagtccccgcccccggttttcagacggtatgccagagcatcggggaggcgggcagggaggcttagaagagctggacgaccaagcatggctcgggacgtcctgcctcccccgcccctcgccctgcaggcgccgccgcgcgcccccaccccaagagccccaggcctccgcccgcgggttccgccgccgctctccctacctctcatcgctcttcccggcagacccaggcgtccgacccgggagcggggcctcttcggcggcggggcgaggggcgggggaggcggagggagccaggagccgggagccgggagcgggaggcgccggcggggctcgggtgtcgggaggcggctcccgagagcagctgtcgggggcctgttccggggagaggagccagggctggggcggctcgggcccaggcgccgcctccccctcgcctcggctccctcccttcctcctcccgctcctcgctcccctccctcccctcggccttctcgccgcgcgttcgggctcgcagccctcccttccccctcccggacccagtagtcccagtggctcccacgcccggcgccgagctccaggccccgcgcccgccacgcccaccccgcgcgctagcgcccggcccggcctcccccaggtaacccgcccgccaagcccgcctgggcgctcccaggccgcccagccgcccgcgccgctgcctccggccggctccgcgcccagccccctccacccactcgcagcccacccccgcttccccaaacgagaacctccaaagctggcgccccagggggctggctgcagtcccgctcagggcccacgaggggaagacgcccctcctacttctgggatcggttcctggtgggagaggcaaaggggagcagccccagggcacagaggaagaagcaggttcccacaggctcggcccagcccagctgcgggagttagcccagagaagggagcagagctcaggtctcagggctcacctgtccagccaggccccagactgctcttctccctccaccaacctttgctcctctctcgcagcctgtgcgctcccgcccctacgacccaacctggaaggccccagaccctgaaggcgggcccactctcttctccttctcctctcagttcctctctctgaagggcgttctaagggacccgggggtccagacgcccaggccctgattcccctgggctcccaacggagtggagtgggagggggactcaggagtcctcagggcaagcctccctcaggcccagccagctctggccgtagtgggccagagggtctgatcactggccagaagaggccaaaaatgaggccaggacaaagttgagtggtcgggaggaggaagaagaggagcaggagaaggatggaggcacactgaaaatcacacacagtcaaaaggaaggggaccaagagacccagggaagatgaaacagtgagactgagtaggcaaagcaactgagagagctactgggcagaggatggagcgggacagaacagcttgtggtgggaggtgctttttccccactcagcactacctcagcccctcacctctctccacacccccacacctgctcaccacctagacaatgtcacggtcacaggaagttctcgctccactgcacatctccgccccaggaacctcacagtagataaaaacataccctgcttgcagtcccagacaacaatcccaagaaagaaacacgaagtcccaaccagacaagtacacaaaagcactaccaggaagaagctggcccttgggaaaggccgaggcacacatgggcactagttcagaagcccaaggacgttccaacggctgagggacctgctaacagacagccccagggtcactcgaagagcagcttcttcccgccttcctgtcccaccaagcccccagggattcattcccccagaacacctacccct

SEQ ID NO: 585021 - DNA, 4001 bp, Homo sapiens
gccgggagccgggagcgggaggcgccggcggggctcgggtgtcgggaggcggctcccgagagcagctgtcgggggcctgttccggggagaggagccagggctggggcggctcgggcccaggcgccgcctccccctcgcctcggctccctcccttcctcctcccgctcctcgctcccctccctcccctcggccttctcgccgcgcgttcgggctcgcagccctcccttccccctcccggacccagtagtcccagtggctcccacgcccggcgccgagctccaggccccgcgcccgccacgcccaccccgcgcgctagcgcccggcccggcctcccccaggtaacccgcccgccaagcccgcctgggcgctcccaggccgcccagccgcccgcgccgctgcctccggccggctccgcgcccagccccctccacccactcgcagcccacccccgcttccccaaacgagaacctccaaagctggcgccccagggggctggctgcagtcccgctcagggcccacgaggggaagacgcccctcctacttctgggatcggttcctggtgggagaggcaaaggggagcagccccagggcacagaggaagaagcaggttcccacaggctcggcccagcccagctgcgggagttagcccagagaagggagcagagctcaggtctcagggctcacctgtccagccaggccccagactgctcttctccctccaccaacctttgctcctctctcgcagcctgtgcgctcccgcccctacgacccaacctggaaggccccagaccctgaaggcgggcccactctcttctccttctcctctcagttcctctctctgaagggcgttctaagggacccgggggtccagacgcccaggccctgattcccctgggctcccaacggagtggagtgggagggggactcaggagtcctcagggcaagcctccctcaggcccagccagctctggccgtagtgggccagagggtctgatcactggccagaagaggccaaaaatgaggccaggacaaagttgagtggtcgggaggaggaagaagaggagcaggagaaggatggaggcacactgaaaatcacacacagtcaaaaggaaggggaccaagagacccagggaagatgaaacagtgagactgagtaggcaaagcaactgagagagctactgggcagaggatggagcgggacagaacagcttgtggtgggaggtgctttttccccactcagcactacctcagcccctcacctctctccacacccccacacctgctcaccacctagacaatgtcacggtcacaggaagttctcgctccactgcacatctccgccccaggaacctcacagtagataaaaacataccctgcttgcagtcccagacaacaatcccaagaaagaaacacgaagtcccaaccagacaagtacacaaaagcactaccaggaagaagctggcccttgggaaaggccgaggcacacatgggcactagttcagaagcccaaggacgttccaacggctgagggacctgctaacagacagccccagggtcactcgaagagcagcttcttcccgccttcctgtcccaccaagcccccagggattcattcccccagaacacctacccctccagagaacagcagctggggaatctaggcccaggagacgctggactgggggtggggccagcctgggggtggggccaaggcttcccaagtcacctcacctggcagcccacagcccctccttccaggagctgtgctctgggaaagccccaacaggcctgccaggcaagctacagcccgtcataccctggtgggacattccacaccccaggcccacgctgaccccagctaagtggcatggcagtgccagacagaggggtccactggggagagcagaaggagctagagagtcctgaaacctttgtcccctcttctcactgcctcaggagaaattcctagtggtgatgcccacctcgccccagctctaggctggaggagtgggagggatgcaaggctggggcccagtggagtcaagtgacaacggaaagggagctggagccagctggaatgcgggactcggagccgagattcccaggggcctgagagggaaatcccagccatcctggggcccagagagcagcaccaaagaccaagagggcctgattacccatccgtggtccccagagcccattccacatctcctgcatcactccgaaccccagaggccccctgtgtccctgagaacccccaaatgaccctctaccatcccctcccatcctgggcttccctccccttcaagccagtggcagcctgctgcccaggaaggagaggatgggaaacagctgaaaaaatgtgaggagaggcacgtaggagaggggagaaggcagcttcaggcctgcagaccacctggccacaggagggaagcccagcacgaccagcgagcgagaggacggaccagatgggcccccacacatacactagctgcagtccccttccgggagctgcagctgcctctggaggagcaggctgggtcagcagctggggagagtaagaagcgacgggtggggggcagggtgaaggagtgtacaaggctttgggtgtgagtcagacctgatgccactgaataaactggaaactgaggccagggagcgaaggaggagattgagatgacgtagctctgggagagagatgaaacagctcagctgtggttggggaagaaaagggcaagggaccagaagagggagaggaggctgatggtcagatggggacaatggtgagagaattcccagagagacggagatggactgaggtcaaggccaaggagacaggtctgagagaggaaaaggaggatgaagacagggcacacacagcaaaaggtgggaagccccaggggctcagaggaggagactgaagtttgggaagaaaagggctgaactggatgaaggaactgaagtggactcgggaaggaaacagtgttggaaacaaactcctaagagaggaaggcagggaactgaggaggcttgagagctgggcagacagatcaaggggacaagaagcaaggacaagggaagaaggggctggagtgaaacagagagtggagggaaagaggagggagactggggcgcagagtgtgaagctaagggacacggggagatgagaagtataaaaggctgagaaaggaagaggcacctgcgggacagatggggacatgaggaccaaagagagaatctaacctgtttctggacaacggtccccctttggggacaccctagtccctcagcccattcaccacaccatggcacccaactctattccctctctttcccctcctccctgccaggctctgggccgctcccctcctcccaacacacctccagcctccagccggggaccgcctggtccctgcccacaaggggagggcccagctccagtgcccactcctgccctcccagttcatctctggcttcccccctctcacctccagctcaggattctcttaggtcccagtcaccccagtctcaggcctttggggtcgggtctggggctgccaacgctgcctggctttgtccgagcgtccggggccccgggcccaggaggagcagctgcccgggccagctgcggctggcttcaatgtgaccatggcaaccaagtcccgctcccctcaccgagcctctaggcccccgcagagagggactgagcagcctggctgtggagaaagggaggggaggctgagaactgtgaaacagaaccaaagggagaccccagacaaagaaaccccagacaaaaggagatgaagggaggcagaggaaacagaaagcggcattgggggtggtggccgggagctcaggccctccagagggggagaatctaggagaggcggagaaagaggcagaagcaggggctgatttgcaggggagaagagagattagaattgactggcagaggtcctttagagactccttctgggcccctgagaattcacttccttctc

SEQ ID NO: 585022 - DNA, 4001 bp, Homo sapiens
cagctgctcccacaatgcactagggcaggaatgtaagaggcagctgagaccccagagctctgaagcagcagctgagggggacgactgagttgtggggggcactcagaggctagaaccagaaggcatcacgcctggtcccttagggtccagcgccggggagcaggctgccagagtcccaggagactggcttggaattcctgggtgccgctctccaaccccacctctctcgggaacagcggggctcttgttcccctaagtaaccttcatgcctatcccagatgagtcatcagagccacacagagccgagaggagcccggggcagagatacaaaggcaggcagaggatacgaggcaggcggagacagagcgagagccacaatgcaagaggtaaatagagcaggctcagaaacacggggcacagagccaagcagaggaacacggagaagcacagagacgtctgggctgtctgttctccaacacccccagtcacctcatctctctccactgggtcttcagtccacagtcagagacccagagggcaagagaggacaagcccagaagaccttccccaatcccacccccttccactccattacaaccaaagacaaaccaggggccaggccaccctgcctcaagcccttcacgctcctctcccaacccccaagtcccactcagacaacacccacacagctctgtacacacacacacggtgaaacacacaaacttactgaactggctgtaaacagcgaggctaaatgtggcatgcacacacccacctctcagtgtccctgacaaccctcacagagtttctgagacagagcaaacacagaagctcatgcatacatcaacccgtccacaccttggcattccttcaagtccaaccccatcgctcagtgaatagccaccttcagacacctgtgaacatgaaatgacagacaccacatgctcctgtgaccaaaagacagcatgagacacacacacccgggcccttgggcacaggatccccagagaactggggcccagcctctaacacacatgggtgaccaagccagagggacgtcgagggggcagggaacaggtgggcgctgggtgggaagagtggcaataaggacaacagcctttccctgcctttccactcactcccctttcacctgtctccaccacaccactcagtcctggacacacctacaggccctcagcaacagccagcgagcttgggcgcctgcctctggctgctggaagcgctgggaagaaatgttcagccaagagccaggcatgggggggtgggaccctgaagctggcgctcaccggcagtgacattctctcatgccagagctaattgaccatccagccgggaagagtggtgtcactggtgggttagagtggcagtccctctttttgctggactgtgaccagactgaccaactgggtgttggctgagcggaggcttagcagttagatgcccgcagggactggccaggtggagggcaggcgatagatgagctgactcagtggggctgcacaggagcacctcctcccggggctcagttcctccgcactgagtgagaggggacttgcctcaaggctggaggctcaaaactctttctgggaggtcacgggcttcacctccacccagtccccgcccccggttttcagacggtatgccagagcatcggggaggcgggcagggaggcttagaagagctggacgaccaagcatggctcgggacgtcctgcctcccccgcccctcgccctgcaggcgccgccgcgcgcccccaccccaagagccccaggcctccgcccgcgggttccgccgccgctctccctacctctcatcgctcttcccggcagacccaggcgtccgacccgggagcggggcctcttcggcggcggggcgaggggcgggggaggcggagggagccaggagccgggagccgggagcgggaggcgccggcggggctcgggtgtcgggaggcggctcccgagagcagctgtcgggggcctgttccggggagaggagccagggctggggcggctcgggcccaggcgccgcctccccctcgcctcggctccctcccttcctcctcccgctcctcgctcccctccctcccctcggccttctcgccgcgcgttcgggctcgcagccctcccttccccctcccggacccagtagtcccagtggctcccacgcccggcgccgagctccaggccccgcgcccgccacgcccaccccgcgcgctagcgcccggcccggcctcccccaggtaacccgcccgccaagcccgcctgggcgctcccaggccgcccagccgcccgcgccgctgcctccggccggctccgcgcccagccccctccacccactcgcagcccacccccgcttccccaaacgagaacctccaaagctggcgccccagggggctggctgcagtcccgctcagggcccacgaggggaagacgcccctcctacttctgggatcggttcctggtgggagaggcaaaggggagcagccccagggcacagaggaagaagcaggttcccacaggctcggcccagcccagctgcgggagttagcccagagaagggagcagagctcaggtctcagggctcacctgtccagccaggccccagactgctcttctccctccaccaacctttgctcctctctcgcagcctgtgcgctcccgcccctacgacccaacctggaaggccccagaccctgaaggcgggcccactctcttctccttctcctctcagttcctctctctgaagggcgttctaagggacccgggggtccagacgcccaggccctgattcccctgggctcccaacggagtggagtgggagggggactcaggagtcctcagggcaagcctccctcaggcccagccagctctggccgtagtgggccagagggtctgatcactggccagaagaggccaaaaatgaggccaggacaaagttgagtggtcgggaggaggaagaagaggagcaggagaaggatggaggcacactgaaaatcacacacagtcaaaaggaaggggaccaagagacccagggaagatgaaacagtgagactgagtaggcaaagcaactgagagagctactgggcagaggatggagcgggacagaacagcttgtggtgggaggtgctttttccccactcagcactacctcagcccctcacctctctccacacccccacacctgctcaccacctagacaatgtcacggtcacaggaagttctcgctccactgcacatctccgccccaggaacctcacagtagataaaaacataccctgcttgcagtcccagacaacaatcccaagaaagaaacacgaagtcccaaccagacaagtacacaaaagcactaccaggaagaagctggcccttgggaaaggccgaggcacacatgggcactagttcagaagcccaaggacgttccaacggctgagggacctgctaacagacagccccagggtcactcgaagagcagcttcttcccgccttcctgtcccaccaagcccccagggattcattcccccagaacacctacccctccagagaacagcagctggggaatctaggcccaggagacgctggactgggggtggggccagcctgggggtggggccaaggcttcccaagtcacctcacctggcagcccacagcccctccttccaggagctgtgctctgggaaagccccaacaggcctgccaggcaagctacagcccgtcataccctggtgggacattccacaccccaggcccacgctgaccccagctaagtggcatggcagtgccagacagaggggtccactggggagagcagaaggagctagagagtcctgaaacctttgtcccctcttctcactgcctcaggagaaattcctagtggtgatgcccacctcgccccagctctaggctggaggagtgggagggatgcaaggctggggcccagtggagtcaagtgacaacggaaagggagctggagccagctgg

SEQ ID NO: 585023 - DNA, 4001 bp, Homo sapiens
gtctgggctgtctgttctccaacacccccagtcacctcatctctctccactgggtcttcagtccacagtcagagacccagagggcaagagaggacaagcccagaagaccttccccaatcccacccccttccactccattacaaccaaagacaaaccaggggccaggccaccctgcctcaagcccttcacgctcctctcccaacccccaagtcccactcagacaacacccacacagctctgtacacacacacacggtgaaacacacaaacttactgaactggctgtaaacagcgaggctaaatgtggcatgcacacacccacctctcagtgtccctgacaaccctcacagagtttctgagacagagcaaacacagaagctcatgcatacatcaacccgtccacaccttggcattccttcaagtccaaccccatcgctcagtgaatagccaccttcagacacctgtgaacatgaaatgacagacaccacatgctcctgtgaccaaaagacagcatgagacacacacacccgggcccttgggcacaggatccccagagaactggggcccagcctctaacacacatgggtgaccaagccagagggacgtcgagggggcagggaacaggtgggcgctgggtgggaagagtggcaataaggacaacagcctttccctgcctttccactcactcccctttcacctgtctccaccacaccactcagtcctggacacacctacaggccctcagcaacagccagcgagcttgggcgcctgcctctggctgctggaagcgctgggaagaaatgttcagccaagagccaggcatgggggggtgggaccctgaagctggcgctcaccggcagtgacattctctcatgccagagctaattgaccatccagccgggaagagtggtgtcactggtgggttagagtggcagtccctctttttgctggactgtgaccagactgaccaactgggtgttggctgagcggaggcttagcagttagatgcccgcagggactggccaggtggagggcaggcgatagatgagctgactcagtggggctgcacaggagcacctcctcccggggctcagttcctccgcactgagtgagaggggacttgcctcaaggctggaggctcaaaactctttctgggaggtcacgggcttcacctccacccagtccccgcccccggttttcagacggtatgccagagcatcggggaggcgggcagggaggcttagaagagctggacgaccaagcatggctcgggacgtcctgcctcccccgcccctcgccctgcaggcgccgccgcgcgcccccaccccaagagccccaggcctccgcccgcgggttccgccgccgctctccctacctctcatcgctcttcccggcagacccaggcgtccgacccgggagcggggcctcttcggcggcggggcgaggggcgggggaggcggagggagccaggagccgggagccgggagcgggaggcgccggcggggctcgggtgtcgggaggcggctcccgagagcagctgtcgggggcctgttccggggagaggagccagggctggggcggctcgggcccaggcgccgcctccccctcgcctcggctccctcccttcctcctcccgctcctcgctcccctccctcccctcggccttctcgccgcgcgttcgggctcgcagccctcccttccccctcccggacccagtagtcccagtggctcccacgcccggcgccgagctccaggccccgcgcccgccacgcccaccccgcgcgctagcgcccggcccggcctcccccaggtaacccgcccgccaagcccgcctgggcgctcccaggccgcccagccgcccgcgccgctgcctccggccggctccgcgcccagccccctccacccactcgcagcccacccccgcttccccaaacgagaacctccaaagctggcgccccagggggctggctgcagtcccgctcagggcccacgaggggaagacgcccctcctacttctgggatcggttcctggtgggagaggcaaaggggagcagccccagggcacagaggaagaagcaggttcccacaggctcggcccagcccagctgcgggagttagcccagagaagggagcagagctcaggtctcagggctcacctgtccagccaggccccagactgctcttctccctccaccaacctttgctcctctctcgcagcctgtgcgctcccgcccctacgacccaacctggaaggccccagaccctgaaggcgggcccactctcttctccttctcctctcagttcctctctctgaagggcgttctaagggacccgggggtccagacgcccaggccctgattcccctgggctcccaacggagtggagtgggagggggactcaggagtcctcagggcaagcctccctcaggcccagccagctctggccgtagtgggccagagggtctgatcactggccagaagaggccaaaaatgaggccaggacaaagttgagtggtcgggaggaggaagaagaggagcaggagaaggatggaggcacactgaaaatcacacacagtcaaaaggaaggggaccaagagacccagggaagatgaaacagtgagactgagtaggcaaagcaactgagagagctactgggcagaggatggagcgggacagaacagcttgtggtgggaggtgctttttccccactcagcactacctcagcccctcacctctctccacacccccacacctgctcaccacctagacaatgtcacggtcacaggaagttctcgctccactgcacatctccgccccaggaacctcacagtagataaaaacataccctgcttgcagtcccagacaacaatcccaagaaagaaacacgaagtcccaaccagacaagtacacaaaagcactaccaggaagaagctggcccttgggaaaggccgaggcacacatgggcactagttcagaagcccaaggacgttccaacggctgagggacctgctaacagacagccccagggtcactcgaagagcagcttcttcccgccttcctgtcccaccaagcccccagggattcattcccccagaacacctacccctccagagaacagcagctggggaatctaggcccaggagacgctggactgggggtggggccagcctgggggtggggccaaggcttcccaagtcacctcacctggcagcccacagcccctccttccaggagctgtgctctgggaaagccccaacaggcctgccaggcaagctacagcccgtcataccctggtgggacattccacaccccaggcccacgctgaccccagctaagtggcatggcagtgccagacagaggggtccactggggagagcagaaggagctagagagtcctgaaacctttgtcccctcttctcactgcctcaggagaaattcctagtggtgatgcccacctcgccccagctctaggctggaggagtgggagggatgcaaggctggggcccagtggagtcaagtgacaacggaaagggagctggagccagctggaatgcgggactcggagccgagattcccaggggcctgagagggaaatcccagccatcctggggcccagagagcagcaccaaagaccaagagggcctgattacccatccgtggtccccagagcccattccacatctcctgcatcactccgaaccccagaggccccctgtgtccctgagaacccccaaatgaccctctaccatcccctcccatcctgggcttccctccccttcaagccagtggcagcctgctgcccaggaaggagaggatgggaaacagctgaaaaaatgtgaggagaggcacgtaggagaggggagaaggcagcttcaggcctgcagaccacctggccacaggagggaagcccagcacgaccagcgagcgagaggacggaccagatgggcccccacacatacactagctgcagtccccttccgggagctgcagctgcctctggagg

SEQ ID NO: 585024 - DNA, 4001 bp, Homo sapiens
tttgtcctcctccagctgctcccacaatgcactagggcaggaatgtaagaggcagctgagaccccagagctctgaagcagcagctgagggggacgactgagttgtggggggcactcagaggctagaaccagaaggcatcacgcctggtcccttagggtccagcgccggggagcaggctgccagagtcccaggagactggcttggaattcctgggtgccgctctccaaccccacctctctcgggaacagcggggctcttgttcccctaagtaaccttcatgcctatcccagatgagtcatcagagccacacagagccgagaggagcccggggcagagatacaaaggcaggcagaggatacgaggcaggcggagacagagcgagagccacaatgcaagaggtaaatagagcaggctcagaaacacggggcacagagccaagcagaggaacacggagaagcacagagacgtctgggctgtctgttctccaacacccccagtcacctcatctctctccactgggtcttcagtccacagtcagagacccagagggcaagagaggacaagcccagaagaccttccccaatcccacccccttccactccattacaaccaaagacaaaccaggggccaggccaccctgcctcaagcccttcacgctcctctcccaacccccaagtcccactcagacaacacccacacagctctgtacacacacacacggtgaaacacacaaacttactgaactggctgtaaacagcgaggctaaatgtggcatgcacacacccacctctcagtgtccctgacaaccctcacagagtttctgagacagagcaaacacagaagctcatgcatacatcaacccgtccacaccttggcattccttcaagtccaaccccatcgctcagtgaatagccaccttcagacacctgtgaacatgaaatgacagacaccacatgctcctgtgaccaaaagacagcatgagacacacacacccgggcccttgggcacaggatccccagagaactggggcccagcctctaacacacatgggtgaccaagccagagggacgtcgagggggcagggaacaggtgggcgctgggtgggaagagtggcaataaggacaacagcctttccctgcctttccactcactcccctttcacctgtctccaccacaccactcagtcctggacacacctacaggccctcagcaacagccagcgagcttgggcgcctgcctctggctgctggaagcgctgggaagaaatgttcagccaagagccaggcatgggggggtgggaccctgaagctggcgctcaccggcagtgacattctctcatgccagagctaattgaccatccagccgggaagagtggtgtcactggtgggttagagtggcagtccctctttttgctggactgtgaccagactgaccaactgggtgttggctgagcggaggcttagcagttagatgcccgcagggactggccaggtggagggcaggcgatagatgagctgactcagtggggctgcacaggagcacctcctcccggggctcagttcctccgcactgagtgagaggggacttgcctcaaggctggaggctcaaaactctttctgggaggtcacgggcttcacctccacccagtccccgcccccggttttcagacggtatgccagagcatcggggaggcgggcagggaggcttagaagagctggacgaccaagcatggctcgggacgtcctgcctcccccgcccctcgccctgcaggcgccgccgcgcgcccccaccccaagagccccaggcctccgcccgcgggttccgccgccgctctccctacctctcatcgctcttcccggcagacccaggcgtccgacccgggagcggggcctcttcggcggcggggcgaggggcgggggaggcggagggagccaggagccgggagccgggagcgggaggcgccggcggggctcgggtgtcgggaggcggctcccgagagcagctgtcgggggcctgttccggggagaggagccagggctggggcggctcgggcccaggcgccgcctccccctcgcctcggctccctcccttcctcctcccgctcctcgctcccctccctcccctcggccttctcgccgcgcgttcgggctcgcagccctcccttccccctcccggacccagtagtcccagtggctcccacgcccggcgccgagctccaggccccgcgcccgccacgcccaccccgcgcgctagcgcccggcccggcctcccccaggtaacccgcccgccaagcccgcctgggcgctcccaggccgcccagccgcccgcgccgctgcctccggccggctccgcgcccagccccctccacccactcgcagcccacccccgcttccccaaacgagaacctccaaagctggcgccccagggggctggctgcagtcccgctcagggcccacgaggggaagacgcccctcctacttctgggatcggttcctggtgggagaggcaaaggggagcagccccagggcacagaggaagaagcaggttcccacaggctcggcccagcccagctgcgggagttagcccagagaagggagcagagctcaggtctcagggctcacctgtccagccaggccccagactgctcttctccctccaccaacctttgctcctctctcgcagcctgtgcgctcccgcccctacgacccaacctggaaggccccagaccctgaaggcgggcccactctcttctccttctcctctcagttcctctctctgaagggcgttctaagggacccgggggtccagacgcccaggccctgattcccctgggctcccaacggagtggagtgggagggggactcaggagtcctcagggcaagcctccctcaggcccagccagctctggccgtagtgggccagagggtctgatcactggccagaagaggccaaaaatgaggccaggacaaagttgagtggtcgggaggaggaagaagaggagcaggagaaggatggaggcacactgaaaatcacacacagtcaaaaggaaggggaccaagagacccagggaagatgaaacagtgagactgagtaggcaaagcaactgagagagctactgggcagaggatggagcgggacagaacagcttgtggtgggaggtgctttttccccactcagcactacctcagcccctcacctctctccacacccccacacctgctcaccacctagacaatgtcacggtcacaggaagttctcgctccactgcacatctccgccccaggaacctcacagtagataaaaacataccctgcttgcagtcccagacaacaatcccaagaaagaaacacgaagtcccaaccagacaagtacacaaaagcactaccaggaagaagctggcccttgggaaaggccgaggcacacatgggcactagttcagaagcccaaggacgttccaacggctgagggacctgctaacagacagccccagggtcactcgaagagcagcttcttcccgccttcctgtcccaccaagcccccagggattcattcccccagaacacctacccctccagagaacagcagctggggaatctaggcccaggagacgctggactgggggtggggccagcctgggggtggggccaaggcttcccaagtcacctcacctggcagcccacagcccctccttccaggagctgtgctctgggaaagccccaacaggcctgccaggcaagctacagcccgtcataccctggtgggacattccacaccccaggcccacgctgaccccagctaagtggcatggcagtgccagacagaggggtccactggggagagcagaaggagctagagagtcctgaaacctttgtcccctcttctcactgcctcaggagaaattcctagtggtgatgcccacctcgccccagctctaggctggaggagtgggagggatgcaaggctggggcccagtggagtcaagtgacaacggaaagggagct

SEQ ID NO: 585025 - DNA, 4001 bp, Homo sapiens
ctccacctcatcatcttcatagtccaagagctcattgtccacatcgttctctgccataactgggccggcaggggaagaagggaagggggatctggatgggttctcgcaaaataggtgaaaacaaggggtgaagagtaggggattgaggaacagcaaaggaaaacaaagatactatttctaacagaagagctggaggggggaaaaaaaaaagcaagacttaatcacgagcacagccttcaccacctcttttccatccccagttcccactttccctaaaccaggaaacttttacctggaaagaaaaacagatacaaaacataaaaacgaaaagcaaatataacagaacagaaaaagcagtaccagggaaagtggttaggacagaggttcccaacaagattagcaatcacagtagcggaaaccagaaaagttggaaggggaagaccaacttataaattcttgatctgaaagtaacagtgaggaaatagaatagataataaaaggtaaaatacgactaataacttagtaaagtggaaaatggagatgacaagtagagtcctgaaaagtcctcaaaggaagactccgctttccctattataatcccaccgttatggatgcctaactcagcagccatcagtcaagggtgatagatgagggtcatcactgcgcaaagcgctcacctttcgaaaagaaaacatcatatggccgccgtccacctcccatagctctcagcctcccacttctcagtatcctcccttccgctgtttaagcaagccttgtgtaattagcatgggggggaggggcggtgcaagacaaatggctcggccacaaaaaaacaaaattcatgtctccaccctacaataagaaagctaataggtgacagagaaaggcaatccccgcccaggctttaacaggatctttaccaagtggtctcacatcactgttacgctacgaaggtgagactccttttggagaaacatacaatgacaccaatcgtatcgtaaacacttggaaggcactccaaattaagttgggcaagtcaaggtgagaaaaatccaactgggcccagaaaccagctcctcctcccagtcccaccgagggccgagaaagagctcaagaaaggacaaggaaggtgagaagagccccgccctccgcaaataccaagaccaagggacgccgagcgccgcctctcattgatgctgaggcctccaatatgagaagaacccattggaagaagggagcaaaacgaacacaatggcgccgaggacaccatcttggattgggtccccccttagcttcccttccttcccccaggagctctttgctctcgaaagggatgcaagctaaggaaatagcgaaccaactaggccccagcgaccagaccatcgcctgtgaaaagggtatcaggaacccatgtgacgggatgggtgcggagaagcgcagatggaaacggattgtagcgaaggccaaagcttacctaaacagggagagcgcgtatggcggcagcaacagcgacgaaggagggaaatctgccttcacttccggttgcaggcttccctctactccagcctcccgccttcttggctgcaagagcgcaggcgcaagggaccggaaacagggccttccgcggttatacagatccgtgcgctccaggcttgcctttggaaaatgcctgtctgaaatttgttttaaaaccgtttctaacttcactgctaccgccagtaacaaaagatataaaggaaactaacgtctcccccccactgttatctttattctcttatcctactcctctccatgcccctcatctcttcgtttaggtttttgccacgcaggtcttctctgtaggcacccctccatggatgcgcgaggaacgagtgtggcgaaggctgcgagttcccacggggtccttggcccggtagtgaaggtgacctgaggactgctgggcacgcactaggaaccggcaggccctagctgaggggagggaggagggaagtctcagggaactggattgctcgggggtgtttcccgactctttcccagtcgtggggctggtgggcggtattttcccaaaaggatgctgtccgaggtagctgatgccctagggccagtgagtcaggaaggtgttctgaatccgagcgggaagacggggtctggattcggccccaagtgttaatagtagggcttgagggttatactacattccattaatactgtttttgtttttgttttgagacagagtctcgccctgtcgcccaggcgggagtgcaatgtcctgatctcggctcactgcaaccgctgcttcccgggttcaagcgattctcctgcctcagcctcccgagtagctaggattacaggcgcccgccaccacgcccagcaaatttttgtttttttagtagagacggggcttcacccatgtatgacctcaggtgatccacccacttcggcctcccagagtgctgggattacaggcgtgagccaccgcgcccggcccattaatactgttaattcgagcagaatgttcttggccccgccccaacagccccattgttcaacctggatttttttcctgaatgaaacatttgctatccccgtctttgagatggggagctacaaaagtaagacctgatgtcctgctgtgtaataaaacaacaaacgtttggccctctccctgttaacatacttaatcatttaatactaaggagtaggtaccgttattctcatcttattgacagaagcgaagcaaagcaacatatctcaagcagtacggctggtgaggttacagccaggatgcaaacatctctcattctctattgtattctgcctccctgctcaaagaatctggttagtaaatacactgcaggttaccttattggttcaaattcttggtgaagtaagcttgtcttcagtgacaaatgaagtaactaattcaagaatggtgtcatagaaggtattttcccaagtatcatttaatttattcaaaagtatttatcaactgcctcccttgtgccacatgttgtcctaggatctggggacacaacggtgaacagccctgttctcacagtgtttacattacaggaaagaaaacacataaacacaaatataatgtcaagtatcgataagtggtcagggtgcagtggctcaggcctgtaacccaacccttgaggaagccgagcccgaaggattgcttgagcccaggagtttcagaccagcctgggcaagtgagaccccatctctacaaaaaattttaaaattagcaaggcatagtggcactcgcccgtaatcccagctactcaggaggctgaagtgggaggatcatttgagtccagggggtcaaggctgccgtgagctggaactccagcctgggcaacacagcaggaccttgtctcaaaaaaccagtagcagtaagtgctatgaagaaaatgcaaggtaaaggggcaaagagcacttgctcctacactccagcttttctctacagttgcgatctatagtcctcagattcccaaatgaggaaccatgtttctcactttagagaaataataaagtactacttgttcttgtttctccaagaagtttcaaaggatagccatttgggctgtttagggaatatgtaaacaaaaaacaagaaagtgactgaaggccaggcacagtggctcacacctctaatctcagcactttgggaggccaaggcaggtggatcacttgaggtcaggagtttgagaccagcctgaccaacatggcgaaaccccatctctactaaaaatacaaaaaatagccaggcgtggtggcacacacccataattccagcaacttgggaggctgaggcaggagaatcgcttgaacctgggaggcagaggttgcaatgagctgagatcacgccattgtattccagcctgggcaacaagagcaaaactccatctcaaaaaaaaaaaaaacaaagtgactgaaaatgagaaatgatgaggcaaaaggaggctgcttcaactcaccaatttatttgccaataa

SEQ ID NO: 585026 - DNA, 4001 bp, Homo sapiens
gcacagtgccctttcatctgctaagtattaacttaagtgatttttattgcaaacctagtggctttctttcttggagcatcattcttcagatctgagcccaagccttctgaaaggccaatgagtctctgggtagtacagcaattagtcttacaatgcactattttgtagcagcctccatctattcatttttctcaggttttaaaaagggtgaaatacacctaataggtaaaatgtggcaatttatactcgggcttaatggcaatcaatggggtaatcattctaatcatttttaaatgcttttcaaaaaaattcagaaatgggccgggcttacgcctgtaatctcagcactttgggaggccgaggtgggtggatccacaggagttcgagaccatcctgggtaatatggtgaaacctcatctttactaaaaacacaaaaattagccaggtgtggtggcgcacgtaatttcagctactagggaggctgaggtgctagaatcgcttgagcccgggaggtggaagttgtagtgagccgagatcacgccacactgcactccagctggggccacagagctgcctcaaaaaaaaaaaaaatcaaaagaaagaaaaaaattaaaaattcagaattgaatgttaacactcaagatgtagtaagaaaagtttttaactttttaaaaattaaggaaactaaaagcaagatacaactgctctaggcagccctacaatgaccttatagcttttctttgatttctggctctaaatggtactcatagaaagactgattaagttttgtttttcattctggggttagctgtctgttaaaaggcctgttctaagcatccctcttcagccctaagatttcataagtcttctaggagttgctctcccaaatacattgtctgtataaacaccaaaaggtggattaaattactttttttttttttttttaattgagacggagtcttgctctgtcacctaggctggagtgcagtggcgcgatctcagctcactgccaacttctgccgccgggttcaagccattctcctgcctcagcctccggagtatctgggattacaggcgcgcgccaccacgcccagctattttttttaatatatatatttttagtagagacagggttttgccatgttggccaagctggtctcgaattcctgacctggggtgatccgcccgcctcggcctcccaaaatactgggattacaggcgtgagccaacgcgcccggccagattaaattatactctatccccaggttttacaaatagctctgggagagacctgaacctcactaggtggcagctgattggaggtgaggcagtggggaggaaatgccttcgcccaggctccgcccctggccccacctatcctgccctgccagccactcccattctcaccgattaccgcgccaacaaagtggctcttcaaagcaaaacacagcggcagttcctcgtgaccagcggccacggcctccgggggcctagaggtgcctctccagcgaccacctctgccgacactatatccctcaggacctgttcgattcaactcctccgccggcctcctctctggcgctcgggacactgtcgagcttcgccgactagcaacgacccacgtagaggccttgggagctcctccgtggtgggacattgttccaagaaggggcgcgtccgacgtcgttgccgtccagctctgcaccacctgaccgtgacgtcgtaagagtagcgtgccagggaagccacgcagccgctacttaaggagcccgcacgaggctagcccccccgcccacgctctctatcccgcccacttcgcactgatttcacgcagccattggccagtgagcgttgtgggcgggactttcccagttttagccaatcggttttctgaaccgtgggagtgtgccttgaagtagtcgatgtgccccgccccccacccccccactgtgtattcctttccaggcgtgggactttttccaaacgcccaatttgctccctcccctactggacacacacctcgggttcctggcatctcagtgccttggaaacttttttttttctttttaaatagagacggggtgtcgccgtgttgcccaggcaggtcttgaactcttggcttctggcttcaagtgatcttccagcctcggcctcccaaagtgctgggattacagtcagccactgcaccggaaatgttttcaaccgtgacccataaaggtaagtcactgttacaaggtgacccaatccacacataaaaaacttgaaacaacagattgacaaaacagcatttatcctcgctatgtaagctgcattttgatacatttacgcttattttagtttttgaaatggttgtaatccacaaaattaaaaaaaaaaaatttaatagagatgggagttcccagtatgttgcccaaggctggtcttgaactcctggactcaagtgatcctcccacctccacctcccatagtgctggggttacaggcctgagccactgcactcggctcacaaaatgtatttaatggcccacagcttaaagatcactgacttgatccttttgtaagtcataagtgtgattgggttttcatgctcttgtgtcaaatgtgcctccctcaaaccttgttacgaagtgggcacactacccacctgatgtgaaaaatgaagagaaaaagatcactggcttgagagacattcattgctctacacagtcttctggatgtttgctatgttttttttgtttgttttcttttgttttgtttttgacctctgtcgcctaggctggagtgcagtggtgcgatcactcactgcagattcgacctgttggactcaagtgatactcccaccacagcctcccgaatagttgggactacaggtgtgcaccaccatgccaggctaattattttgtaaagacaagacctccctatgttgcccgggctggtatccaactcctcctgccttggcctcacacagttgagggattacaggtatgagccacagtgcctggcctgccataattttagagctaaggaaataaattgaatagattcctgaagcattaccgtcactgcagcctggctctgtggctggacatactactactccagggcttcaagccagctgcaagtgcactcctttgattaggatctttgaattatctgaacaaatttcagtttaggccagcagggataactcatacctgtaatctcaacactttaggaggcctaggcggaggatctcttgagccccaaggttcaacatcagtctgggtaacatagtgagaccctgccgggtgtggtggtacaggctgtagtcccagctactcaggaggctgaggtgggaggatcactgagccagggaggttgaggctacagtgagccgaagtgccgaaatggtgtcactgcactccagtctgggcaacagagcagagaccctgtctcaaaaaaaaaaaattttttttttttcagttcaatcatccatcaaacacagtggacaccaggccaggcatggtgtggctcatggctgtaatcccagcaccttgggaatgtgaggcaggcagatcacttgaggtctggagctcgtgaccagcctggtcaacatggtgaaaccccatctctaataaaaatgcaaaaaatattggctggatgtggtggctcatgcctgtaatcccagcactttgggaggcagaggcggctggatcacaaggtcaagagatcgagaccatcctggccaacatggtaaaaccccatctctactaaaaatacaaaaattagctgggcgtggtggtgtgcgcctgtagtcccagctacttgggaggctgaggcagaataattgcttgaacccgggaggcagaggttgcagtgagccaagattgtgccactgcacttcagcctgatgacagagcgagagactccatctcaaaaaaaaaaaaaaaaaaaaaaaaaaaaagattacctaggaaataggccaggcgcggtggctcacacctgtaatctcagcaccttgg

SEQ ID NO: 585027 - DNA, 4001 bp, Homo sapiens
agccccgccatttccgccccacccccacttggcccctgagactcccactgttagcccaggtttccagagttgacaagttttctgtcaagtaggagggaactctataattgatcctgtgtgaccagagatgttgctggcagtaggttcaatatgagctgtgatgaggtacagacagtggacagttcaagcatgcaagctctccatggagtatttccctagaaatacgcaacctgtggggatgagggagtgggtagtggcccttttagagggcaagacagaggctcaagctaggaggctttactggctgatggcaccaggaaaaggggagccacttaaaggctgtactttccatgtgaagggcagagagagcctggagaggtctcagtggccacaggtaatacagaagtggaaaatgttaccctggaagcaaaaagccacgggggctggtattgtctggcaagatattaaagggacagggtgggaggtaggggtgggacacagagtttgcagaaatggattttggatgatcgacttttttccatttatactgaggacccaaccaaatgacatgatctgcaatacaagagatttaaataggatgtaaggaagaatctgcctgttaggaggttctccctaggtgacaaaagatagtagtgggctctccttcctgggggagtgaaatcatctattagatgctcacaaatccaggtaaggaatttaacataggaccagtttgggatattcaagttcctcacatccaagttcagtaaagtagggggttggaacggtggtggggcacaataactgttctgtcccattcatctctcaggtatccagcaccctctacctcggtcattaagaatggaggtttccttgagaccacacgtctcctttggaggatggggcagggagacaccagtttagtgcctagccacatgccaggcacagagcctcacgaggggcactcaagtacttgcagagtgaacgaaggcacccctatggcaggtcctagagagctgaggcctaccttgctcctttcccccagtgttcgctgattctagtggctgagggccttgcttcctccccactaactagggtagggaaggcagcactactggaggactagaggaagagagagaaaaactccttggcctcccagaaattgtctaggccagatgattgacttcaggacaatcattgattgggattttcctgggcttagattctcccccttccctacctgaggtctcaaggcctaaggtaagtttcccaacctgatatgtgtggtggataggggggtgagctgcgtagcagtataatagggtcctcagtcctcacccactccgcagctctgtcccacctggcgggcagggttagacaggccagacaggtttgggactgggggcggcccctttatgcctctctcagctccagaggaaatgactgccaagcactggctaactgtttctcttgaaagtcaggaggaagcagcaagaaagagcacactgcgtgcccaagcatgactctgtggaggtgtgtgtgctcatcacacagagtctgggatgtggcctggctcctggccctcagaaccccataatggccctcagaacctcctggcctccagttgtggggcccagttctgcgcaaggtttctgcacacacttcactaggtctctggagggtgggcagcggcatctaccaggctacgttggcccagttacccaggaccagccccccgaccccaggcccgggacgctggatggctgggtgcccctggagtggcacagtgtccacacctggctcccaggcggcaggggctggtgtggtgcatctgccgtcctcccccgggtcccgggtgcccctcaccttgagctgggacttggagactttgccactcttctccacgtccagcgcggtaaaggcgtaccagatggacttgagcagttccttgcgcagggccatggctgaggcgcccgcccggctgggggcggctctgacactaagatccggtttcaggaaatgcaaacggctgcagagaccgcagaggtgccgtggtggagcgagagcaccacctgcctgcacattgcgtgaggctctgtgctgtcgagaaccctgcctgttgttctggcagtgctcagaggctccactccctgcatgggaactggggaccaactctccgagagcgggaaccctcgttctgtatccacgtggctcccggggcatgtgaggcccttttagaagcctcctcagacccggaggcttctggagccttccagggctcccagacgcagcttgctgagggaaaaagcaagctcatcctgatattggggtcagacagagtaaaggtccagtcctagttcaacataggaggccttgggtaagttacttaacctccttgagcagtttcctcatttgtaaagcaggaaaaatgcctccgtgttgtaagaatgtctgagaatggacgtaaagcacatagtaggctctgggtagagcttttggtgctacttaacattaccatggtggtgggactccatccaagtggaaggaaacaaaggcaacatcacaaagctggagaaggaaatgggccagggcacctctccaggtcaggatgtggcacttgacttgctggctccctatcccctcagcactggctctaaacggtactcagagcactgcccactctagccccagtagccctgaagacactggaaacttcctgaaacacatgggggtgagccttgtggtgcacctcaactttaagggtcccagcagcagcaggcttgggattcagggccctccatgtcagtgcttcctttcttcagatccagtgtccaaaaggactgggacacgcccacaccaggaatggtggtcacagatgttgaagacatctgctcaggccaattctaagacacctccccctaccccctaagccaaataaaaatccctccaagtaaggtgctgggaatacctcctgcctggaagcacgcccccgcccctctcttcccaaggagctggtggcaagagtaaatgggagctttctaggcatcctgggagaggatgcctggatcagaggagggggttccaatcctaggaggcaggaaggggttggggcatatccatcacagcagagagaggaaaagaggcaccaccaatccctgcaatgttcctgtgtaggcagagtcaaacccagagcttcttcccatcaagtgccttcccctgtatcccttcttccccctggagctgatctggtctcaccaactcacttttcagtggggtctgattgtggctttgaaatcccacagcacagtcctaggcacctaggtgggcacccccagagctgggtaatagagccaagacttcagctccagaggcatcagactctgctccttgaatctcagtaaccttggcaaaggtgtcccccagcctcactctaacctggggctttgccctcttggagaagctgactgtgtgatttgggggtggctgggttggaggggctctgactacgtttcacaagaaaaggcaggaaaagagttcccccagctcaatcacatgaggcctgagattcagccagagcctggaagcagcggtcaccctggtcctgtttggctaccctggagcccacctgctcagctgtgggcaagaagccaccagcagctcctcagggctttatcttatactgggcttccttcccacctgtgtccctggcaggccagccccaccactctggcaccaaggctgagtggggtttgtgccagggagacagggctgatagcctgatttgaccaaccctgccacccgggcctagagctgaaaggatggagggacccaggtggaaatttggaacttttattaaatactcattcatccatgtgccaccaccacccagagcaggaaaaaaattatcaaaatggaattaaaaaaaacaaaacaaatcaaacccaatccccagcagtctatgtacagggccactccctgcctctctgccatagagaggttgg

SEQ ID NO: 585028 - DNA, 4001 bp, Homo sapiens
aaaacctacaatattggttgtctcacttatttctagaaaaagtgtgttaactcctactctggctttatattttcttatcaatcatgaaagaatgggtgagggatttgtagctggggtcacaagaagacatgtccaggagagcaaaactgcaactaaaatttgcacattataagaaacacaaaatttgacacaatacaaaaataactttgtaatagtcaaagctgtaagaaaagatatgttttttttttagcttaaagatggactctcactagaagtttcttatttagaattgaatatatttagggggtttgaggacattggtttgattggttatgtgatctattccaagtcaatttttttaagtttatattttaaattgtaccaagtcaaaatttttttattttatattttaaattgtaccctggccgattcgttttcagaagtcatttgttttgtagccttttttttttgtatacacatcaaattcttgaccaaaggacagatttaatattttcacatatgaaaacaaataaattatgccactgtttcctgctattaattattgcttggtcttctcaaaggccaggccttttggcctaggcagtctgtctgcagttccaacagctgacacctgatggtgagtagtaatacctgttagctaatacatagactcagagctacattatctatgtcattggtataatggctataaaaccaagtcctactattaatattggctttcttctcaatgtaaccaaagcaattcagagtatgaagcaacttaaagaaacaaaagcatagaagagcatctagttaatctgcacaatttaaatattcacttctaaagatcattacttattctacattttctgaggagttattattatcaaacccatatgtgattacccgtgacagacacctgaattatactcacttttggcaaaagttctgtcatgtttggcactgttgtccatgaatgcaccttggactgaccccaccccttctcttattcattctttgtcttatttcacctttctaaaacattattgtcttctttctcctcattctgacctctacatgtgttctccagtttgtgtccttggattgctaatctcctttgcaagcattcatctcctcattcaaatagtatcaattaaatatactccctgtcaattggatgccaagctcaagggcatggtgtctcactctaagcaatattgatcttttgaataggacaattctttgctctaaggggctgttccatgcattgtaggttatttagcagcatcctgggttctatctacaactggtactgtgccagtagtacaagttgtgatgagctaaaaggtctctagacgttgcctgatgttcccttgagcacaaattcactcctctctgagaaccactggtctagtgatacttcgatatttcaataattattatttctgccttcaaatacattgttcaagtccaatctgtctgaagtctctgatcattactttcaacaaagtaaaatctctctccatttctgtctcacatcactttttgttatgatattattttagattcacagaagagttgcaaagttggtggaagccagcttccacttatgttatatattgcataaacttggtaatgttaattaagattaacgaattaatgttgatgtaatagtatttactaagctattcagattttgccagttttcatacttgttatttttgtctgtttttcactattgtctttattatctgttctggagtccaatctaaaataccacattacatttttgtgaaatgatgttttaatccctatgttattatcatattttttatcaagaaacaacttatgtcttctcaaatttgttagtataaatccccacaaatatttgcatattacctggtaaaattgtgacccaaaagtgcagaataaagaaaaaaagttgaatcttcatggtagagagtttcttaaaaaaagggggcaacagacctcctttttcaagtcagttgttttgaaataaggaaacagagatcccttttatttgtggattctcctgggaagtacttttaaccactgaggcttatcaagagcaagaacatttgtatgcttggttgaatagtgccaccctcaaagaacatgaactcaaaaagtattattaaatttttctcataaaagtaaaacctgctgtgtaaccttaactagactttcatgaaaacaacacagtttttaagatattttatttataggggatatgtgtttggattgctaaatgttatagtaatcatctcctctattctatgttatatgtaatattaagtattctaatgccttagtataaaattgttgaatgcctgaatcataagattttagagaaaaagtttccattgagatcagttttgttttgctgataaaacaatgagaaccagggagattaaataactttatttcaattaatataatatgcaattatttaaataatcagtaaattctggattcactaaaaatgtgagaaatattctatatgtcttttttttttttttttttttttgagatggagtctggctctgtcacccaggctggagtgcagtagcaccatctcagctcactgcaacctctgccttccaggttcaggtgattctcctgcctcagtctcctgagtagctgggattaccggtgcctgccaccacgcctgactaatttttgtatttttaaaagagatagagtttcaccatgttggtcaggctggtctcaaactcctgacctcatgatccacccgcctcggcttcccaaagtgctgggattacagtcatgagccaccatgcccggccaagtctttgtatgattcataaattttctatagtcatctgatttcaaaatttcaggttcaatgttttaattctgtttatggaactgaaaatttcatatctgatctaaattgcatgcttgcaaaaactattattttggatatgtgagaaagagctggaagttttgcccagtactcagaagctgatgctataaagaaaaacaattggccaggtgtggtggctcacacctgtaattccagcactttgggaggctgaggcgggtggatcacctgaggtcaggagttctagatcagactggccaacatggtgaaacaaccccgtctctactaaaaatacaaaaattagccggccatggtggcaggcacctgtaatcccagctactcaggggtccaaggcaggagaatcacttgaacctgggaggcagaggttgcaatgagccaagattgtaccattgcactccagcctggggtaaaagagtgagacttcctctcaaaaaaaaaaaaaaaaaaaaaaaagaaagaaaaagaaatcaattaatcaattatttcctaccacatagttaatttttaagacagtggttcctaaactttagctgcatcagaatcccttagaaagcttgctaaaatcagattgcagtgtcccacccccggcatttctgatttagtagatctggaatagggactaaaatttgcttttctaacaagatcattgaatgctaatgctgctgaaagggaccacatattagtctaggaaacctaactcattcattctataatgtctaggaaaaatgtttcacagagtcatagaatctgcagcatacattaataaagaattaaaagctgcttagagtttctaatcaaatatactcacattactggtgagaaaagtaaaatcaagatagatgaacttatttacctagtaattgttatcctttgcaacaaatgcttcatattataaaataaaaataacaacttttggactaaatcaattatggggaacttgagttatctatttcctttctgggaaagaaaagaaaaattgagaatgcagcattagttgataggaggaagaccacttcagtatatcactatgcaacacttaactcaacaaatattattgagcactaaaattaagagttcagttattgatttcaaattgattttgaattgatttcat

SEQ ID NO: 585029 - DNA, 4001 bp, Homo sapiens
ttacctagcattttcttatttatttattagaattttaaaatatattctagatttaagccctttgctagttatatatgtagcaatgtttgtattctactctatgactctactaagctgatatacaagaactgaaggaaattttgccattgaagtgattggtaaagtggtgtaatggacaagagggaagaacctttaaaggctatgggtcctaaaacataggtttggaataaaggtgagcctagggttacatgagctggccaggtactgagtgaacctggagcctgtatccaccgaggctggcctcggggctgagtccacaggtccttccctgatgactatggctgtggagctcaccttgttcttggacaagcctgaaacctgggggtcagcttggtgttggggggatccagagcccaggaacactggggccagcctagctctagagaaactctggaaaccgagtgtgattattgggcctagcctgagtctgtggggcttgaactagcactagggctactgggcaggcctggaggggcagtgagctgagacttgatgggctggcctagagccagaggctgtcagatccggcctggtgccagagcagacttggaagctcagtcttcaggtactggtctgaagtctgaggccatgggggcctgctcggtgctgggttctacttagaaagggcatccagtgttgggtccaaggctaatttctatggtcatttccctctctttccttcacagggagggtatctgtctccaggctgtgctatctaggcttgggagagaggtccatgagcaatgtgacactatctttcctaccctctttaatgtgtcttttcttatttctgtaatctacccaagtgctgtaatctctcacctggtttccttagctcttgtgaaggcattttcgtgcatggataattgttcaaattagtgattctgtaaaggaaggagcattgaaaagtcccattccaacatcatgctgacatccagtgaaacttagtcaaaaagaattcttttaaaactaagttcccagtcccttatctagacttttgttgctcaattgcctttttgagttatcttaattaaaccgtgctttcaaataaacagaacacctttatcattcttttcatataacaatatactttttatatccaaaaatatcagtattttgaacagtagtgattgataaaaatagttttgccttggccaggcgtggtggctcacacctgtaatcccagcattttgggaggccgtggcaggtagatcacctcaggtcaggagttcgctaccagcctagccaacatggtgaaaccctgtctctactaaaaatacaaaaaattagcggggcgtggtggtgggagcctgtaatcccagctactccggaggctgaagcaggagaattgcttgaacccgggagacggtggttgcagtgatccaagatagtgtcattgcactccagcctgggcaacaagagtgaaactccgtctcaaaaaaaaaaaaataaatatgtccagctgttgagtaggagggaaactgagacaacagtataattcctaagcacaattacattaaaacattttaaaaagtaataatgttgctgagaacaatggttagaaaacctttcttcatggaaatgataaaaggacatttgtctagccagcattttatcaaaaaaatcggcctctacaaccttaaaataagatttctttcttgttttaaacatgaaattcagtcttcataaagctatgaggtgaaagacaagaacatataagtaaacagggactgaggtagagaatatactcagaatatttacttcatttcagtcaaaaagtattgattaaaatgtgcaagacacaattctacttattttgttttacctgtgctgattttctctgtcccatgtcgggccttttcaaatattgtggaagatgtatttgtctttgagtacattttttcaagtttcagtctacatatggttgtcaataatttcataagagtgctaagaggttgttaagagctcactgtaaagtgaaaaaattactttaaaagtaggaggaaaaatattttcagaaataaggacacaaatgtagttgcctctatttaatggtcctatatattataaaaggttttacaaaatgataaacatatagtacatatgtttaaaaatccagttaaatgaataaatgacttggctattaataagttcaccttgcatggctattgttaggaaaaataaattaatacaggcaaaaggctgaacaaatgctagctattaaaatcattattatgaagaaaacctatcagtgtttattgaaatctgtataattctttgtacctcagaaaagttctaaatatagagagaattctaatgagcacactttaattaatttttataaagaagaaaaattattatctgatttaaattaactcccttgttggtttacattattaactgaagttcacctccttgtccccttttggtgagaaattattagctaaaaagctatttatgtttaaatgttagggcagaataacagtaaaataatgagttactacagatttattttaaggttacctcctctgatctcaatactgaaagatatcttgataatcagagaaagcagcaagataaagaaaaaggagaatttaactggaagtgagcagtagacaagtgcagcttgtctcaattgttaataaaatacaatctgaaacttttagcaagacattttatctgattaacctctgctataaatatcactgtggggatcaatgatttccaagcataattcataactttcccagttttttctaatctattaatagatcaaattcagttaaatttgagtgttgaataaatacacatttcatggatctgtgaaatcaacgtagcattattttcttctaatcatttacatatatgcatatatatgaatgtatattttcatgtaattaaggtgaattacagccttttctaggatgctgtgcttgaaaaattattcaaatatttttacctgagaactgtgaataaatgtaatgtaacatgatgatggtattaataaaatgttttataatgtcaattctactttaaataacccagctccccgactttaatgctggccccttgacccctctagcaataatattcatattacctggtggaataaggactccaaagaaaagcaaaatacagaaaaagagaaggatcttcattgtaaatgatttcttggtataaaacagtgtacagatcatctgtctgactcagctgttgttgaaacaagaaaaaaaaacccttacatttaaagaattcttctgcatagttttgactactgaagcttattaagagtgagaacatttctatgcttggtgcatagtgccatattcaaagagatagtgactagaaaaagctgcattgtcacacaaaagttacatctgctgatttctcttgcagtcagtttctttaagaaactttaacagttacaagaatatgggtataaattgctaagtgaccaagatccgaaatagtcctgcagcaattcacttgataccccaggagtactagttttatataattccattcactattttaatggccccagtattaacaatgaatctcaatgtaataagaaatcaaaaccacagaactttagactgaaattatcatacagaatatttaattttacatataaaaatgttgagatccagatttgtcaggtaattttataatccataccttctttacttaaattatgtatgaacataaatcatgacagtattctggtgtttatggatattatcctatcgagcttagctgtaccacaaagaaaggtctgtcccctcaagtaggatttgtgaatgtcagtgcaaaaacattcaatgttataaacctagaatgcatttctctgtttgtttgttgttattttctatgtagtgagaagttatttctgagttaatttgtaagttttccaaagtcgactatagcagatatacgataaa

SEQ ID NO: 585030 - DNA, 4001 bp, Homo sapiens
ttaagtaagaaatacatttggtggatactttaaatcctgaatgccaagttttactgatgctttataattaataagaatatttatgttaaagttattttaatagtataatagaaattaatgtggaatgtggaaacttggaaacccaatgaattcattgaagacaaggacaaaaacagaagcattaagtattgaagtataagatgaaagaagttaaataaaattcttgaggaccaagagagaagacccttggattggcagcctatgtttaagattgattataatagtcagctttggatgttagaattagaagtgacttttcttttttatctttgaacatttctatattgttctaaattttcatattattttaaaatttaaaaagctgttaagatgtttttaatttgcttttatcctgatcacaaaattataagtatatatgtagaacaatataatattataacgaagtaaataaatcagccatgaactcatctctccaacataactactcttagggtttagtgtttttcctcctgctgtttttctcttttgatgtatttttacatgggtaaggtgttaatatattccattttactcccttttcagtttgattagctctttcttaaaattgtttttatcagtcttctgttattatgtgattagcatctatataactttgtgtccaagaaacaaacacatttatatggaaactaagagaaggcacataaaccataatttatgtttactatatgaaagatcatatgaaaataaatgtttctgtaccaggcaaataaataggtcagagatgaagagaacaagaatcaaaagtcctctgtctcatggctggagataaacttctgccaatttaatgaagaagatgctaccactctttttttctttatttctcttgtactaagccaacattgaattcactagccatggtataattgtgtaatccagaaggccagagatcaacaacttaaatatagattgatagatagcaaaaattcatttttattagtaaaattgttatacagtgttttataattataatttatttttgatggagtttactagtgattttgttaatgattggcttttggtattcccataccgcacagcaggggttaacattgcagtaataatatacatattcccagctgttgcattccggcttgcaagcaccacgaacaagctgacattctctttttctctctgcaacttctcttgtttttttctgtggaactaggaaaaagtagctatgaccataagtccagatttaatatccttagatacagagatgaataaactctttaaaatgtagagttaaaccattttgtttctgaaatcatgcccaagcaactctattgaaatttttccctctctcagctggtataatatacttatttatctaacaatattgcttttgtcaccagctttttaaattatcatttaataaatagaacatttttaaatatctaatttgtgtgtgcttcctcaagagtaaagagaaaaagacatggaagaaatagcctacatgttctgtgttctaaataatcatccacctccaaccccttttctctctacccctagcaatcattaggttggctgtaaaaagcttaattttgatggtagctacaatagcagttggtaaaattgattttgaaacagaaggcagtgggaagtatctaaaaaattatagtgtcatcacacaaaacaacacaataaataaatttaattctacatctcaggaagttttaaaaattattttctcaactaccagttctactcatttcttcccccatgaaaaaatagagaaaattgccttataaggagttcatatgaaatctcctaacaataatttatttgtttttattattttcagagtaaagcatttataagaacattttgcctttcacatcttttttataataacaaatattacctgatggaccacaagacacagtgaagacaaaggtcagaaaaatacaaagtatcttcattgctgatgcagttacacttgagtaaagtggggacagatctcaaaatgtctcagagttgtgctagtctttggtaaaagaaatatgggttcttgtttttacagccttcttggcgtgattacaattctgattaatgctgcctacaattctgattaatgctgactttccagattgagtgcatattcatgtaagcattgtgaaacagcaaacaagtatagtagagagtttagtgctgctacaacctcggtgagccaaacatgaattcatttcatttttgtaagtaaacaatggggttaaagtattcttggtcactaattaattgaaagcacataatcaacatcatttacatttttgactacatgctttcttgagtatttattatgtaccaggggctgttctaagaactttataaggattaattctcatgacaaattctataacataggaacttcttaatttccaattgagaaaactgtgacgcagacagaatatgtaatggctcacaaattatacatgtagtcattggtggagtagagattaattatcaggttatatgatgacagagctcattctctcagcctccaccctcctcattctctcaactgtatgttgggtttgcatcaagtgtggttattctctgtacacatggcctgaaccatacactgtttctgggattcaatttttctagaaatagaaagtatttctatatcactgttttaatactgttatactagcaattatcatagttacactataaggataatcagtatcattatttacatgccatgtaatgatgactcagtcatgaaattatcttattcataggagagagcagtgtgttaagaatctaaagagcactagatttaggtagggaaaaccaatcttggggtctggttctcagtttaccatctatatatttggaataaatattcatttatctaagccttaggagtctcttcttgaagtccagattggtaggaccaaacatatttggagttttcatagcaaggatcaagtagaaaacatgtaaaaaataaataagtaattgatatatgaatttaaacaatttggtccactttcataaatctagagctgggtttttaaatccaaaaagatgtatccttacaacttaatgatattatattatcattagatgagatcgttatttttatttatatttgtatttaatttatattctaactccttctgtcatttagggaaataaattagaaatatattatgtaatctgagtttaaaaagcagcagtccagtcctcttgtcttttgtgtacttcattcctcactcaaaaggtacctatgtatttatagccagaccatgaaaaatctattttctcaatattttctccctataaaatgctaaaaagagccctttgaactgttggagatttaataaaactaattgtatgtaagcagagaaagatagcaatggcaaattttaaaaagcgggcagtatcatagtgacagcatgtgtaagaaaatgaccttggacaatagggcccatttttgcttcagtgctaccatatccaatttatcagtataaaataagccacttctattgagctggcccatcagctaaactcataaattgcatattttcccctatctgtttaaaggtgaagttgggtaaaattatatctgaatcacactgaacaaaggtaagggcctcacttctcccaggaaaatacataagtagaatcaaacaagatgcatagaaagcaagttaattgagttatttattgcttacaatgtgcatcttatggtataattggggagaaatccagattgtatatttctatttacaaaatcattttatttgtttctttttgttttttagggagaaagagacaaaaatagagaaagttgagtgagaatgagattggggttgtgattaagggattgtgattttttaagggagaaagagacaaaaatgaagaaagttgggtgagaatgagattggtgttgtgattaagggaaaaaagaggag

SEQ ID NO: 585031 - DNA, 4001 bp, Homo sapiens
ccctaagggtgaaatacaatggtaaggtgtctacatagcttcaacattaatagataatgccaaacagatgttcaaataattggtgctaacttaaacttccagaagcattgaataatagtttcagacatctaaaatctaagaaatgcttgatattttcaatttagtaattatgatgtgaatgtagacacctcatatatcttaacccattttatatttcataataaaatgccaatttttctgattactgaaaaagggtaacatattttcttatgtttactgacctaataaatatctatcatttagaaagtgatccatctttggttttctattggacagtctgtcttttttatactgttttatgtatgttctttatatattctagttgtgttccttttatatgctaaatgtattgaacatatttttctccatatagagcttgctttttttagttggtgttttttgactgacaaaagtttccaaattttaatgtagtcaatactattttttctactgattaagaaatactactacttgtatgttaaaattgttagtaaattcttttacattaacttgcatgctttattgttttgcctttttccatgcttgcatctcaggttatttggaatgagattttggatgtggtaagaggcaatagtcaagcttcattttttcttcatatggctatgcaatggaaccagccctatttattgaaaagcttatttattacgttgttctgtagtgccatctttatctgtttctgggttctctattctccattgatttattcaaaaatttatatgtattagataatttctgaaaaaattacatcataatgaatctgaacaacaacaaaaagaaatagaaaatctaaatgtttccaaattcattaagggaatagaatccataataattaagcttctatagggaaaatacccagcccagataggttcactgttgaattctaaacatttaaagaagaaataacaccaattatacacaaacttttccagataatagaaaataaaaggatgtttctaacttattttatgagatcaacaatacctggtactaaaactgatcaggacattacaagaaagaaaattactcattaatacagatgcaaaaagtttcttgttcacaatattctcccatgatctttttgatatctgtagcatatatactaatatctctgataaagtttagttttgccttcactttttctttacagttttgtcaaagctttattaattttgttagtcttttcaaaaaacaaaatgtggccttctttattttctctagtgtctgttttctacttacatctaattaagtcttattacatgtttgtaactgtcattttaatttgattttcttttttaacttcatcagttaaaattttagttacatttttagttttaattctttttagatatatggatataactatattaatttccttgtaaaccctactatgaactttgatttatctcatttttattactattcagttcaaaatattttctaatatccatttgatcatcttatagattctgttattgatattccaagaaatatacactgctgttctcagttcattcagtttctctagggtctaattactttcaagctttcacttctgagacttataaataaatttaatatattatagttttctgaacaatttaaatatctagaagaaaactcagtccaaaaaaattgaaagatgttgtcttcattatctcattttatctacatatttggagaatgaggtgggtacagtacaccagtataatgatattatcaatgaggaaaccaagattcagtataataaagacacttatttaattgataagattgcattaaaaatttgcattctacaattaataatttattatttctatttctagtgagaagttttacacaaatataacagagacatctatcttacctggtagaatgaaggtcacataacacagaaaatggagatagtaaaagatcctcattctgtagaaagaagttgttgaaagacttgataacagaatatagagactatagaactttccaaaacccaaaagacgtttactatttatagttttctcatggaagagaaactctcgttatctggaaattgttttaattttgtgtgcctatctctgctccaatgactatggctgtgggcagaattacccaaattgaaaacacttgaaaataatagagcttttggaaggaatccctctgtgaatgatagctgtaaacatggcatcttcctatcattgctaattaattaatgatcaatgcaaaggggcatccatggaataaatttaaggtaaatacttatttactacttcagaaataaaacagctgaacattgtccattaatctgctgattacttttcaaaatttactgtaatcactaatctggtgtgtcaattcatcaatatgcctgcatatcaaaaaattttaattatatcatgttatcccattaatttcccccaaattattcatttacaagacccaaatattaagcctcacttttatcactaatttctgttacatttttgagatggaacttaaatattcacaaaactcttgttttcctagtaaagctcaataattctccactttttttaacatttaaatatttaattacatggacacaataaataatgagaagagactgtaatgaatagcaataatttcctacccactaggccctctagtgattactaacataagaacaaggatgtagtttatatcttatcttggcttaccaaacagagtacatctcttggtttctactaagaaaattacaaatttagattacttacactcttttctaggctatctttatcaaatattttgaagttatgttaattttttaaaaatgttataatcttcaataaaacacttatatttttcctatcaactgtagttgcaatattaagccttcctcacttaaaatgaaaatattagccctcttgctagttactccagcaattctccccactttttacacctcattcatttgttacacatttcctttcatcttgtgtaagataatatgtgtactctatgtataattagaattaaaacatacactttatttttagactgtagtacaataagtattatcaattatattgcctttttctatgtgcccaatatcacaacacttgggttaatcaaagagaaatgctcttggtttcaaagtcaaattgacattattattaacattattaccaataatttattttatatctttcttttcttctttctgctttcttttttcttaagtgtttttttgtgtttttattttgttttatatttggttatgtcattattgaagagtatttcttcctgcagttttctttgtatatgtggacaaaatataaataataggcattctctatcgtcaagtttatctgagtagcataggtgagtcctgagattgcttcattctaagatttttctaaacctgccctcctgagtttaatttaccgtgatctggatcttgtgtctttttttgttgttgttcttgtttttctccctccagaattgttttcagaaaagatttttttaaattagaattttgtttctaaaaaatatttttattctgccctcacatttagttatttggatgttaaatctaggttcaaaatcatgttccttcacaactttgaagctgttactctactaacatccggcatccagtcttcctgatgaaaactctaatgcctggatagctccttttaaatgttttaattttttctctcttgatgtcattaggacattggttttctgattcagtctcccaaactttatgattcacacatttcttggtgtaaatttcttatgaataagttatctttctggtattggtgagcttatatctttcctgggatctgggaaattttcttcctctttctatattttttttcctcagataagttcttccctccttatttgtttgtttattttctctcttttggggatgtttttaagtc

SEQ ID NO: 585032 - DNA, 4001 bp, Homo sapiens
aatgatagatatctctttatttgtattatctagagagatgctatttattgcctttgatgccagagggaaaaagcattatcttgccagcttaaaaatgcatcctcagattacactgtcctacatgatgggtgtgaagcatgtatgttgacttaattggaatttacaaataatagaagatgacagctgtcaaacactagtattaaaaaaagaatagcattatttaagtgggaattgtaaattagcatttttccactagtaacaaaaacaacaaacagcttctctctagataacagctatgtataacataaaaatttatttatgtacaagaaggaatcacaaatttctcaatttttagatgaatctatgcacatacattcataatgtctcttgggtttataatgaaactgaaaatgtcatgaaaattttcaccttttttcccaaagcaagtgacatgaggcacacatgtaaatcatgataacataactggagctaattttattatccaaatgtggttgcactaaataagtcttctttattttaagatcacccccatatggttttagtaaaaacaaaccctgattgtaattccattagtcttgagtttagaatgatgtaataaaataacaatcctcaaaattatcatctgacatattttacttgaattataaaacaattaaaatgatttgagtcttttatccaaaatacttagatgtttgagtttactcacagccagacttattgttagagctagacttccttggtctcatctgtgctgctaaggaatgaagttggacttcaaagaggaaactcttgcagttctagaccactcctaaatcagaatgccctatagttattatttttttgtttgttttattttcttaaggtgagtggaattattttcttgggtgtgtgtaaaatgattgtttacagggtctttacataaataagaaaaatacttttcctatcataagtaccctgaaatgtgttaaaacagctctttcgatgatctccatcaagatacttcctttggctattgatctaatctaatagtagtgtgtacaatgaaagtttacaaatgagggtacacagtttaagtatgtgaaatccaacatggtaaatattacctcccctgtttcctgcaatagttgtcaagaaagagtttctcgatgagatttctagatgttacttgctttttaaggtgttttaatacaatgtaaaagtaattataatactatttaagatgaatctgatgtgtattatactttatgttgggcattttgtatatttaaatatcattaatcgtcataatactacagatagacttaattactgtatttaattcgcaaatgaggaaattgatgctgaatgagtgtaaataacctgatagatttgcatagccaatacatggcaaaagccaaatctgaacccaggtatcaattattccaaagtttatactcatttaattatctggttagtattaattgctatgtaattggacctgaggtaatacagccactgaagttctcaattcttaatcagttgaaaacaccattttgtgtttttctcaaagtaaaccttgtgacataatataaccaaacctatcatgaggttactgaaaaaccaactgttactctactacacagtgcccatcaatgtctcaaggatccagatggttatactttaatattctatccaagtagtcagtctggacaaccagcctgtagtcatttaatcaaggcctttaaattgtctcatacaataatatgactcacccggagccttactgtttagtaagaccacagtcctttatttgtgatttactcttgggaccgtaaccaaccactctcttaacaatctggtcactcttgtgtctccagttgacatcgaccaaaatgcaactctccagaaagatattttaccctctcaatatttacattttacctggtggcaatggggaccagaaagaaaaataaaacaaagagaaagacgtgaatcttcatgattgaagacagtcagccgaattagcagctctgcagtgtttgaataagagaaaggtggagagcacatctttttatacttctctccatgcagttgtacgaatttagaaactggggtttatcaaaagttaacactcctgtttagcagtgcctggggcaaaaatgcaggacattacttttcttttatcttgggatataaagggttatgatatccatagtatataattatctttttaataactggttgtctaggaagtgcatgccactgagaatctcctattgaaggtctgaaaagtagaagcatgagaatttaatctttgcttttgatttagtttctctctctctctctctctctctcttttttttttttttttttttttttttgagacggagtctcgttctgtcacccaggctggagttcagtggcgcgatcgcgactcactgcaagctctgcctcccgggttcacgccattctcctgcctcagcctccagagtaggtggtactacaggcacccgccaccaggccggctaattttttgtatttttagtagaaacggggtttcaccgtgttagccaggacagtttttctcttttttaaatagctatacataatgaataaactagtgaatttaaaaagcaatatactcacacccgtaattccagcactttgggaggccgaggctggcggataactaggtcaggagattaagaccgtcccggctaacacggtgaaaccccgtctctactaaaaaatagaaaaaaattatccgggcgtggtggcgggcccctgtagtcccagctactcccagaggctgaggcaggagaatggcgtgaaccctggaggcggagcttgcagtgagctaagatcgcgccactgctctccagcctgggcgtcagggtgagactctgtctcaaaaaaaaaaaaaaaaaaaagcagcaatataaattattgtctcctaatttgtgactttagttacagatccccctgatctgttgttattgcaaaaacctccctcatcattactgaaataaataattctttgttgtctcttgcatgcaatgtagatattagggacactgaggtataagagaatttcacaataagcacacaaacacacattcacacacatatacaggcagataaaaattctgtgtttgcaaaatgccgaatgatgacactcgcaataagtagtaagtcattttaataaaaaaatggattatttggatgttctttaaggagattattttagctatagttatgaaaaagagtatgtttagcaagagatccaagtcatattttgttacttccaggtcttaaaaaagaatacccaagcaaagcaaagcaaagcaaaatatgactggaagtacttaggggtagtgattaccatggcccactaaagagaagttaaaataaaatgcccaattcacagacattaaatgtttctgcttttagatggtaagaaaaatgtttttttaattaaagattaaaaaatgtaataaagctcattatgtttaattgacaaaccaagcaacttggaacattgcaaattattcaatggctgtttatgtaaggaactgttgaattcctaggaccagtctcaggaacaggtttgcaaaagtggaattcagtcctcagaactatttatatacctaaatgtgaaaactatcacatgcagaaaaatatatttacacacatatatatatgcatgtttatataaaatatattgaaaaatatatagagaaacattttatgatcttctcacaggaaaggtgtttttaagcaagaaaaatgctttagaaaccatataatagatgatacaatttaactatgtacaaatgtataattttttatgatccccaaacaagcagagtttgaataaaacatttgcaacatataaaagccaagagtagacataaaaatatacacaaagattgtgtaaaattgtttacagatatgaataatcctaaagaaagttaaacgatggttataaaaattaaatcaca

SEQ ID NO: 585033 - DNA, 4001 bp, Homo sapiens
tgtgttggccacttacagtatatttacatgacttctctaattttttcctgacatgaagaaaattcaccatttctttggcatctcaaccctgcccccaccagaagaccaaaatacaaacaaaaaattggagaaaaagtgcagagcctctttggctagcagcgagatagtgcagccaattttgttgttgtattaaaaataattttaaaataacatgttgttaagcaatagtttatgtgaaaacttatatttaaaaagccatgctttacttaaatatgcccttcttagggcacataccactttaaacaaacaaaaggcacaccttgtaatcttaacccagattgtgaccacaggctggttgaggcttaaaaaaaatccgggtttaggaagagcgcttcaacctcttcccaagtgtggctgagtcgtaaacatatacgaaataaccgcagactaagctaatatcaaagaatgctaagagatgcgactcggatttttaaatgtttggaaacatgtcaagaagcgggtacacctgaaacagacactgcatgcatcctggataaactgccgcagcacactcctctattcagtcaagtttccgtttcacacctccagtcaaatcagggctcatatcgccctcccttaaaacagacacaggttcgaaaccgagacagtgctgggctcacatttaactttctttcagagttcactttcttcatttttaactactttctcaagtagcaacagctttcaccgctgtttgccagggagggaaactttttggtaaatgtaaaaatattcgaaagtattcaaatacttccgggtctagccttataacttcagtcttaacgggctgcaccaagaccttacaataacttcaaaaggcaaaagatgtgtaatgaaaaggacaaaattagaacatccacttagcaacttcaaaggtgcacacacacaggtaaaaaaaaaaatcaaatccaagacctacaaacttcccgtcaaatgatgaaatgttaacgaacgtttagagcggacgagaagtcggctgcactccaatacatctctaccacgctaacaaatactttaaaaaccggaatacacaaagtcaattctacgccatcgctcaaaacaaaagcagataaattgtgcacacattctcgctgaaaatcactccgacttcacgcctctaaacaccaaaagagcaagaaaactgtttcctgggtgaaaaatacaaaaaaacttcggtctgaaaaattcatcagttgggatgcgactccccccacctttttcctcctcctcctcctcctcgtcgtcctcgtcctcttcctcctcgctctcctctctgggaccgggcatttcgggttctttctcggacgcgggctgggtgggggttccctccccctccgcagcaggggccgaggcggacatgctgtgaacctgcatgcgggaagaaagccggacgtctcggtcctcctactcccgcaggcaggaccgggcggccaccctgaatgatgctacccttcccgcgggacacctgccctgaaagttgcctcctcccatagccgggaccgcagcgctcagtccccaggggcggcttccctcccgctccgccgccgccgtccagggattcccgaggcgggaaaccgcgcccgctgccccgcgtgcgcgcgcgcccgcccggcctgcgctgttcccggcccggcccgagctgccggccctccacgtcccctcccccgccccaggccgccgtccaaatggccgcgtccctcccccgtcggccgcggcaggggcgaccgggcctccggcgtcccgaagcagcccttaccgcggatttcggccgccgcgggcctggcacgcgagggcacgaggaggttctgggaggcggcggcggccgacgccgaggagaaggcgcgcgggccgctgtctggcgtgacgctcgcgccgcgcgctcggctccccagaatcaacaagattttcaaaatggcggttcgggaaggagagcgggaatgcggcgaccaatcagggccgcgagctgggagttggcgggcgcggggcgggggaggcggggcggccgggtgcctccgcgggaagctcgggcgggcgggaccgcgaggggtcgcctcggccgcgggcggagggatgcgcgcgcggggctctccccggctgcgcctggagtgtggtcggcgctcgggccccggagtgcgggcgggctgtgtcccgcggggcgggcgggagcgggaggcgaggcggcctggcagcgcggaacggaaggacgctagggggcctgcgtgtttattgtttccacggtcgcttcctggaaaagatgatgagcagtcccgggccgcggaggggcgcggcgggcgcggtaaagaagtttagagatctccgaagtcgctatcgacagtgttactctgaggcggaggagaattaatcagcggtctcatcaatgctccagaaatcatgctgggtgatagataactcccaaatctgtatttctgaggaccgcatcgcttgtaaggtgcaccgaaaggaaaaagatcctacctgccacgttaaaggttcacatagccagccacatagatttacacccctgtaaatataaggggagaggctccctcccaccccattccttctcctctcctctctcacacacactctctgttttataatagaggaaatatgttatttggccgggtccagacccttctcccagagttctaggtcatctatgcagatgctttttacacattcaacactgcagacactcaaagcagtatcttccctgctcaatgctgccttcttttgtatgtgatttcctttattttctcccaactcttcaaccactagctcacctgaaggatccttgtactcagtggacttaatagaaatgtgatcagtgaaatttgcctggactctgggttgcaggacaaaaattagacatttcctttgaatcttcccttttccttttgttccccttccaaaacatacgcgaatagtgtcatttctaccctcaaacggtatgccattttccacactatttatcccactcaaatcctatccacactccacagctcatctctccttcttgctgcctgcaacgtggttgggagtggggggttgtgtttcacccctatttgtgttacagctctttcaatcctaccatttggcaggtcctgagttctggtcctgtgtccaggaagagtgaggcacgcaaacaactggagggtgagcaaggtggacaggagcttcactgagggacagaacagctctcctgagacctgaagtgggttgctcctttctgcaggggggttgtcccgactagcgtcctgccctcagtggagaggagacccatagtgggcagctcctttctgcaggcaggtggtcctgacgagttgaggagaccaaagtgggtagctccttcctgcagctggtaggcctgagcgctggctgagtctggggtttttatgggctcagaagggaggaagtgtgtgctgattggcccatgggtgggcccagaaaaagcaccactagttttcactctgggctgcagactctacctggaactggccaccaggccccccaggcttcaggccatccctggcttgaaggtgggcagggacctacccctttccccccaggaacgtgtctgcctcccaccatcaacatgtcatccatggcgcccaggctgtttgtgctgaggggtgcctgcaggcccacgcggagccaccctcagccccaccagcctctttctcgcacttgttggtgcccaaagtccagagagggccaaggcggcaggtggctggtgtgtcagtgctgccctgaacacgtgcacacccagctgggttgcagcagcgcccgtgcctggccacaactttgctccgccttggagtgggccctgggagtgggtagagagagggtagaggcctgggaacaggcacattctttttttttttttttttttttttgagacagggtctcactctgtcacccaagctggagtgcagtggcgt

SEQ ID NO: 585034 - DNA, 4001 bp, Homo sapiens
ttctcagaagcctcttcctcctcttcttcctcacgcttcttcctgaggtgtttccgctttttacgtttcttctggaggctgcttccagccctactcacagtctcctcactgctctcttcactgtcttccagtaacctataagatcggttcttctccagcagggcccgggcctctcgctctgctgcccgagctggcttttctaccactgcctttcgtggtacctgtcagtagaggggaagataaggaggtctgagcaactcctgatctctgccctcccacttagctctgttcctaatttaagcaattacttagtctttcctgcccccgcggcccggccccactgtcaggcaatggcgtgatctcggctcacttcaacctccgcctcccaggttcaagcaattctcctgcctcagcctcccaagtagctgagattacaggcacatgccaccacgcccgactatttttgtatttttagtagagatgaggtttcaccatgttggccaggctggtctcaaactcctgacctcatgatccactcacctcagcctcccaaagtgctgggattacaggcatgagccaccacacccgggcacaattacttagttttaaaccagctaaccagcattcattctctttcttcctcatggcttcaccccatcttcatcatcctgaatggggttttttatttttttttacagacagggtttcactctgtccctcttgggctcaagggatcctcccacctcaggctcctaagtagctagaaacacaggtgcacactaccacgctcaactaatttttaatttttttgtaggacgaaggtttcgccatgttgcccaggctggtctcgaactcctgggctcaagtaatcctcctgcctcagcctcccggggtgctgggattacaggtgtgagccactgcacccggccccctctgttaattaaacgactgaaaggaagttcagaagatgaggggggccgggcatggtggctcacgcctgtaatctcagcactctgagggggctgagagaggattgcttgagctgaggagttagagaccagcctgcgcaacacaccaaggcctcatctctaaaaataaaaataaaaataaaagatattagccgggggtggtggcgcgcgcccgtagtcccagctaccggggaagatgaggtgggagggtcgcttcaaccagggaggtcgacgctgtagtgagccgtgatcttacgaccgcactccagcctgggcgacggggcgagcgagactgtgtctctcaaaaaaaaaaaaaagaaagaaagaaatgcagaaactaagatccctactgaatcgcaatctgcattttaacaagaaccttggatgcatgttaagagttcgagaaacaccgttctattgcgcttaacccgacacacctaagccctcctcaatcttctccactgagctgggcgtccagcagctagcacagtacctacgcgacaacggacaaagaataagtgcttgtgaactgagctttcttaacttctcgatggaccgttaggccagcctcaccgggacaaatcacagggcccctccccacccctgccgacaccttgttccagagtctcagggcgaagtcccgggccggcccactgagatccaaggtatcagtgtctcgtaggcgctgcacgaactcctcggcagaggtgcagcgctgtgcggtaccgatcagaaactgggcgacgtgccgctcgctcagccccaacaccgagtgcagctcgtcctgaacccagcgctccagacccgccggcgtcgccatggcgactcacgctccctgctcccggccctgaagcgtcgggcagccgcgctcactgctgggccggtcagaggcctggagccctcggctggagcctcagcttcgcaagtcagctaccttgggacctctaggatcttccgacatcccaaagctgtcttcccgtaccgcggagcccggaaggggctgtactttttcggcctctaagcactacggtggccgagcgagttcaaacctcgcggaaccatacctgaaaactcggggtaattcttttttcttcatttcgcctctgtccagtttctctgacgccccctgatggtcagtctgtgagtgcttcgctcacgcattcattcaacaagtgaaattaatttaatggatgcctaatgtgtgctcattgctttccgtccctgggatatagcagaggacaaatcaaaagttccttaccaaatttacattttgcggtgggggagggacaggatacataataaagaaagtatggaaattttatagagccaaaaactatacaaagtaagggaggaatgaaattctatttcagattggaagatcgggtccatgctcataaaacatattagcattgttggccgggcgcggtggctcatgcctgtaatcccagcactttgggaggccaaggcgggcggattatctgaggtcaggagttcgagaccagcctggccaagatggcgaaaccctgtctctactaaaaatataaaaattagcctggcgtggtggtgtgcgcctgtagtcccagccactcgggaggctgaggcaggagaatcatttgaacatgggaagcagagtttgcagtgagccgagatcccaccacggcactccagcctgagcaacagaggaagtctctgtctcaaacaaacaaaaaagtgaccgttgctaggactggtttgcctgcagcaggagtgaagacaggtcaggtataagggaagacctctaggcaggaagaaactggggaactggggaaagttgttaaagacaaaatctccaaactaaggaacaggcaaactgtgttctgcatttttgcttaacagcttgagaaaatcactggtggctgcttatttaaaagtaagcaaggccaggtgcagtggctcttgctgtaatcccagcactttgggaggctgaggcaggaggatatcttgagaccaggggtttgagaccagcctgggcaacagggtgagaccccaccatctctacaaaaaattagccaggtgtggaggtgtgcacctgtagtcccagctactctggagactgagacaggagaatttttttttttttttttggagacagagtctcgctctgttgcccagactggagtgcaatggcacgatctcggctcactgcaacttccgcctcccaggttcaagtgattctcctgcctcagcctcctgagtagctggaattacaagtgtgacaagcacatgccatcacgcccagctagtttttgtatttttaatacagatggggttttaccatgttggtcaggctggtctcaaactcctgacctcatgatccgcccgtctcggcctcccaaagtgctgggattacaggcgtgagccaccgcactgggcctgagacaggagaatctcttgagcccaggagccagaggttgcagtgagccgaggtcaggcactccaacctaggcaacagaccaagactatgctcaaaaaaaaaaaacaaacaaaacaaaaagctgaatttgttactcgatgctctgctgtctgatttgtttgatcctgcatcatacttttgtgattaattgcagttaccaggcactactgttaggaaatgaaacattgttcttattaatagccacaagtggatctacatcactgacttttttttttttttttttggaaagggagtctcggagtctcactctgtcgcccaggctggaatgcagtggcgtgatcttggctcactgcagcctccacctcctgggttcaagcaattctcctgcctcagcctcctgagtaggcgggactacaggtgcgtgccaccacgtccagctaattttttgtattttagtagagacggggtttcatcatgttgcccaggctggtctcaaactcctcagatgaggcagtccacccgccttggcatcccaaagtgttaggattacaggcatgagccaccacacctggcctgacctcttgaatgcattgttttctgtttctgagatggactgtgag

SEQ ID NO: 585035 - DNA, 4001 bp, Homo sapiens
gtcttgcttgccccgcgggtcggagcgactgcagtgccgcctccggccggcagaggtcaacgtgcaagcgaggacggctggacagggccgcgactggagcccagcgggcgcgctcacctcggacaggctgaccgggagcccccagaatgcacaacaggcacacgagatgcaggcagcggcagccgctgggcatggtcagcgccggccccaggagggacggacggatggacggccggacgcgtggacacctgtgggacggcaccggttgggaggcggccggacgcggagatagcggcacggatacgggttccaagtgacaggagccgacgagggagaggggcgccgggacagaagaaggggatgggggtagcgggaggatgggggcagggaagggttgagcaggcgaagagagcgaggagagcgaagacaggaacccgggagcggggtctgcaaggaggggaaagatgggcatcgcggagcgaggccaggcgcgggaatggctggggttgggatcgtagtcaggacggaggggtccgcgggatggggacagcgccgagaggcggcctcgagcacggaggggacgcgggggccggagggaaggacggttcccggcagcgagcagtctccgccccacagctccgacagcccccccccccgccaccaccactctctcccacgtcccctttctatctccgccgcgctgggttcggcggcggcgcggggcctggaatccccaccgcgccctgtccccgcagtcctcacctccggcggggaggtggcgcgccccggggcgcagagagaggccggatccgacgggcgccgccgaggggccgtgagggagcgcggggccgcccctagctggccgcggggccgggcgccgaagcggctgccatgcgagccgagcgctcgggaatctggggctccaggcgaccccgagcggcggcagcggctgctcctcgcgcgcgctcaggccccctgccaggggcggagcccgcccccacccccatccccccccccgcgacgcacggcgcacacctagcacccggcgcgccccggggccccggccctccgcggctacccaacgccccgaacccagcttccttccaagagaggaggaaatcttaggagtctcaatgggagcaaactattaagccaaaggagcgcaaccccgttattctctcatctcccatgcccactttcccgaccagcgctccgcggcccacgccccagccctgccttcgcttgtccgccgctcatcacgcttctcatatagatctatgcacacgcaggcaatcgctccccgccctccgcctgtcaccagcccacgcctccccgcttgtaaagccttcatcacctgcttcatctgtgtgctcctctgctcctcctcgccctccgcttcttcctgtccacgttgccgtctccagccttccaagatcaacctatccctatataaatatcaacccgatccacccaaccacaccccggccctacccccaccacccttccctccctcaagtctcagcccttccaccccattcctttttgtgactgcctctgagaatcctttctggactgggaatgcccctgactctgtaaatgtgcacacaaaaccccctccaccgccaagtcttctcctgtaccccatcacgttcgtccttggcctcaggctaaacctcaactgcccaaacctggagctcagattcagagagtaacggagggggagtgggggaaagctgccctccaggcctctttgcccccttctggctaatggctcagagacacatttcaagacaaggacccagccaagctcggtgggctcacgcctataattccagcactttgggaggctgaggcgggcggatcacctgaggtcaggagttcgagaccagcctggccaacatggtgaaacccgtctctattaaaaatacagaaattagccaggcgtggtggtgcgcgcctgtaatcccagctactcggaaggctgaggcaggaaaatcgcttgaaaacccgggaggcagacgttgcagttagccaagatcgcgccactgcactccagcttgggggacagagcaaaactccgacccccgcccccccccaaaaaaagacaaggacccagaacataatttctagtttgtgcaggacaacagggcagaggtcaggaacgctagcgcccatctctagtccttcagattgagatttcaccatctttaaattcaaaacatcggaaggagcagtcgctagtcggggcagagcagcttcccaccttcacacagccacctccacaggcacagagccccagggctcatttttcctgcagtctccattggatataacacttacacccactcagctccctagctggcctcctctcagctgtgatcgcctcttccctgaagagctctctgaatttgagtaatgacatggctgtaccattcattttgtttaaacacatttttttttttggtgaaaaattgcaaacaacctataattcaaaaattactgtaggcaaataaattatggcacatcaacactatgtgactgttaaaaatacttttttttttttttgacgtctaaagatgtccaaaaaagctaagaatatgtaaagtgcggtggggggaagccggaaacaaagaagaacgtactttgacattggcagtgcttttctctggatgatcgaattatagaggtttttttttttttcttattaatacttttcagcattaacacttttttttttttttttttttttttttttgagacggagtctcgctttgtggcccaagctggagtgcagtggcgctatctcggctctctgcaagctccgcctcccaggttcacgccattctcctgcctcaacgtcccaagtagctgggactacaggcgcccaccaccccgcccggctaatttttttttgtatttttagtaaagacggggtttcaccatggtagccaggatggtcttgatttcctgacctcgtgatccgcccgcctcgacctcccaaagtgctgggattacaggcgtgagccaccgcgcccgcccctttttttttttttttaaacaatgaacatctataacttgttttttgttgttgtttgtttgtttttccttgagattatcactctgtcgcccaggctggagtgcagtagtgcaacctcagctcagtacaacctcgtctcagcctccagtatagctggaattgcaggcacagcgccaccacgcccagctaatttttttttctcgagactttcagtgcttttctctgtcagatatcattatctgacattatattaaatatttattgtttattgaccatctccccactacaaagcaaactccagaggtctgggatgttttcttgctcatcacagcatccccagtgtctaaaacaatgcctggcatagtaggtattcaataaatttttttaaaattctgtttgtttaattaactctttttttttttttttttttttgagacagggtctcgctctgtcacccaggctgaagtgcaatggctccatcttggctcactgcaacctccgcctcccgggttcaagcaattcttctgcctcagcctcccgagtagctgggattacaggcgcgcccccaccaagccaggctaatttttgtatttgtagtggagacagggtttcgccatgttggccaggctggtttacaactcctgacctcaggtcatctgcccgcttggcctcccaaagtgctgggatcacaggcgtgagccactgccctcggcctgcccagttaatttttgcattttcagtagagacggggtttcgccatgttggcccggctagtctcgaagtgaccccaagtggtccaccggccttggcctcccaaagtgctagggttacaggcatgagtcaccgtgcccagcctaacatttttttagaataaagtaaaaagaaaaaggccaggtgcggtggctcacgcctgtaatcccaacactttgggaggctgaggtgagaggatcatgaggtcaggaga

SEQ ID NO: 585036 - DNA, 4001 bp, Homo sapiens
tctacaaaaaatacaaaaaattacccgggcatggtggtgtgcatctgtaatccattattgaggaggctgaggcaggggaacttgaacacaagaggcagaggctgcagtgagctgagatcgcgccactgcactccagccttggcaacaaagcgagactctgtctcaaaaacaaaaaataaaaataaaaacaaaaaaggtcatcaggactatcctcccaccatgattccagggcaaacacttgacccatattttaaaagccctccaggggtgaagagtctcaaagacccccagccaattgaactacctgcctcatcaactcatttccttatgtccactttcctcctgctacagaatttgcccaatctcccagtgagtcaactactcaaactcatcaagaaagatcctctttcattgtaagtgtttctccccagcaactctccctgcagcatttcttttccaggctaaaccatttctctttccctttttcctttatctttccatttcctcatggcacccaatccccaagctctctcaagctttaggtctctctccctgtcaggagttcagacaatccctggatcagacttgggagattaaagaagtggggagataaaaactagaagaagcaagagaggtgaggtaaaggggaaagggggactggccagtcagccataggagtgatgaggcatgaagagtagagtctgaagcccctagacactgttgtgcacgtgaagggcttagaaatgggtaccaaagggtttgggggcacgtgctcaggacaggtacctgcaggagccgtcaggtgcacagcagccgtgggccaggtcacagtgggagctgcagtcatcggctgcaagagattgatgtgggaggggtgagtctgagtcagggcacagctcgctgggatgcgggactcaggagaggattggggttccagtaactgagcggactcaaccctagggcaggacataacacagaaactcatcccattccaaaaaggcaacctcggtcttgcttgccccgcgggtcggagcgactgcagtgccgcctccggccggcagaggtcaacgtgcaagcgaggacggctggacagggccgcgactggagcccagcgggcgcgctcacctcggacaggctgaccgggagcccccagaatgcacaacaggcacacgagatgcaggcagcggcagccgctgggcatggtcagcgccggccccaggagggacggacggatggacggccggacgcgtggacacctgtgggacggcaccggttgggaggcggccggacgcggagatagcggcacggatacgggttccaagtgacaggagccgacgagggagaggggcgccgggacagaagaaggggatgggggtagcgggaggatgggggcagggaagggttgagcaggcgaagagagcgaggagagcgaagacaggaacccgggagcggggtctgcaaggaggggaaagatgggcatcgcggagcgaggccaggcgcgggaatggctggggttgggatcgtagtcaggacggaggggtccgcgggatggggacagcgccgagaggcggcctcgagcacggaggggacgcgggggccggagggaaggacggttcccggcagcgagcagtctccgccccacagctccgacagcccccccccccgccaccaccactctctcccacgtcccctttctatctccgccgcgctgggttcggcggcggcgcggggcctggaatccccaccgcgccctgtccccgcagtcctcacctccggcggggaggtggcgcgccccggggcgcagagagaggccggatccgacgggcgccgccgaggggccgtgagggagcgcggggccgcccctagctggccgcggggccgggcgccgaagcggctgccatgcgagccgagcgctcgggaatctggggctccaggcgaccccgagcggcggcagcggctgctcctcgcgcgcgctcaggccccctgccaggggcggagcccgcccccacccccatccccccccccgcgacgcacggcgcacacctagcacccggcgcgccccggggccccggccctccgcggctacccaacgccccgaacccagcttccttccaagagaggaggaaatcttaggagtctcaatgggagcaaactattaagccaaaggagcgcaaccccgttattctctcatctcccatgcccactttcccgaccagcgctccgcggcccacgccccagccctgccttcgcttgtccgccgctcatcacgcttctcatatagatctatgcacacgcaggcaatcgctccccgccctccgcctgtcaccagcccacgcctccccgcttgtaaagccttcatcacctgcttcatctgtgtgctcctctgctcctcctcgccctccgcttcttcctgtccacgttgccgtctccagccttccaagatcaacctatccctatataaatatcaacccgatccacccaaccacaccccggccctacccccaccacccttccctccctcaagtctcagcccttccaccccattcctttttgtgactgcctctgagaatcctttctggactgggaatgcccctgactctgtaaatgtgcacacaaaaccccctccaccgccaagtcttctcctgtaccccatcacgttcgtccttggcctcaggctaaacctcaactgcccaaacctggagctcagattcagagagtaacggagggggagtgggggaaagctgccctccaggcctctttgcccccttctggctaatggctcagagacacatttcaagacaaggacccagccaagctcggtgggctcacgcctataattccagcactttgggaggctgaggcgggcggatcacctgaggtcaggagttcgagaccagcctggccaacatggtgaaacccgtctctattaaaaatacagaaattagccaggcgtggtggtgcgcgcctgtaatcccagctactcggaaggctgaggcaggaaaatcgcttgaaaacccgggaggcagacgttgcagttagccaagatcgcgccactgcactccagcttgggggacagagcaaaactccgacccccgcccccccccaaaaaaagacaaggacccagaacataatttctagtttgtgcaggacaacagggcagaggtcaggaacgctagcgcccatctctagtccttcagattgagatttcaccatctttaaattcaaaacatcggaaggagcagtcgctagtcggggcagagcagcttcccaccttcacacagccacctccacaggcacagagccccagggctcatttttcctgcagtctccattggatataacacttacacccactcagctccctagctggcctcctctcagctgtgatcgcctcttccctgaagagctctctgaatttgagtaatgacatggctgtaccattcattttgtttaaacacatttttttttttggtgaaaaattgcaaacaacctataattcaaaaattactgtaggcaaataaattatggcacatcaacactatgtgactgttaaaaatacttttttttttttttgacgtctaaagatgtccaaaaaagctaagaatatgtaaagtgcggtggggggaagccggaaacaaagaagaacgtactttgacattggcagtgcttttctctggatgatcgaattatagaggtttttttttttttcttattaatacttttcagcattaacacttttttttttttttttttttttttttttgagacggagtctcgctttgtggcccaagctggagtgcagtggcgctatctcggctctctgcaagctccgcctcccaggttcacgccattctcctgcctcaacgtcccaagtagctgggactacaggcgcccaccaccccgcccggctaatttttttttgtatttttagtaaagacggggtttcaccatggtagccaggatggtcttgatttcctgacctcgtgatccgcccgcctcga

SEQ ID NO: 585037 - DNA, 4001 bp, Homo sapiens
tgaactttctggggcacgtgcagaatgaaagctgtccgggtttggctgggggatgggtgggcaaagtccaatgctattaactggggaaagcagttttggggtttgggttttgtttttacctgttgcgaggtcatcaggagaatctgtgtggagagcttcaataatcagagagaaggtgccctgggagagaggggagaagacgttagacaacccagaaaggtaacgaaaagaaaacggcaaaaagcagtcattcctaacagccaggtcagcaacagaggcctgaaggctgcaggtctggggcagcgtgtctggagagggtctccacgcacctcctgcctgctctcaccttccctaaggaaatggaagaactttttaaagagtggtttcctgacgtgttttttcagcctgtactacaggatattacgttgtttttttaattagagagagagagagaatgcaggcaggatggggtggaagaggcccgagggcccttgtcatttttcttgggggatgggcacgctccgggtggtagcggtcgcgctgcgcgggtaatcgcgccaccaacgcgtctaggagtcgggaaaccagaaccttcccacgtgaaggggcgcctctgactggagacctggcacagaggccggatacggaaatctcccgggcgcgctcggcctctcctcctcgccccagcgcggtcccctcctgcaggccgcggggccccggggcgaggtgtccgcgctgctgggctggagtcctggggccgccgctaggcagatcgcagcgcccacctgcgcctcgcggggtccccgaggtcccgccaccgagcgcccaaggcgggatcccagcgcgtcctgcagcccgcccagcttcagggccggcccggcgcgcgcaggtgcggcactcaccggccaggtgaagccgaaggggaagcggatggggttgctgaacgcggagtcggcgcccccgccgtcgggcagactgaaggagtcgacgcccagcacgggggtgacggcgctgccgtaggtgcagggcggctcgggggacacgctggcctggtagtgcttgaggcacacgcggaagaaggtccggcaggcgcacggcggtggccccgcgcccccgcggcagcagttgcggttccccagcagccccttcttgttgacgaactcctgcagcttcagttcgaacaccccagagctccagacctgcacgggggagggcgggggcgtgaggacgcgggtcccgcccgagctagggggcgtgaggcctgggtggggggtgtgcggagagcctggaagggctcaggggccgagcgcgctcgctgcacggccggcgctggggtcgtcgcccccgggattcatcttccgggccgtggctggcgcggcccgtgccgctgtccgcccctccccgcgcgctcctgccccgcgccccggctacccgtgagaccccgcggggccgcggcgcccccacctgcccgcctacctgacacagcaaggccgagagcaccgccagggccagcgcgcaccgactgcccatgctgcttcgctccacgcgcgagcctggggggcccccacttctctccttagaacagcggcggacgcgcgggggatcgatgggccacggggagcgtgggcagaaaagcgcccttgcctcgccccagaccgcaggacccaggacttctttctttaaaagccggtctccgcctcttcccaaggccgcggttctttatatccgccctgcgaggtcccgcggcagccccagggatgcccgaggaaaggcagctctcgggggacagcgcggcggcggcgactttcgttttcctccttcctcccagcccccgaggaggtgagggtcgccggcttcctggttttgtcttgagcttcttcgcaggagagggagggggagaaagagaaagagagagagtccagagattgagcttaattcccaagagagctgcagagcttcctcccgagccgattagaaagccgcggtctggaaatcccacgggcaaggcgataatccggggccagcggcgcgcgctgaggggacggtcggcggcggcgggtgtgcgcggcggcccctgcggatcgcggcccggtgtcactcggcggcggcggtcgttccgggagcactccgggctccgatctccggtgtcacagcaaagatccgcgtctttccgatgaatccagccaatgccatccagtacacacgcgcaggaccggaggggccgggccgtgggaggaggctctgcgccgcggctgcccgggttcccctgcgctctgccctcggccgggtcgggtctccgcgggtgcgcgcagaggatctggctctcgccggcgcctgccgcccttatattcagccggccgcccgcatggctaatgagatgcaaatcagcagccccccaatctggcgagagctgtcacaaaggagccacttttccaaaccctcctctcaatggatcgccaaatggtcagtgagctgtaaaatgtgcaaccctcctccccgcccccacccttccccgcccccccagtcctcccctgcccccgcccccagcccccccttcctccctcaccacacaaaacgcactcatttacattcctgcaaaatgttcaccgcaagaatccccctgcttctggagctggtgccgccgccccgtcccctccgcacgccctcccgggccacagacgcccagagaccctcggccacacgcggggggcggcgctgcgggccccacttgagcggcgggacgcggcctccgaaactccgggccgcggcggcagccgaggggtctccttgcgccgacagcgtcccgggggcttggggagggcggctgcgagcaggaggacgaagttcgaggcccgagctcttggcggggccgccccttcttcggggcaggcgcttcctaaggaggagtctcttgggggcggaggcgggggtggcgattcggggagcatcgtaggaaaggggcgggcggagcggtgggccgagggctgccagagcgaagcggcagtttcgggaagtttggggaggtccgaggcggggacacctcctggcccaggacggcgactgagcctcggggagtgcagagccgacgcgcgggcggggccgggacgccccctgggacacccgcatccccgcgccttcggtgtcctctcgtggtccgcggccactgggagtaggggcccgggggccggacagcatatccccggagccaggagaacctggccttcaactccccccacagacacgcgccctcccccacaggatcctcggccgccgccaccttccccgggtctcggcccctctctcccgggtatccccctcggcctccctccgcctggtaagaagtgagtttggtgtgtgtcgttcgcgtggctgtcattaaggcagcctgttattgtgcgaggctgaatcagtggctctttgtgcgctcagctgtatggtaatgcagacagcacctgctccccgcacaatgcggagagaaagagctcccctccgcgcgcgccgcggcctctgcaacaatgtccggcgcatgttctaaagcccctccagccccggcccccaacccacaacctttacacaaccgtcaccttattaggtttttacacgtccatcagacactagaacttttgttttcattttttaaagggaaatgagtttattgggagggccgagaacacacgtatgacacaatgaattatctaaattgccctcctaggcacgatggagaagtaagttggggcagagactcctactctggcacctagctttgcacttctccctctctttaccatcccgcccgtggatccctgcccacccccaacacctccgtagcttcattagggttccaggtgagtgttggagtgccccctttgattgtagctcagccccaaggaagcagcctggccacagtgtcctcactgtaggtgtgttagagctgccttattggtgagaacagggcaccgtcaaggtagaacgagactttcatcccggcaaatgtcttgatc

SEQ ID NO: 585038 - DNA, 4001 bp, Homo sapiens
aaaaaataaataaataagacctgaaattccctacgaatctacccccaagcattcacattctgctgatgcaaagcacacagagtgaatgtggcatcaacacttgttcactttctctgggtccttctctccttcacagacaacttgctctgttgtgcaggctggagtacagtcatgtgagcacagctcattgcagtcctcacctcctgggctcaagcgatcctcctacctcagcctcccaagtagctaggactaaaggcgtacacaatcacacttggctgttcttttttggtttgggttttggtttttctgtagagatgggatctcactatgctgcccaggctggatgcaatcattttcaattcccaccatcccttcttaagttaaattttaaggattcagtgaacttctgcaaagtcaacaagaaatgcatcctggttattttcaggagcatttccaggtgttgaactcctcccctcctaggaatactacagtaagtgagcaagttgcatacctgtgtgctgggtacagccaattcaaccacacccttttctcttgcacccatttctgtaaccctatcccaaatgcattagttcattcagcaatattgaacgtcttctgcatgtctggccactgtggctacataaaagactaaggacttctccaaagcaaaatgcacaatcaaattggtgtgacagactattgaatacaacacaagatggtcaatgtcaatgacaggtgaattaacgaagggctaagagagcttagcaggcagcaaaacttctgaaaaacaaaaaaagaaagaaagaaaacttgacggagaaggtaccacccgagtcgggtctaaagaagagttgtcaggagaggatgggagagagaaacattataggcagaaggtgggaacagtggcgtacaaaagcagagaagcaaaaagaggcacaactatcttgggaaaagtggtaaattcagtgatgagacttttgggctagaggggaatgagaagggtagaggaacgggaaataagccggagggagaggcattttttttgttttatttttgaatttttaaaaatatataggtatatggccgggcgtggtggctcatgcctgtaatcccagcactttgggaggccgaggtgggcggatcacaaggtcaggagatcgagaccatcttggctaacactgtgaaaccccgtctccactgaaaataccaaaaaaaattagccgggcgtgatggcgggtgcctgtagccccagctactcgggaggctgaggcaggagaatggcttgaaccagggaggcagaaattgcagtgagccgagatcgcaccactgcactccagcctgggcggcagagtgagactccgtctcaaaaaaaaaaaaaaaatatatatatatatatatatatatatatatatatatttatttatttatttatttattttaatagcttttcgggtacaggtggtttttttacatggatgcattggatagtggtgaagtctgagacttcagggtcatccaggtagcatacattgcaagcgatatgtagttgtttcatccctcacccccctcccacccttccccttctgagtctccgaagtccactatacccctctggatgcctttgcgtagcaatagcttagctcctactcataggtgagaacgtgcggtatttggttttctagtctcaaaacggggagtgggtgtgaagtcacttagatgtccagtgtagagactgacaaagggtagtgactcagctggggttttgaagcaggggttccctgggttcaactaacagaggtggaggactgaactgtagcgtggattccagtcccctaaaaagaaggaaagtgggcggggaacccggctgcatcagggcctcccggacaggggccgggcgctcacagcgcgctccgaccaagtactcaccagccgctctctgggccccgatgccccgaccactcagcccactgaggccggccccagcggttgcgctgccccgggggagctgctccggcctccgcggcccggaacgaggctgacggttgggagtccgagacaggctcgctcgggggcgagggctccgcagtgcgcagctccctacggggagcgactggaggggcacgggcagcccccgcgctccccaataaaggatgcacccaccgagcccgaggactgaaacattgtttaggggaccccaggcactgaagggcgggttcctggagatggacatttggagtgcggtgccaggggcttgggaggattcccgcgtatacgtggtaatacggaaatatataaaataatgttttctatgacctttacagtttctgaagttacttagtgttttccttgagaacctaaaaagtgtttcctggtgagtcagtgtgttcagaaacctgtgactgatgagagagaaagattctgggggaaaactgacttctctcccaagtccaccccctcccctctctagtacggttctgcttttgctgtgactgcctgacatgatgtgagcggtccgtttttagttgggtgtgttaaccaaagaaaaaaaaatcagtcatttaaataattaatattagttttattcagatgtcttactaaggattgcaatccggagagtctttcagagactttctgtgagactgctccaaagcttaggtacaggtggtggcatgtgatgggaagtggcatcagatgtgctcagcagttacatcaaatgagctcagcagttacattagagcaaaatctcatcaagggtggggttcaagggtacatctggttatagattgtagaggcataatcattaatcctatcagctattatcttattatgtacaggaagaggcatgagttaggatcctggaacttttgcaagaaaagattcatgcaagagatgttatcatcttcaggggcattcttccaggggctgcacttagtcactgagttaggggatttgtgaaatgtagctgccaaagaattctctgacattctgctggcaagcagaatgagcaaatatagcttcttacataaactattttgtcttacaggtgtgaaagtcagtctttgaatgtagagcagatcaatgtggaatgaggactgaaaggtctgtcaactgaaaaaaaaaacaagaatgaatataaaaaatcacaaattaaataaaccatggtccatccatattaatagacattactcagtgattatacaatataagcttatgggagcaagggagttcctgaatatccttgctgactgtgccgaaatgcaagacctacctaccctctaactctgagccacttccttaaccaatctttaggcaactcagcaggccacagcaaccacggcacgaaaaggcacaattgctcacttcctggggagagggactagcttgtttactgctcgatacaaaagatactgagcacttagccctagattctttacctgcctcccagtccactgcctgcatctgggtccacggggttgcccattgggacttggggttgggggaaccggcctcccatatgatactcctgccatttgttgaggtagtgttgaggacaagtgctctacctcttgtccatcgaatctcattgtttacttttggcactgatggagctggggcaggttttatacttgccttcttttcctgtccctatgctgtctctctattctcatgtagtaagaaacaaaccagaataccatattccttaataaagagccttaaatatattcattcatatgccttaacctacaaatgcctcttttgaaaatatattcctaagaaataatactaaatatggacagagctttggttctaaagacatgtgttgctgtattaggtttgtagcaccgtgatccatgcaatagtttcattaactctggcagaaaactagcttcatggaatactgccaaatgatagcaaccctgagaatgcctgagatacaggaaaactgtaccttccacagagttctcttgaggcttaacagaaggtaaaccccatgcagcact

SEQ ID NO: 585039 - DNA, 4001 bp, Homo sapiens
tttaacaggctccctcagatgacactaaagacctggagagccaccaggcagtctggatataccatgaactaatgagctgtaagcttcagggtcctccacttgcacaggccctttccaaaccatcagcaactttgtattgtgatttttgtctttttaaagaggtctcccagaattgcatgaggtcccacaaattgtgggtctgctcttgggtaggataagtggaaaccacttaaggttttctgagcagaagcacaagcattcaagatacaattttcaaactggaaggatctgcaagattccagaccagcacatcaaatatgctttagagaaatccagccagactcagcggctcatgtctgtaatcccaacactttgggaggctgaggcaggcagatcacttgggctcaggagttcaagaccagcctggccaacatggcaaaatcccgtccctataaaaaatacaaaacttaaccaggtatggcggcacacacctgtagtcccagctacttgggaggctgaggtgggaggattgctcaagcccgggaggcagaggttagcagtgagctgagattttgccactgcactccagcatgggtaatagaacaagactgtttccaaataaataactaaataaatagaaagagaaagaaaaacccagcagccaggagcagaacacaataatggcctgaaagagaatatgaggccagcatgggggctcacatctatagtcccagcacttcgggaggcctgaggcgggaggatcacttgaggctaggaggtcgggaccagactgggcaacatagtgagactcccaatctctacagaaaaattttgagccaggcatggtgtcgtgcccctgcagtccttgctaataggaggctgaggctggaggatcatgagtttaggaagccgaggctgcagtgagctatgatcgcaccactgcactccagcctgggcgacagagaggcccttgtatcaacaaaacaaaaatgtgagagagggtaatagtgagaactggggtcagccaggtctaaaagagtgctgatgtcttcacagaaaaaggggaggcaggccctgggcggtggctcctgtctgtaatcccagcactttgggaggccgaggcgggcagatcacctgaggtcaggagttcgaaaccagcctgaccaatatggtgaaacaccgtctctactaaaaatacaaaaagtagccgggtgtggtgacgcgtgcctgtagtcccagctactcgggaggctgaggcaagagaatcacttgaacccgggaggtcgaggttgcagtgagccgagatcacgcaactgcactccagcctgggcgacagagtgagattccgtttcaaaaacaaaacaaaacaaaacaaaaaaagttggtggggaggcaggaggatacctttcgtgttgggtggtggaaaagattccagcgggtgaggtgggaactgagcccaagcaaagcagcccaatctaccttctttctgttgcaccctacaaacgctctgaaagcagctgaagacagagttctccaagaaggaaccaaaggtcaagataatgctgagtctgccttacacccgcaggcttgctgggacccacgcagcccgagccccggcccgtttccttctcgggctggggcgctggatggagcaccggggtaggagggcgggctccgggcgccgggagcgcagctgccgggggtcgggggggcggacaggccgggtccctgccaccccagccaggtccgcgcccgcgtccccgcgtcccgcggccccagggcctcaccgcgcgcgcccagctcggcggccgccacgtgctcggtgagcactgtcccgaatcgccgcagccgagacacgatccgctcgtacagcgtcctgtcctcgcgtccgccgcgaatgctcccgcagaagtacagggccgggcggccaggctccccgcgctcccagctctcgctgcgccccggcaccatggcagcagccattccccagccgcccgcgctctccggcgccagggggcgccagcccgcggccacgtgaccccgcccggcccagcgcagagcccggctgctgagtccacacctgtggaatggggacgacgaactgggaggatccagccgggaccctttcgggaacacacccttcctggacttgacgttcggatgcctaacacgcaccttaacttgaccttgtccaggcagaactcgagggcttccccacctcacccgcttctgctcccctcctccccgccgtcttccccagctgcatcctcccagctgctcaggcccaagaccctcggagtcatctggatcgttccctttctctcaaactctgcgtcccatccattgacaactcgtgtggattcgtccttccaaatctgaaatctcacgaccgcctacagggccaccaccctggtctaagcctcctctgggctctccacagcctcctaacaggtgtccacatgtcgtgagctgctcaaggtcagacagaaccaggtccacccacctttgtgtctgtccacaagatcaggtttttactgatgctatttcaatcacaaaagctaggcgtcacacggagttcccaagaagtcagttctccttaggaccacctgttcactcggtagtcagagccgcgggcatgcaagctggagccactccacaagtcagactgtattgcaaaccatccatagtattatatgtaaggatataaatgttacaggttaaaatttcacatcaaacacaagaacatttaacatcaagagaaaaggggttaacgaaccagtccaaggagagtgctgtggacagagtcccggcctgatggggatagtcatcaagagcttgcaaggaagagtccttgatttgggcagagccttcagaggcagacaccaggtgctgggcacgagtgatagcaagactcggtctgttaaggtggccgtgtctagctgctgaagtcctgatcattttatggtccttgagtcctctgatgaggacttatagtaaagggtgatgcccttatctggttgggtgttgtctccattggttaggcgaacatctggaccctgttggcttgatgccttttgaaatgtaagatgaagttttttaaaactttatttatttatttatttattatttttggtgacaaggtccctgtcgcccacactggagtgcagaggcacgatcattgctcactgcagcctcaaactcgtgcctcaagtttgagggttcaaggaatcctcccacctcagcttcctgagtagctaggactacaggcacgtgccaccatgctgagctaataaaaaaaaaattggctgggctcggtggctcatgtctgtaatcccagcactttgggaggccgaggtgggcagatcacgaggtcaggagatcgagaccatcctggctaacgcggtgaaaccccgtctctactaaaaatacaaaaagttagccaggcgtggtggcacactcctgtagtcccagctactccagaggctgaggctggagaatcgcttgaacccgggaggcagaggttgcagtgagccaagatcacgccactgcactccagcctaggcaacagagtgaaactccatctcaaaaaaaaaaaaattgtagagacgaggtctcactatgtttccacggctggtctcaaaactcctagacccaagcaatccccctacctcagcctcccaaagcgctgggattacaggcataagcgaatgtgcccagtgatggagtctttctaagatggaattacttatgtcaagggttctctatacacctcccctggcccttccctgctacagtttgctctccactcagcagcttgagtgatctaggtcatgaccctcctctgctcaaaaccctccagtggttcccatctcacttggggtaaaaactgaaaacctcacagtagctcacaaggctccagatgatcctgtcaccctcttacttccctaactccagcttctattactttcattcacttctctgccacctcactggcttcctgg

SEQ ID NO: 585040 - DNA, 4001 bp, Homo sapiens
tgggaacttaagtgtatcattaatattttactaagaaaaatataattttttttatacaagtgagttgccactagatcttcatgctccaaaaagtttaaaatgacagccaaaaaataagcctaatgcatggacctttacagttgaagaggactcagcttaagtacagcagtttttaaatttatattctatgtaattatattctaagagttgttaaccatttggccatgagaaaatagatcaggtaaatttgggaatgctaggataaccttctggagatttacatgtatcagcataacagtaaaggttttgaagagtcctgcctttataagcaaaaaagttaaacctagtttaacctagtgtgctcccaaattatttgccattgaacactgctttggggaaagtaagcctattaaatggttttagaacactgttctgggggaaacatcagtttggaaaaccctggtcttttcaaatttccttaaacaatgacaaaaccgaagcctggagatcacacctggttagtagcagattaaagcacttgaatctaatctcttcattcccaggccagagctcactcctttactttaactacaaaataggacttctttgaatgtatacaaacatttaactgacaacacttaccttacatttaagatttgggttatggtgtcacattttctggtttgtgtattaaatcaggtgtttttagttccttcagcactaggtacctaataatcaagcccacgtggagatttgctactgcttaacaattacagagaatgatttagttatcagttgtggccgaaagtaatcactaaaataaagcatttagactactcgtggttttaatttactcataacttcagtcggcccacctaaatcactgtgttatctatcaggtggtgagttacttagcacataatgccgacgtatgttattcactgtagaccatattaatacccacaaacaaaattaaaatgtgagaacttatgtctgcatagacaatggccaacaacatcaaaacagatttttctctctctacagttcagggcctatttgtcaggcaaacagtttcctacatttttggtaattatcattttttttgactgctttagctggagtcgaagtcattttcccaatctttacatttctcaaacgccatagaactctaagatagtgtaaaaatgttcaaacacaatttacttagcttaagaaaaatagttgtgtgccattccccgcccccctcagggtacaggaatggaggaggcccgaacaagtgactattgttatgttgcaactttaaaaggcttaggaatcaaaggtgataattgttaacaacacccgtttgactcttctgacttcctcttaataaacttcggtactcctttctaagccccacggagaacatgaaccatcgcgggcctacgtgtctcctcaatgctaaaagaacccaccagccgagaaggcacaacgcctcgattccttcaacaaagagggtactccgcacgcctccatcgcacaggtgcgacctctgccccagccttgcgcaccgctccgccccagcaggggaggctcgggacctgtccccggctccccggccccgcctccggcctccctcacctggggccgccctcgcgcctctgcccggcccaggccccggccccagccctggccctccagtccccgcgcagctcccgactccccgtaaaccagagggcggccgaccagcttcgcagctcctggcggggccggagcggcaacacccccgacgccacagcagtcagactcgcaaggcgtccccgcggctcaggacctagccgggccgagaaggatgctcggagccggctaccagcctagcggccgcactgggggcagggacgcttttacctgctgctggctcggccgcttctcgccggcgcagctctcctggcaaccacggcagctacaccgagaccgggagccgaagggcctagtgacagctcccagagtgcaccgtgctcgcgcccacgccggcgtcgacgtctgaggccttcgatccccgcccccgatcggcttcctgcctcccggcgctagctgttgccacagcgccctcaagtggactgtcgcgggaagcggccatggctaccaatttcaggagtggctagaaagggggttagcagatgttttcatttgaagagataataggaactgaaaacagcttttaaatattatttgaatagtttctcaatatttcatatgagtaacctgcatcccagagaggttaggagacttgtgaagttaggagacaagtagttggtgtcagatttggaactattttgagtctagagctctatcaatcatatctagttactccaaggtaaattgcaccgttttgccaacaccataccgtaaaaaaatgaaagtttttacaaatacgtaactaaatatataaaaatcttttaagctaacaaaacaattataaagagtaagttgtgctacggaagttgtatatttcaatataatgtgtcaatatttaagcattcaatagcctcgggtactaaaggtggaagatatgaagagttgaaatcatcatccttcaaatagatgaattatttgagaccaaataatagtaaactttatttttttaagtgagttgttgcttccatctataacttcaaattattgtgatagatataataatttgtgcatcaacataataaactttaatcaccccaaatactgattttagaaaaattgtcaagctattatcttaaaatatatgacaggatttatttatttagaatttatttatggtttaggctgggcatggtggctcacacctgtaatctcagcactttgggaggccaaggtgggcggatctaccaaaaacagaaaaattagccgggcatggtggcgcgtgcgcctgtaatcccagctactcgggaggctgaagcaggagaatcgcttgaacccaggaggcagaggttgcagtgagccgagatcgcgccactgcactccagccttggcgacagagcgagactccgaaaaaaaataaataaataaaagcagctccttgtttttaagaagccctattgtaattctacccggtcttatattttaatagttcttcattataagtatttacattataccaggttctttactgtgtcaaacttttcaaaactatcttctggtagtaaacttctccaacttctcttagtttttacttttgtgaaagtgaatagtggagctgtacatacgtaatcattctcatcttccttttttaccccctaaaaaatggttagtcctgatagacttcagccacactcttctgcattaggtaacaaagaacttccttatatttttgcacctgtttcaattttggagctatcctgtctaagttgagaagcaatggcaagtcaattcttgaaaattttgtcgctttagatagaggctaacaaacgacccttgttcataaagagaccaagataaagtgggtttggggccgggaattctgttcttgcatctcctggggacaaagcccacctgtaacacttgcctccatcatctccctcccttcgagctagccaaaggtgtgaaccctgggtctgatttttatggtcatttccagggatgctaacgcgccaagtcacgctcataagaagcagagtggggcgatagctagcctctcgccgcccacctttctcagcactctgggccaaagcctggttttgaaaatgcgcgccccgccccggcctccggggtcacgcgccttctcggtggtgcactctccggccggcaggtggcgctgtgagctggtaggcggcgccagccctgcgatctggcacaggcgcctgcgccgcagcggggctgccgctggttggtccgcacgtggaacctctcctggtcctgttgacccgggcccctcggaacctccagcttggtccggtctgggactggaagcctgccatggcggcttctgcggcggagacgcgcgtgtttctggaggtgcggggacagct

SEQ ID NO: 585041 - DNA, 4001 bp, Homo sapiens
aagccctccccacctgtaacccactcactcttgtcttcaaaatctgcagaatgggagcagccagctccccttgtcctccccacccctccctccatgccgcccagccacgcctatctcctctccgagaccacgcccacatggccccatcggaatctcaggaattcagatctccgccctgaagcaaatctcagagcgactgtgtatggagtggattcccttccgccccctgcaggttcctcttccttaagctgcaagatggaaggaggagagagcagccagtggacaatccgcctgagaggaaggggaaggaaaggcgggagagatggggccgggaggtgttgggcagctgtggtacctctgtctccagaccctcaaggtaggggagacagacatcaagtcagggcacagacaggacgcactgctgagacctttcagaggcagctcaaagattcctcagtcatcgccattcaccacccacctgcccctgcctccacccctggcctcaacctgactgtgctcagggaaggggcactgcctctaatatcaccctgtggatggctctgtccttggatgactgtccagtgggtagatagtgtctctgaatctgctgttctacatctgccttgtggagaccctcctccaaattgcccaggccctccacaccgcccctgtgttcagcatctctgctccccgggttcagtagcagtccgtttcttgactaagtgaactaatttcataatttcatcttatctttagggtatgttttgttcgtcgaacttgtccatagtcattttcccatcaaagtcctgagatgtttcccaactgtaagacagggacagagcctttgacgcacacttttctgagtctccatgtggattaaatgagtaaatgtggatgaagtccctagagcaacacctggtgcagtgtaaatgctctgtaggcatcaaatactggtacggctgggcagcagcatccagcccattttacagatggtgtggaaggccagagtaggcaaatgggtcagagtcaggactggaagctaggtctgcacaaaacagagctctcaggagagaagctccacctgtccccccagggctgggggcagtggagctggaatccctgcttacctccctctagctgtgagatatgggacataatcattgtgaatccactctcctcaactataagatgggatattattagccacctcaggggatgctgagatgaaatgagatgagtctctgggcacggtggctctcacttgtaataccagcactttgggaggccgaggcaggcggatcacttgaggccaggcatttgagaccagcctggccaacatggtgaaatcctgtctctactaaaaatacaaaaaaatgagccaggcgtggtggcaggtgcctgtaatcccagttacccaggagactgaggcagaagaatcgcttgaacccgggaggcagaggctgcagtgagccaagattgtgccactgcactccagcctaggcaacagagcaagactccttctcaaaaaaaaaaaaaaaaaaaagaagaagaagaagaagaagaagaaagaaatcaccatgagcagctgtgaattccgtgcacggtgctcaatgaatgtcaggtgcctacccccaccatccagggctggcagcctctacagtgtctttatgcaaacttgaagaaaccccctctggatgggtgcagccctgtgagccatgttttaaagagcagagcacaggctggatttcatctcctactacatgtcccttagccagcaaacttgagcagagaacactctagacaactgtctgtagcagccccgtgcccgcccccttcattcatttctatttgttgtccaacgctatgaacactaagaaacaagctgtttctgtcttctgtatcccctgtgggcatcttacctgccccccaagaagctagaaggaagaggaggcagcactggaggccaaaggcggagcagaggctgtggaccggctgggccatgtcggagctgggtggctgcttggggaccatgggctgcggacccctcaccttatatggagccaatcttgacgtcatgggggctggggctcctcaggactaagtcttaaacaaatggagccaccccaacccacaggggagccctgataagaggagaccgcagctgctgcgtcatggagccaggcacctgggtgcctgccgaggggtgggatctgggggcagggcagaggaaccagaaaggagcaggcacctgagccagccccagtggagggaagtgagggtggcgcctccagggctctggggaagtggggagcagatggctcagttctagaaggactgagctctggctgggagcaggatggggtggggttcacgttctgatctgtgtccagcttcacgcgcaccctcccacctctcccgcatcagcccagcttccacaccccttattcacacatggtcattcttgccaccttgggcggagctgtccgcgaggatcaggtgaaagagcaaaggcgagagaaagccctcgaatgaccctcgctgcagagaaaggtgcttcatgatgttcagaggtcatacaacaatatgtggagagtgcagaggcagtgacagagacaagacacagaaccacagggacatatgtcacacccctcaccagggacacagacaggtcaggccacccagaaggaccgaggccaagatctttggccaagagatgctcggtgtacaggggcttctgctttcactctacctcttccctcccacctcagctcagcggctgtctctttgtctcgaagtccccattcactcctatacagaaatgcagacatctcatttttaggagcaccccagagctcccccttcccttcctcacttcctgcctaaagcaagcattagctcagagactcccttgtctccccagtgacagtgcctggggctggagtaggggaggacagactccctgggtctctagcacagagaagtcacaacccctttctgcccactgtgggtctccatggaaagtaagcaccttggatccctgctgtgtcatcagagcctaggacagtgtctggcacacagtaggcaatcaataaatgtttccactccgcctggatggagtggaagccagggccggaggatgcctttctgagggaagtgggggcaggcaaaggccatagagaggtccaggacctgagggcaggaggccaggccctcagggcatttgggctcatgagaggactagagaactggacatgtgggttcctctccttacttggtgtgacttgtccctaagccctgggcagggctggaataggtgggaagaggagaggaggccaactgcttattaatgtgattaatgggagattaatgaggctccgtggagtcaggccaaagactgactactcagaactgggcagcctgcctcccaggcaatatatcctgcaggatggagaaactaaggcagacacaggctgtcctctgcaactccatgtagactcgggtgactgacagtcccccttttcactggtccccttccccccccccctttccccagggacccaagcctctaggacggtggttctgtacagggaggagtaattttgcccacatcagggaacatttggaaatttctggagacatttttgtcacaatttggagtgggatgctactggcatctagggggtagaggccagagatgctgtgggacatcctataatgcccagagcagtctccacagcaaagaattatccagcccaggacaccaattgtgctgaagtggaggatctctgctttagaataagcactaaccagtgtttgtgaatgaacacccccttcccttctctctgagctacaactccaccccaaggacgctgatgtctgggatggagaaacctggaggtaggtggaggcccaaaacagtctcttacagtcagtctatgttgcttcatctgagctggaggctgagaggccagtcacgaaacaactctgccaactaccattgt

SEQ ID NO: 585042 - DNA, 4001 bp, Homo sapiens
aatcaatgtccctgccttgttggggtttaaatcttaggagtagagaggaggaaaatgaccagttaacactatcggtcgagtttataaatgccataaagaaaaaataaagcaggttaagcagactgtagaggagaggatctcccctgagtatggaccacctgggagaagagagcaaaaccctttgaaaatctgagattttggccagtcacggtggctcacacctgtaatcccagctactcacccataatcccagctactcacccataatcccagctactcgggaggctgaggcaggagaattgcttgaaaggggtgggggcgggggaggggggtcgaggaggttgcagtgagccaagatcgctccattgcactccagcctgggtgacaagagaaaaactcgtctccaaaaaaaaaaagaaaagaaaagaaaacaaacaaaaaacacacacaaaacatgctacactaacaatggttctgacttcccatatttttgttggacacatttgcttttcagcttatatacaaaatgtcaacctattatagggttgttttcaagtgagtccaggtcacttgagacaatcatcacatctcccataggtttttagttcagtgctgcatctcaggaccctggctcctccaccctttttgacactagccaagtgtgcctttggaccctcattttgtctttggaggatttcaattaagggttaagctcagggccacacttcagctgtgcttcagagatatttaaggtagtacctacaatccatcaaccacactgaactatcaacttatttaaaactttattgttatttttaaaaatgggaaaaaagaaaaaacactttttattaacaatcatcaaagaaatattcacaacaagactcagagccaagggttttcccttaactctttaagggaacaaatggttttcccttaactctttaggctggagcagattttaaaacaagcttaaggaatcactctagctctggccacaacctaatctctgcaacccggcttcattgcattggctggaaactggttcacttcatccaagggcctagttcgagggcattcatggcttcggcaagtttgagcatccctgcaccagaaatagcaacagcggcgtgagtctgggggaaaatagtaagcgcccggactgttctccgcctctttcagggttcgtttctgggacttctgatccaggcgttctgggcctgagagtcaggcccagaaccttggaacccgagactactcggcccattcgaacattctccaagaaactgaagggggcggggagacggttgagatagctcagataaccctgcccagtgggtccagcaccagccgcctttcaccatagtctcacccctgggtctccaagaccgacggccggcattctggggcccccattcccaaaggggtcttgggaaggcccagatgccaagggcacccctggtgacgcccaaggtgctggcagcgagcaagagaggagaaagaggagagggctggaggagaggcgcgaagcggcccccgcgagcctgtgttccgcgtacccagtctctgggcctctcacctcgctcctggcgctggcggtgccactcagccatggactggagcatccacttggtccggagcttgtacaaataggagccgtaaaccacgacctcggtgaggtctgaagactccagagccttcagctcgagcatggccttgctcacctgctcgatgtaagggattcgagatccgtccgggcctgttggggaaaagagatgagatccccgggccggctgagactcccgagccggggcagcccgccagtactgggcacactcaccgaaaatggctttcagcagccgcgtctggacctggaacacctctggatctttcaggtcttcgggaactttcacccacggcgggatatgtctacgtgccgggagagttcccatcttatgaccctcacaaccaagaccactctccagcgcaaaccaggcctaatcacgccggccgaggctcaggggcgataaagcctcgcacctggtggccccgcccccggccaggccccgcccccggcccgggccaggaccctgagtccatgccccgccgccctggctgcggtccagcaggttgccaactcttccgcttcccgcgacttcgggagagcctcacccgggcccagctgtctccaagttaactagggtttccacctgcattgacctgtgtctttcgcaccagaatcccatgggcttgggaatggctgggggcaaggtgctcttgcctcttcctctagggaacaaccggtgggacctgaacctcggaaagcgggcgtccaggcttgagggtgcgaggaccacccagtagctgccgaatcgagttcctgcctcacacgttccaaagaagggtccgtatcccctcggccttaaggagcaggacccgcggctccactttgctggcgacccggacaacgtcccgggaactctggaggaactcttgccattgaacaaaagagaaaaccgaaattcggaaactgattatcttacctaaagggattagcgttcttcgaagcccctggctctagagtctttgaacctacccggattataaagctcacctgtgccctgcctgcgcactccagccaaaaccggtccaggcttctggctcctctgtaaataaatttggtttattcgttttttaaacatagtgtttggagcgatgcactggagtcactcgatgagagtgtgatttcactgttttatggctttacagatggtgattaagctggcatttccagtcctggtaacatctaatgtcccctcagctgtccattattgagggtttcttaaggcagacctcttcacacacacacgcacgcacacacacacacacgcacgcacacacacacacaatgggttcttttgcaaccaccagtgtagttaatttagaaaatgatcatcaatagctaaaactatcagatgaagactgttgaggaactagatagtcacaagtttggaagccctaggcacagattatgaattgcaaaggagaaaaaaacattcctttacagtagagacttggaagaagccaccttgacccaagttagcatcaccaataatgggacaaatggatttctggttcaatatctgaaaaacaaaaagaggactgttttattaattgactaagacactaaatgctgtgtgcatagttcaaataattctgaatcaaagatgggggatgcatttcaggacaatgaaggaaattttaatatgccctatatttcaaagtagtattagaaacttctaaagtttagaacttctagagtgggataagtgtactacagttatgtaagataaggtcattattctcaggagaaacatgctaaagtatgtagagtgaattgggtttctttgtttttatttttattattttttaaattaaatttaaattttttgagacagagtctcactctattgctcaggctggagtgcagtggcgcgatctctgctcactgcaacctccacctcccgggttcaagcggttctgcttcagcctccccagtagctgggattacaggtgccagctaccatgcccggctaatttttgtatttttagtagagacagggtttcatcatgttgaccaggctggtctcgaactcgaactcctgacctcaagtgatctgcccacctcggccccccaaactgctgggattacaggcatgagccaccacacctggccaaataatcaaatatatatatatggagtcttgctctgtcacccaggctggagtacagggcacaatcttagctcactgcaacctctgcctcccgggttcaaacaattctcctgcttcagcttcctgagtagctgggattacaggcaccccccaccacattggctaatttttgtatttttagtagagatggagttgcaccatgttggccaggctggtctcgaactcctgacctcctgatctgcctgcctcagcctcccaaagtgctgggat

SEQ ID NO: 585043 - DNA, 4001 bp, Homo sapiens
tgactttttcagaaaggagagaattggaaatacagtgctggtagtccgaggctttgatatgtaaactcacctaaatatgctggtcttttcagagttcgtttgtcatacagtgtgaccacacaaacttaaattatttgtaaaataaaattgttttctctgtgtttttcctatccttttagagcctttgaaacatatatagaaattcattctcctgagtaggaaactgttactatatagaatagagcagccctctggtttgccagtggcagataggaaggagagcagagtgacaacccatatgccccttacttctcttccgcaaggagcaagttgcaagcaagagaaactgttttctgctcatttgctcctttatttaacattttaataatctatgggatactgtgtaaggtagtgtgctaggcactcgataaacagagggaaacgaaaccatgatcatgtcctcttgcagtttacagtctcctcagatatcgtttgtggtatgtttaggctttaattttgtctttctgtgcatttgcctaagtatatttctggtcttgatattgaaagacagattcaagctgtaatacatcacagctgttgggcaggaactcacgggaagccatgagcaaggtagaaggggctgctattagaaacaacttgaggcacccatagatgcaaccaaaccttaatccaaggtgtattcatttcatattgcttctgtaacaaattaccacaaatttaatagcttaaaatgcacaaatttattttcttatagtgctggagtttagaggtaataacctcaaggtgttgtcattcctttggaggctctaggattgaatctatttccttacctttcaagcttctagaggctgcctttattcctacgatcctggctccttcctccatcttcaaagccagcaacatagcgatttccctttcctccctcccacacctattctccaccattccttccctctctctgtgctttcgtcctcttatcttctctgactgaccctcctgcctccttcttataagaaatttgtaattccatagggcccacctgtataatccagaatcatcttctcatctccaaatctttaacttaatcatatctgcgaagtccctttggccgcataactaagacaggtacatctttgagggccatcaggctactaccacacaaagcaaattaagtagaaaataacgtttgcctcttttataccttgagtccaccagctgcatgttgccctttgcaagtttgttttctacttcaaggccatcttagttgtccattttaactagcctttcctcacaaaatggtggtatgtggctccccccactgatatttctctgaggccttgtagctctctaagacagcaccagtttaactcacaagtcaacaaactggaacacttcaaccagagacattgacatccccctctaatgaactcagctgattgctaaagacagatgcttcgttagagccaaacattcctatcttacataactaaatatgataataaattaagttcttggggctggaaatagttataatttcctctttcttgcagtgaaaaggcatggaacatttagcaaactgatcctggcttaatttctaccgatactatgcagcacaaactcttatttgatgcagattataaatcgaaaattagcaatgaatactatgcatcgctttagtggtaagaggctgctgagtagctttttttccccagtaaccgtagaggcaagaattgatatttttatgtcacttttactaagaaggggggaaacattttgctattaatcttaaagagaagtcttttgctgctagttacgtggagtaacagggaatagatttaccttcctgcctcaaaaaagtgaagaccagaaaaacatttgttttcagacactggagagcaggcactgttacggctgtgattttacaactgctcctacatgctgggagcagtcgctagatgcatctcaaggtgggtcgtccgcgcttccagactcagcacaatcgacatttatttacgtaggtaaaattactgttgctatgggtaaattcacagaaataaagcccagagaatccggttggctggcagggagcggcggaaccaatcccgggctcagcaagttctcgcgataccgtgagatctccagtcctgacgacaccgccgctgaaatgttagtgagactgtagggtgggcggtgcgagcggcggttagctcccagttcggcctctgaggaaaacgggcgttcgcctgcggttggtccgactgttagcaacatgagcggcctggatggggtcaagaggaccactcccctccaaacccacagcatcattatttctgaccaagtcccgagcgaccaggacgcacaccagtacctgaggctccgcgaccaaagcgaggcgacacaggtgatggcggagccgggtgagggaggctcggagaccgtcgcgctcccgcctccaccgccttcagaggaggggggcgtaccccaggatgccgcgggccgtggcggtactccccagatccgagttgttgggggtcgcggtcatgtggcgatcaaagccgggcaggaagagggccagcctcccgccgaaggcctggcagccgcttctgtggtgatggcagccgaccgcagcctgaaaaagggcgttcagggtggagagaaggccctagaaatctgtggcgcccagagatccgcgtctgagctgacggcgggggcggaggctgaggcggaggaggtgaagacaggaaagtgcgccaccgtctcagcagccgtggctgagagggagagcgctgaggtggtgaaggaaggcctggcggagaaggaggtaatggaggagcagatggaggtagaggagcagccgccagaaggtgaagaaatagaagtggcggaggaggatagattggaggaggaggcgagggaggaagaagggccctggcctttgcatgaggctctccgcatggaccctctggaggccatccagctggaactggacactgtgaatgctcaggccgacagggccttccaacagctggagcacaagtttgggcggatgcgtcgacactacctggagcggaggaactacatcattcagaatatcccgggcttctggatgactgcttttcgaaaccacccccagttgtccgccatgattaggggccaagatgcagagatgttaaggtacataaccaatttagaggtgaaggaactcagacaccctagaaccggttgcaagttcaagttcttctttagaagaaacccctacttcagaaacaagctgattgtcaaggaatatgaggtaagatcctccggccgagtggtgtctctttctactccaattatatggcgcagggggcatgaaccccagtccttcattcgcagaaaccaagacctcatctgcagcttcttcacttggttttcagaccacagccttccagagtccgacaaaattgctgagattattaaagaggatctgtggccaaatccactgcaatactacctgttgcgtgaaggagtccgtagagcccgacgtcgcccgctaagggagcctgtagagatccccaggccctttgggttccagtctggttaacatttgcccttgggaatactcctgcacaaggtctcctaccaccttctgctggacctgtgcttgggcatcagcaatgagtatgccttctattgtgctttgtttttgctgacttttctgcaccctgtttcctttggatattcagttctctcaacctcaagattgagacggtggtgggtatgcttctccacttccatatgaccttcatgctgttctggaatatcacatgctacgaggtcatccttcacactacttgtaagccaagcaaatgatactgtagattgtactgcctttatctgcactgcttggaccctgtttattcccagggcctctgaactggttgctgtcacttggatttctagctttgggagcctgttccacctactcagctctgcattga

SEQ ID NO: 585044 - DNA, 4001 bp, Homo sapiens
gtcatatactagtcaatgaaaaataactcttcccaagctcaaacttaggaagtgctgcttattgatgtttctcaggttctacattagcagctccaagagagctaaggctgatctcatatacctgtgtatgtaacctaggtaaccagcactatcttgcactttttgctgaacccacacagacgggtcactaggtgatggagacatcaaattcaatctgttatcttctccatttttactagaacagaccttacctacatacttcagaaaagaacttatatctgtatcgtgaccgtcaaaggaagaggtcacaatacagaaatctaagtatttgcatgaaacaaatactcagataatcctatattttattttcttccatgcacattaggttttttgtgatcccatttagtaatatagttagaatactctatacaatattgtttatcactatttcacatagagattatcattgagaattttgttttgttttgttttgagcctgtcgcccaggctggagagcagtggcgcaatctcggctcactgcaagctccgcctcctgggttcacgccattctcctgcctcagcctcccgagtagctgggactacaggcgcccgccaccacgcccggctaattttttgtatttttagtagagacggggtttcaccgtgttagccaggatggtctcgatctcctgacctcgtgatccgcctgcctcggcctcccaaagtactgggattacaggcgtgagccactgcgtccggccgagaaattttttaaaaacttgagggaattacttaaagtttaaattctataatgtgaaaaatactaaaaatatgtataagtgagatctttcatgcatttaattaacagtgctaaaccatgactttctaaaccatgaccaacgaaaaaatttttaaaaagaactttattacacgaagattcctagaactaaaagcgtcattgcctgacctaaagaatttcaggtaagtgaggttcacctcctgattttaaccaaaggcttcggtttccatctgaatgccagccggcttaagaggaggctgctgctttaaaggagcgatataaacgaaaaagttctcaggtcacaaacttagctcagattccagccccgacagatcttgagcccatgtggcatcgctttcagagcttcccagtctgtgagtcaagcccccgcctcctcccctccccgggactgcctcggggatgaggtttactaacaatttctccgagtgccggcggagcccaggagcgctggaatccagcgtctgggagaggcttggggagctcttcctcggcttctgcagccgcaaagtagggttgccagcgccaggatctgcacacaagccgccgccacctcccctgcccccaaatggctggggtacggagggaaaggaggacgcgagggtgtgccacccaaccccgcagagtgaagccgaggccccaaggaccgtcgaggaaatcgcggctgggccggccagatccgacgcacggaatgcgatctccaggttctcatcgtgttcccggctcggtgctcggcgttcaagggggtggggaggatcgaaaagctgcccctcgaggctgctccgccgccggggaagcccgtggctcaggcttcacgcgtcaggcgctctctcggagtccagccgagccgggcccgggcgcgcaacccgcggcgctccgctctcagccggggacgtggctctccgtctcccgcccgcgccgggacagccccgaaggctacccgcccgaaactcccgaagaaagttgcgccgcgcgccccagctcgtcccttgcgcgcccctccacttaccgctcccagccgaggcttcgttctctccggcgtcgcctccgcagcctccagagccagctcccggtcctcctcactccagggcgcccgggctcccggccccctccgaaccgagccctccgcgcccccgccgcgccatgccccgggatgcgctgctgcagcctcgggcgacgctactgagagccgggccggcgggggcgggtaggtgtgggcgaaaggggcggagggagggacgcggcgggcgctgaggctccgctggaggggggaggaaaccgcaacgtcaccagagccagaggagacgaggatgaggagagggaaacggggaccccctcccccggccgaaccccgaccgcaggcccgccccgctttctcccgctcctcctctcccgggactcgccgctcgcagctgtgctcggccttccacgccacccggcccggactccacccgcacccccgcccgccaggcctctttggctctaacttgttctagtttcttaggactcaaacgcttcgggttcgagaatcacacccaaaggaaaggtaacttttggaggcccagggggaggagctgatgcttccatactactctgcgagaggaaagcgaggaagacgttaagactcttactaccgggactggtgcccactccagtctgcctcctcccgaatagttactgcctcttttctctcgaattcggttttactctcttctcaaagagaagttagtgggaggggggactttggggcgggggtcacctatagagaagcagttctcttttttactgtaccaacaaaatacactaaatccaagcgcaccgaaccctgcaaacggaacagattttaatcacagaaggtcaggagcaaagcatttaatgtaggcagctcacaaacagaaatttatcttacgcggtgggggggtgtgtgtgtgtgagagagagagatccctcatgcacccaagttcaggtggagcatttgcaaccttggtagtcacagcctcctggagaagagtcctcctgttttccaaaaatcagccactgctcaaacacgctcagccaggtccaaccaggccccaaggagatgtgaggtaggatcagggccatcacctcaggaatactttgccccttccacctccacccagtgtgtgcaagtaacctaccagacctagattgtacagaagtgaaagatttgtaggatacttacccattcattagaatgagagatattttactgggagcagtgcttttctccatgagttctgaagggcacctccatccaattcctctatcctcagaggttctcacttctatttggccaaataaggaaaaaatgtggatgtctcagtttatgcttctctttttcagaaattgcatttaagaggaactccttacaaacaggtcaagaggaagtggtactattaaattttttaaatgttcactcaggtgaaccactaatttgcataaacttcttgatgctttagggaaggcctgtcgaggagagaagagggctctggaaactggaactaatctttggttcaaatccaaactttgcttttactactgtgggccttggaaaactaacatcagaacctcagtttcctcatctatagtgtaacaatataataccttgtttgaacagttatggagaggatataataaaaatagctaatgtttattgagagtttactacaccatatcagacggtcactgtgctaagagatttacatatactaattcaattattagaataaattgtgaaagtgtctagctgtattatgtaatccgtaagtgttaatttccatttatcttctcaaatttgaaagagactttagaaaaaacatctggtttaatttacgtaacctctcagcaagtagtagtctagttcagtgattctccaacctagaactttagaatcagcaggggagctataataaattctttccaatggggacccccacgcaagaacaacaaatcagaatctctgaggttagggtctaagcatcagcatctgcattttaaaatctcttcctagatgatcacaatgtacaaccaggattgagaattcttcaaaggaggtagtactgactgtcatttgctcccctttaccctcacaccccccacaattttgcttttgagtgacctgcgaattggcctctggatgacattcactttgtgcaaagccccc

SEQ ID NO: 585045 - DNA, 4001 bp, Homo sapiens
tgtaacccacacatttaaaggatgtgcatctcaaatcctggaggactgcgggagaaaatttaaatttcagatttaaatggctggcaaaattttaaaacaaatgtaatgaaaacccaagttttcattccttctattgcttggcacattttccctggaaatccccagacacattttgttcaggaaacaaagaactccaagattgagacaattctttgctaactcaaaaaaaaaaaaaaaaaaaaaagcgaaaatagattttcaggatgccccataaataaataaatgaatctaagcagaaaacaggttgcaactcgagtagtccctgccttcaaaactgcttgcaaaacaaaactccctggagcgcattcaggttgctcctcccaggcctagggccacaacgcctggtaaataacgtcccggcgctcagggcctctttcccaaaagcccgacgtgggaacaactagcagggggcggggaggtggggcgggctgcaaaacgcgcacggctcacgtgggcatctagagtccagctcccgagacccggtcaaagcagggacaggatctcttccccacccacccaaatgacgccctcggtctgtttccgctgggatccggagaagctgaccctctcaccggggggtcttcccggggcgcctaggccagggcgggcccccagcgtcgtcctctcccacccccccactcccctgcccacacattctggatcaaagcagacatgcggccggcgctctgcgatccaaggcacactggggtctttcatccggtgtttttaaaaaggaggaaacaaaaggctcagaggcagggccccaggtgcgctcgcccgcgggggctgcggcgcggacgaccgaaggtaacaggcacgtcccggccgaacttcgagacccgggcccggcagccgccccggcggggaagtttcgtttcccggacaggggaagccgaagcgcctcctcgggacaggaccccgcgccgccgggacgcgcagccttgatacaaacgtccttgggtggccgaggagtccaggagtcgttgcagtcgtggtctcggggttactggggattgggggtgagccggtagagactgcggagccccgagcaccactcggccaccagacaggaccggggccccgctcctttcctcttttactttgattacggttggagaggttgggttttgtggtcgcagccccacctcgcctgacctcccattcgcgggctgggacaaaggcggctgcagccgtgtccagcaggcaggggacagccccgcgcgggcccgacgccccctctgaccacccgcccgggctcgcgggaggggagaaaggtacgaccgagtccctgttcgcaggacaggggccaacctgtccccgcacgcgtcaggacacccggtcctgctcccagcgcggccgggaagttctttcgggacctggggcaaaaaaacctttccaccttcgggacccgagtctcccagtcgtccagaggaggacggtccctccctgtcccgcgagccccgcagcccgcgctctccgggcaggtacccaccagtagccgtccgagttctggtcggtgatcacgccgcgccgagaatagtacatcctgctggtgcccccgccgccgctggtcacctcgtagcgcaggtccgggccagactcggcgcggatcatgcggcccagagtgttgatccgcgggtgggagcctccgttgcagctcatgtcggcgggcaatcgggagagcggctcagcgccgaggcataagcgaggcgggccggcgcggagaaagcggagggggccaaggataggcggacggccggggaaccgggcgggagtgcggaaggctcgcgaggtcgctgctcgctacctgggccctcccgaggccgctgcgagcgcggagacggcgacgggccgggggcaggagcgggaggaaagctgtggctcggagggcggcaagggcgcagaggagctgcgtcggagctgggtgttggtgttggtcggcggcggagcgagtctcctccccgctggcactgggcgcctaggccacacctggccggtttcttcccagggtggggtgcggccgccgcgccttccccgcccccccgcgggtgtcaccgacgcgctccggccgcccctccccacctgcgcccgccgcccgcgactccgccctgcgccaccgaggcctgagtaacaccgggcggggcgggggcggggtccccgagacccaagcgccctgggcgaagccaccgcggggaggacctgcgctcgcgggggctgctgcgctctgcgctggggcctctcgggctgggaatgcgtggcccggcttttgaggatttcctcggtccccgggcggaaatagctggaatggaggggcctctcgattggagacttactggtcaaatatttacttttgttgatcactggaaacgctacctaccacgcattgactaggaccacagtgaggagggaacgctttagatgatagagttttgtttgggggcttttttttgttttgttttattccaggaattcaggaaattgccccagaagtccgatttctgatgtgtaaaacctttttttacagaaaaccacgacttcctggaaaagtcttcaccgtaaatattaatctctttggcatgaagaggaaaacactgcagctaatttttcatgggataacaaaaatataaactgcaatttcttttattttttccctttcgatggtctttttaaacgaggagtaaagatttcaacgccaggtccattttccaaattttgtaccagaaccttgaggatgcttgtctctcgcgcgcttctccgcagaccgaaccctctccggaactcagagctgttcacccaagtcagcggaggaggcctcctgggacttgagcctgagggtggcgaagaaccctaggcagagatcatcaacttggtaccgatgagtgacgcggagcttgaacattccagcgacttgctccagggccactcccagttaagaggctgagtgttaactgcaagaggctgagtgttaactacgccgttggctccaggaaccgaaccgggtttggatacagacccagtcacaccatccatgaaaagctgtttctataatatgaaaaattgttaaatgacgctttagtaaaagccatttaaagatcttttctaataaatttttcatctttccaaacaatgccgctaattaccttctgatacagtgcgtttccaaaatgtttatgaactgaaaacaaaaataaaaaactacatttttatgttgtaaagggagtgggggggactttctaaaatttgtcgtattatagcacttctcatgacaacttgaccctttaggcataatttttgacaaaatgtcttgttctttttctttttacagctgaacgtcttaaattcaaggagtaaacacatataatgagataaaagtttatcactgttagcacaaccaataatttgcatcgtagtctcaatttcctcgaatctttaataaaaccaaagtggtcaagtgtttaaatgattatacagattgagtaccccttatccaaaatgcttgggaccagaaatattttggattctggattttcttggattttgcaatagttgcatagacgtaacgagagatctttggggatggaactcaagcctaaacatgaaatttatttatgttttctatatgccttatacacatggcctgaaggtaattttatacaatattttagataattttgtgcatgaaacaaagttttgactgcactttgactgcaagtcatcacatgaggtcaggtgtggaattcgccacttgtggtcatcatgtcagtgctcagaaagtttggatttgggagcattttggatttcagattttcagattagggatgctcaacctgtacaaacactgatctatagacaagacggtggtttttctcaaacagaatcaatggctggaagtcagcctctgcacaaacagcccataatatccattggtggaggagagaaag

SEQ ID NO: 585046 - DNA, 4001 bp, Homo sapiens
atacttattatgaactaagtgggatttttctttacacaatttcttgtaatttcctccaccctcccataaccctgcaaggtactaatggccctatcttacagatgggtaaatcgaggcaccgagatgtatcacacagctagttaatgtaaagccaggaatggaacctctgattacctcacttatcctctcaagaatcctaaactgaatagagttctcaccttccagggctatatacagtagaattactctttgtgcaacattttaatgatattgcaataatacagttaaagtttttaagcaactagaacccaataaaacatctagggtggcataaaatatctgattaactaatgaaatgaaaggcaagataacttcaggtaaatggagggcgtttaactatgaagtctttgccaacatgagtaaactgcaccaagcagcaacctccaagcctggcggcgtgcaactttcctaaaaagaggggaaattatcttaggataagtggaggttggcctgaaaactcctaaagaaatcctaggtcaaggagcgcttgtgtttcttcagtggagctggttcctgggtgcagtgattaggagttacttgccctagagggatggtccacgttttgagagtggagactagcacaagcatttaagcacacactaccatcatcgctttgcaaaaatcatcagatggtccccaataaaacatggagagctttaggagaaaacagaaatgtaaacttgaaaatcgaaaatgaaatgcatatggatcaaattgttctgcactaacctcttcgtttatccaagtgaacaaccagagtcaactgacagcacccagaaaacacttccaccagcaaaatataaactgtaaactcaagtgacatccaccctgtggctaagttttttaaggtctgcagcacttttagggtttgccttttcccctcttgtacaacagctccactacacaagaaatttgctaaaaccgttcgctgggcactaatatgaaatcacttaaaaggaaacatgccactttcggctaggggacagcatgttcgtcattcagtgtcctactggtttcttaacacgcatataattaatattggtactcaggaaagagaacttcttctgaccttgagcgtgcgcgctaaataaattacctcagaacgaaagtggtgcgatctcaaaacagcatctggggagaaaagagataaatgagacttcatttaactccttgttcttcacctaccgagtgactcatgacttacctgggagaccagggttgggaaagcacatcgcagactcctggaattcggtgggacatcctgggggagggaggaggagtcctggggccatcggtctctacgtgatttctccgcgagaagtttgcatgaaagttctgggggagttggggagccccgaagtttccatgccttactttcttacccctacgctccagcgaaggatgcgtgaaggcgaggctggcgcagccccggactacgctcaaattacccttaaggctttagcaaactgactaaaaatttgagttctttcctcccctccctgccctcggcatcgccgtggttattcaaacctgggagactggagggcggaggtgacggcaaaaagggcaaggggcgttaaagaaacgcactcagcctggggagtgggcaatgatggggctaggggcagccgaggagaagggagcgagccgcgcttcactctccaaatcggcttaattgttcctggtagcccgcagaaacccgtcgcggcgtgtcttacctcggcttcttgaacgacccgagaagaccgatttcatcggatgcctccctttctggagcttgcggtgccagcagcagaagaagacgatggtggcgatggtgcccagcagaagcaacaagaggaagagggcacattggatgctgtagggtctcagcaagacgaggaaagccgcggcgatcatggtgcgggcgaggcgagggcgactcgacggcggggctggagggcggcggcacaggcacccgcgctgggcgcacgccgggacggcgggcacgggtgagcgcggctcagcgcgtcatgcctggcgctcgcggccccgcgcccagcccaatggctgcgcaccccgcgccagccgcgctacgcgagtgatccagggctgcggggagcgcttgccatgactcagcagacagcgacgaggctgcgactcggcggctgggatcctctcccctccctccccaggcgcccccgcccccgtccgtgcgcagcccccgggcgcagccccgccggggacgcggcgagtggggaggagcagcgccgccgccgcggccgcccgggccccgcgcatcgtcctgcggccgccgccgacctcagcatcccagaagccgggcgcacgtgggtcggggcggggacgcggcgctcaggctgcagccgcggcagcctgcggggggcgggaatggggcgccgcggcgggggctcggctgatgacatcacggccaggctgcggcagcgcgggcgcgcggacatggctgcggcggtttcggcggcgtccgcgggctgcacccgggcctgagagcccagcgccctcccgcggggccgcccgccagtccgcgccgtccgcgggtgcattggccgggtgcctctagcttcccggacacccggagcttccgcctatccagcctccctcggccaaattgctgcggagcccgtcgtcagggggcgccaaggagccagggggaaaaccgagaggcgctgacaggagcctcccggcggtgctaccctccacctcccacctccctgcgccccgccccgaggttggggctttgaagaatgcagccgggtgagctattgcttgtgggggtttcctcgcactctgaagcgcgagcgccgggaagggccttccctgggaattgggatactccaggaacgggaggcccactcctctccaagcctctctaaactaggagcgctccggggtagtacgctctggtcggcagaggtgaactcttccaccccaaacttggtgcttatctcgcagctaagaattgggcactttcgatcttcttgtatccctgggtttgccctaaaaccctgactcatttagtgcatttgaagggcaaggcgatttcagatttagggacctggcagatgaagtaagttggtacttggcttataaacatttgggggagaaattttttagggagtgtgaggcaatagtgatctctcacacttgcaggcacactctgtctcccctttgtcccctccccacgtttcttcataaccagcaaaaagtatatggcagttggtggccaggggatttaacactgatgcaatgccagcacggaaggtatagcgagagcgctgcagtgtgcctttctgcggacggccacggccacctggccaggaagcggctgctgcagcagtcattctgcggcatcttgcggccttggcgggcggtgctgtgccgcgttctgctgcccccaaggcaatgctggctttccctgtgtggggctggattgtttgtttcatttactcgcataagaaaactttaattatagtgacaaggtaacacttgactgcatttgcggagtttcttataacaactgtattagcctcttttttggaatatttaatagactgaagaaattgtgtcataaaaatttataaaaatttgaaaagcaggtaaataattgggaggaataaaagttttatttgcttgtagtgatctcaaaatcagtgttgttttccaactatacaaaaccgtacagctctgcatgaaagcttaatcattgatgtccttaaagccagtaacatattaccgtgtgtaagtattaaacctaaaaaggcattggttaatgcagtctcttagtgccagattcataagcatggaaaacaacagatacgttttgtttacagctggtttccttaaacaaaataaacattcgaattgttgacatgttgcatctcattcattcagttgttttggattgaactcagaagggcccttgc

SEQ ID NO: 585047 - DNA, 4001 bp, Homo sapiens
cacaccctcctttcatctatcttccctttctgctgagtcaaacatctggtatgggcagtgtcatctgtataggcattcatttcgctggagcctcagacctgcgggaaagttctcaacagggcaaggaggcaggcctcagtgactaaacattttctggtctgccttgactctccaagtctacccctgctcactctcagtctccatcctccctccacctcccctttctcactccaccccttgctcttcaaaggcctgggtgagaccagccagcatctcacagcggaagccagaagaagctcaaggctgttgccccagaaaccctgactagagaatggctggctaggcactgtttgtttttcccgtaatcagaaaatcccactggggggacaaaaagggggttctcagctgccttgatggccggaatctgggctggtcccctccagcccccttggaggaagagaaagtaccaactttgcaatacagtataggaggcaaaaaaaaaaaaaaaaaacaactgtggaaagggacccccagagttaagagtggaagagagggaaggaaaggaagcctgaaccactggatgcagaaacaaacttaaagaacacctggccttctgcctttgcaagaaagtccccaaggacacattccatcctgccctgttaccatttccaagaaagaaagaaaaaaaaaatattgagggaagaaaggaacaacacccctggaagcacctctcatgcacaggacacatacacacaaaccacgcaggggttggaaggttgatttccacagtgttctcagctttcagctgggtaaaacaagccatcacttctggttcagcttttagggccaatgcaagggaacaccgggtaacacagaacagaaacattggcacatctcatgtattaattaatcaggaaggcgtgatggccaaaccctcaaaagcactaaggacagaaagctgctatggatacaatgatgcagacagagatgctacatttaaagaaaaacaacatccaagttgctggaatatgctttgcaatcctgggtaccaaaaaccatggatcttctcaatctgcgtagctcagtgcccctgggcaaaaatgaaaataaaggctgctcacttccagcttcccgcaaatatactagcaatcactggagctaatactttcagaatgttatggtaactaatgcagtaattaggaaagtttagtgcaaatgtctgtaaatatttccttgcatttcaaaggaatcgattcgtccaaccagaaggcagggccaaacagcttagtcaccagcaggcagggcaaatggctctatcggtaaaacaaggcataaagtaaacatggtcatcatcctcccccaccttgagcacagattcctgcccagtgcatcagctcccgctatggccccccaggaggtagatgggcgaatttccgcaactctcttcccccactccatccccttccccagatgctcttacctgctatccgaagcactgccctctcggcagggtccagcactgagcccccttgaatctttcttttcgatctctcatgtttaggcaaattccagggtaaggtgtctcccggagctggggatgcggagccagatttctggctgaaatcatcctcatcggaaaaatccgcagaggaagacatagagcagcgataggacgcgttcccggaactctacagagaatgacacagaaaaagcattaacagcaaaatactcacatatgctcaatgatttaaacatctcccccaccaaccaccgccgccctccctgcccccaaactgggtctggcatatcctgcaccatcctcggagctgagggaatatgcagaaaccaaaaaaataaaacccggagctcaccatcttttcttggccaagtctccaatcgtaaaaacaatacacaggcagtttcaatacatgaagatttgcacggaagaagtgtgtggcctgtggtccggccaccagctcacaaatgactggcccaacaatgaagccagaatcaacagccttcctgttacaaacctatagtatttggctcccccaccaggacagtagaaatattttccattactagcctgctgcttaattcatcaatgcaactaactcgaagtttcgaaaacaaagcacaaatgcaggatgttgagtcccaactcctttccgcttcaagtcacctcaccactggagactccgttctgaccagttttaagcccctgtcctctttatttaattttcttcatgagactgaagcaggttcccagaaaagagcaaggagggaggaagggctgattctgagaagagccttttcttaagactgggagaacacaaaagactgttttcagaagcctatggcagcaccaataaacaaacatctgaactcggtttagagttctcaagataatttaaacttccagcaaagtaacagctgccaataatgtaaatgagaatgatgctgcgcagtgacaggaaacagagctcttctcagctcctggtcattacacagtgaaatgagaaacaggatgcttttgccaaagcactttgcctgaaggttagtcctcccttcatctagctggagcaaatctgtagggtcatgtcttgcataaaagtgttaatatcttccatagagggaaaaggcacaagatgttattccttccttctttgttgggttgtgtttgtgattatttacagagccactggcttactaaggaaacaaggatgttgactatctctgctgcaaaattataaacataacgacatatcaaaaggaagtcttgactttcctactgagaattctacttcgctgagactcatggtaaagatgcaaaactggtataactcgaattcctgaaatgtaacttgcagccatggattcctaagaagcaagttacaggcagaaatcagtgaggcatgctccaatttgagcaaaaacactgggcttcccacaaaagcagtggcaactgcagcacaaacaggctgtgtgagccacatcccaaaacactcaccctaggtacgtgaaataaactctaattgcatcaggactaccaaccttacctcaatctgtttaggcctgtggctatgcatggtcaacaccattattttattttatttatttttcttttttgtgggcacatagtaggtgtaaaccccattattttagaagttcacgtaatatttcccacaaagtgaggtatgtaagacgtagctctctattctttccccccaaaaaagctgtcttccattttattttacataaaatttcatcatcttggctaatttatttatttacagtctgtatatttttctaatgacaataaggcattaggcaaacttgaggcaaaaagtaaataaaattgattttctgtattgtagctacaatccatagggagttgtgagtggcattaggtcagtcacagcatgctattatcaacccagtttattttccatgcttttctgaaaatccatcttgagctttctgagattttgtttttggctggctctgcataaaagggtgacattcttaaagacttttaagagggtattgggtttctttggctgctttctatcttcctaaaaatggcttcctatctgtccttatttaaggtcatcctttatctgtgagattatatttcttgttacctgtactattttagtgaggatagtaatttgattatttatctttacagacagacttggagaataactgttaaagaactgctcctttccaaaaaccactggttattgatttttgtagagtaaatttttttaatggcctgagtctcagctgattgaacaacgaaatgtgatttatgccacgacataaacaccattaatcactcatagccagatgggaacagttaccacccatggacccatgggtgttgactggtgcagcctctaatctggtagtgtcattggtaaacagataagagagaaaaagaggaaaagacaatcaacaacacttctttcaacaatatatcataggaaaatatggac

SEQ ID NO: 585048 - DNA, 4001 bp, Homo sapiens
catcatgatttttttcaatgagcattgtactatgaggactttcaatcttatttgtctttataactatgatttataatgaatacaattactatagcataatatgatcatttttacatttatgtatatatttttcatatttagaattactatagattcctaaaggtgaaattactgagtcaaaggatcatttaaaatttttgcatttacatatttatgcacagagagagagagagagagagagagagagagagaggttatagcctgaaatattccatacttacccccatacacacacttctcagtgataaaggtttttatacacgtattttctttcaagattttgttatgaacattttcataataggataaacagaaaactaaaaagctgaattaaaaatgacactttttggccaggcatggtggctcatgcctataatcacagcattttgggaggctgaggcaggtggatcacttaaggtcaggagtacaagaccagcctggcaaacatggcaaaaccctgcctccactaaaaatacaaaaaattagccaggtgtggtggcgggtgcctgtaatcccagctactagggaggctgagacatgagaatcgcctgaacccaggaggcagaggctgcagtgagccgagatcacaccactgcactccagcctgggtgagagagcaaaactgcatctcaaagaacaaaaaacagacacttttcttagatttttttctctttcaaacatcccatgaatactttaaatgtatgtaaatgtatgcatgtaacttacatctatatctagggtattcattttaacgagttagttactgcagcagtattatacgcaccataaaatattttttctattgctaatctttaaaagacaagtacctacttaaacaccaaaatatataaaaatgtgacacacattttcaactaaaaaacagcaaagaaatatatttcataaaattttcatactctacattcctatttcaaatgcccatgaaacagttacacaaaaaaaggacagagaaagaataagtagcactcttacctctgtaccaattgatctgcctggtagtattttccatcaataagaatctgtacatcaattacatgctggcgtaaaaggttctcacattcaagtatatacccagcaatttctgcttcattctgaaactgcactcctgattctaatcttttagaatcctgtattttaaaagaactcagtattaattctgtgaaacaagtttcaaaacaacctgaaatataaaacatcaaatattggaacagaagcctacttgggctttctttagttttccttgttggttcaaaaatatgttttccctcttcttgtctctcaagagagcaaacaccaatcataatctttaacaaactttaagtttcagtggagagtattacgaagaatcaaccaaacattatgtaaaagttttagttcatccaaacgcacagtgactcctctaccacaaccccaatggctcctaaaattaacttacagactgaagagcatttccagcaagaatcagtttgtcttcacagatgacactgtccctctgaactctgttggcaatctgttgcaacatttctaacctaaaagatgagacaaaataaaataaagcttctccctttgaagtcaaagagctcaccattcctgaaaagtgctgcccatcaaaaagtaaaacacaatcccacaccaatgattcaatacctgtgtccatcaaaggattcactgccgaagctaatgcaagagttgatcagtgttggaccacaatgaaccaagagaagattttcatttgaatcaagactggttcgagtgctggtagtgttactaaacacagaatcactgctacggtaactataactactactgtgcatttttattcctgaaacgatgttctttctttcacctttcaaagtagactaaaaggtaggaggtctggaaaaagctctacttctaacggtgaaaagtggcagctgaatattacagcttttagtggctccttaaatatgcttcaacatgcatatgcaacacacagcaaataatatgctgataactattcaaaagaatctagcctaaagccattcgtttgctagctgaggtttgccttttgtagcttgtattaaaaccctacaagtatgaacaaagcaggcagattgggcgtcactggaaaggatatgccaaatatttgcactaagagtcatccaattgcaaccacctaaaaaacaactcagatgcctcacagatgtccaggacaactagtaaagattattctggcaataccaatcattagctaaaagaacacaaatatccaatcatagtctgacttctgcaaaagaccaggtctgtgctgaataatgtaaggaaggcaaacagctagaaattatgaagtacctataaacaaatgaatttgatgagaagcaaagtacgcttccattttaaccaccatgtcatttgtttattaggttaaattaatggaaaaagtatccatttacctttctttatatgacacgctcccagtaatgttacttctaaacctactataaagtgccaagtagaatactgatgcaatgcttacaaatttaatttgtctgtgcttgtttttccattctataggatattacatggcataagaacactggctctttcccatttgtttttcatacacttccatgccacatagctattactcgcaatacatagacaatgccaaaaaattcgcatgaagaaacatgaaggcatttatccaaccagcctcctaaatattttcctacctccaataatactgttacttctccactctaagaatagatatttttcttttcaggggtcaagaaaggggaaatttgagagtgccacaccaattgcttcttggccttttggctaagatcaagtgtgagagtgccacatcaaatatagtgagtgaacagaatagctcaaaacaataacagtggcacctggcatttattaagtaattattatgtgcaagaaattaatcattttagatacataactcatctcatactcataaccacccaatgtagtaggcactattacatcctgtttacaaatgaagaaactgaggcttagacggttaaagaacttgtctaacatcatacaactttgcaggctgagctaataatctaatttaaaattgagtggcttctaggccctgaactctcaaccactctctgctttcttttatgaacatatcttaaaattcagctactgttctgatgactaaaaatctactctgtatcctctggaatacttttccattatttcaaatgattaacatagtatctcatttcaatcactcaaattaccttttccgtaaaagctgcatcctgtatatttatggcttgttttggttttaataatccagttatgtacacatattattatactttaacataaatgtaatcagtaatttaataaaggactgacaggttagacatgctctcatatatttattttatgcattatttcacaacgttgaatcctgaagtcaatgtgtaaggcacagagaacatgacaatactgagcacctctaatgttgtgtcaggcgctgtgtaaagcactggcaacgcaagggacagaaaaaaaacaagggtttctctccacattcttggagctcatatctgtggaataggcaagacttaagcaatcaccgaaataaatataaaaatacaaccaagataagcactatgaaggaacaatacatggaaacatgagagttctaagcaagatatctgaactagcctagggaaccatggaaagtttctcgagaaaataatgttggagctgagatctgagaatgtttaggtgtaaggcagccagtgtggctactgtgcagagagcaagggggctggagaggtgtgtctggccacacaggccttaccctgtaatatggtttgcctgtgtccccacccaaatctcatcttgaattgtaataatcctcatgtgtcaagtgtggggccaggtgg

SEQ ID NO: 585049 - DNA, 4001 bp, Homo sapiens
ctttcagatttttttatttctgactgtatagagcacagatgtatttcttcaataaggtttgttggtctatattgcaatatttctccttttcaaagctctggaaacaactaattacaaaccttactttaaaatggagtgatgcaggtaaacatgagtatattacccacccacccacatacacacacacacacacacaaatgtcacaaatgtgctttagcctaaaatatcactgcacttgctcagtggcagtattatacacaataagagtcttggcacaaaggaattctcattgtactgtttacaaaattctacaaggattgcaagaatttcggttataaaacatatcctacaaagagagaaaacaattgtgagtgtatttgggctttttggggctttggaattttattgtttagttcaatttttttttatttctactttctactaatagaaaaactacatgcatcattaaccatataataccactgaaattactgacattgagttaccaaacccaaagcaaatattcaaaagatataaaaccatctgaatcctacctatgaaatgggtcactattcactataaatactttaaacctctgtgagctgctcttgagttcggagtgttttgggagccacaataaaaagatggtatacacacacttaaaaatacatttccagacacaaaaacacttaaaaaatggacagctgcaatttgtatttcatcattatattcaactatgaagtccaagtaaacattatactaaaacataaatatcagattggcatagaatttcctgaacataaaggatgggcagaaaaaaatctcaaaatacattctttacatttaaatttacaacaaactcactaaagtcttttatccatcacgctataaaataatttttacaatatatcagagtaagtatatagtcacaaactttatcaaataagaaagatcattttaaggaaaatgatctagtgatgctgaaccttttctacagggctaaccaataccctagccaagcagcagcagcaatgccttagtaatcccatagagaataatcggtatccaccctcccaggaagaattatgattacgcgtagtgcttaagagcttttacaagggagagaaaacgcaatgtgcttcttggaaacaacccccttcccccctctctaccgctcatctaagggcgtctccggactgtcgcccaccccaccatcctccctgcgctgggggtactaaatcccgtgcaaaaagacctggtccattcccaagactggtccagacacctgtttactcgtgcccaaggagtggtggctctgattaaggaaaggcagcggttgcctctctgatcagtgccaagctccgcagccccagggcagggaccacatacctttgtacctctccaggacatcctcgtaggcctggagatactcctgctcctccacgtacaggtaagcagcaggggagaggtaacccgccatgccgaagtttatctaagcgatgactgacaaattcccctctccccctcgtaacccccggacagtatcgcagtcagcaagacacagccttgggaactggaaaagaggaaggagcagcacgctggggagaagcacggaagccgaagacgcagagcgggggcgcagggggctgccggcgccagggccggcaaaggaaacgcccaggcctccgggcaggccgatggtgggccgcccggctccgggagcccgagtccctctcgggtttcagcagcggcaaatctcagcgagcccaggggcggcgacgagcagcgccacgccaagcggaggagcggggcgtgcggcgagggcgggcgggggccggcgggcgcccggaccctctgcggccgcgctgaccgctctgctggccctgcacgaggcgcgtgcttcgggccgggccgaggccgcggcagcggtgcgggaggaccggcgcgctgccttcaccggggatgctgcgcggcgcatctgcggcatttcctggccgccgcgccgcagacactcgcccgcgccggggagagagggagggaggagggtggagggtggagggtggagagtggagggtggagggtggagggtggagggcggagggcggaagggagggggcgagcgcggcggtcagcgccccggctggctcagctccggccccggcgcctctcggcccctccctcccaggcagagccacgcgccccaggccccctccccaggcccgcccaccctggtggaccgtgcggccaagcacgcccacccccggacactggctgcccggtcccggatccccaagggcgacgtttctatttgggatccacaacaggtgcctgagaaacaaagccgcagatcgctccaccgctgtgcgcagccccctgctgaggggccagcggctctccctgggtaagggatgatcggggggagggttggaaatactttcttccacccatctttttggcgtgggaggattcaggtcactctgtgacagcacagggcaaggagggcacgggggtccgcgtctaggggacatcccggggacagggtgaggaggcctctgcaggtggccccgcgcatcagcgcctgacagccgggccgcgcctgcgcctgagctcccggccgccgcgaggctgccgagtaccagcctgcggtccctcccttctgccccccagagcccacaggcgcatctgctgctgggctccgcggcgggcctataggttcacaactgccccatatttatcacctccctcctgctctctccttattattcattctacatagtactagtatccattaaactgagtaaaatggatacagttcccttaaattagatatatgtgtatcatatactaaagtgggtgagtttaagcgtccattggaggaaccaactgatacccaggcatgtaaatggatgtgtttaagagtaatgactggccgggcgcggtgtctcacgcctgtaatcccagcactttgggaggccgaggcgggtggatcacgaggtcaggagttcaagaccagcctggccaaaatggtgaaatcccgtctctactaaaaatacaaaatttagccgggcgtggtggcgggtacctataatcccagctactcgggaggttgaggcagagaactgcttgaacccgggaggtggaggttgcagtgagccgagatcacgccaccgtattccagcctgggcgacagagcaagactccgtctcaaaaaaaaaaaaaacagtgaagtcaggctgctgtacatagaatcttcactccttactgtgtcacatgggcaagttacttatcctctctgagactctcttcatcagtaaaacagcgatagtagtgcctaactcataaagttgtatagtaaatgaagtttagaataatgtctggtgttatataaggattagctgctgcacctactactttatttaggaggtggggtctcactctgtcatccaggctggagtacagtgacaggatgatacctcattgctactgctattattagataaatcagctgattgttgacagtctgacctatgtcaacttcacgtcttgtctaaatcttccttccctatttcctcctttcacatatactgaccttttgccctccatgattttttatttctttgttagcgttgggtgttgtgaactatggaccattttccattaatgcttagatagggatgagttcctcttgaaagaaaaaattgtgtactcgtgggaaaaaaaaactgacttgagatagaactggagcactcctcagcaattggcctacttctgttactccaaacaaagcaagaccacatctcttttttctatcctgaccactggtttataatctgagtttgaaccactgtcccagtaagtctttaaggttactagagttttcttacagctcgatatgcatttgtatgcacattagttcataaagtaacaaccaggcatcatatgggacaccttcttgaaataaaagggttagcaattaagtccctgaaagtcattcatttaca

SEQ ID NO: 585050 - DNA, 4001 bp, Homo sapiens
ccaaactaacaaaaatgattgacgcatggtaagtgctcaagcgtttgacagtttgttattcaacgcccaatgtgcaaatagtattaacatttttgtccattaagataaaattttggctaacatctttctcattagaaatttaaaacgaggctgggcgcagtgactaatacccataatcccaccacttcaggaagcctaggagggaggatctcttgtacccaggagttggaggctgcagcgagctataatagcgccactgcgctccagcctgggcaacagagcgagaacttgtcactttaaaaaaaagggggggagggtgggccgggaacggtggcacacgcctgtaatcccagcactttgggaggccaaggcgggaggatcacaaggtcaggagttcgagaccagcctggccaatatggtgaaacccgtctctactaaaaaatacaaaaataagccgggcgcctctagtcccagctactcaggaggtggagccaggagaatcgcttgaatccgggaggcggcggttgcagtgagccgagatcacgccactgcactccagtctgggtgacagagcaagactccatctcaaaaaaaaggggggtgggggggagaaatttaaaacagtatgagtggaaatgttctcacattcagtgcatcctccaacaggatttgtaagctaaagttgaaagatccttttcaaagacagatctttttcactttaaaggaatgaaaaaattaaaattaagcactaagtaacaatactgacatgatgcttgcttcgtgttttacacattaattcattaatccttgtaataaccttttaagtaccatcattatccccattttacggtagcggaaacagtacattgaggcaaggcagctgagtaactacgtttgatttagtggtcgagccaggatgcctaggcaatctggcgccagagtctcggcctgtggttcccaggcgttggtgcccactggaatcccctggggatctttaaaacgccgtctccaggcactctggtcaacaggtagggggtgagacctgggcatcagaactctgaaaggttcccaggtgattctaagcaaagtttgggaaccgctgggtattaaaagcattcctaaagttctgtcgcttctcctgcttaggagttccttcgccgaggcgctgagctcacggcaaaggtagagaaaggacgcaacggggaggggcggccagccttgccaagggttaggccggcgagccgggcgtgaaagccgagacgcggcgcggaaggctgtggccggagggtgcaggctgctgcgcggtgcgatccgactcggggagggtggctggcccagctccaggtgcgcacgagcaggtgtctgctgggccgaggggcgcaggccactgtgccgcgggggcggaagcggtgaggcgcgctggcttctcacatgacttccctccagggcccagctgatgctgccgggaaaggaccgcagggtcccacaccccccccgggcgctccgctgcgccgccgagcgcctcccggtcctggggggtgcgcgtcacaggcggcccgcagggacctaagttactttgcgccgcccgacgcgaggacgccgggaagttcgttactttcctcggcggggcggggcggggaggtgcgggacaggacggaccctggaccgtggcgcggggaagggagcgaggcaggggcatcccaggcggcggcccggccccctcaggtcccttttcgtcgcccaccgtatacccacccggaggtgaaatcctgctgcacgctcagcagccgctcgcgaagggtctccagcattgccgccgccgccggtctcctctcctcaggcctcgggctgctgctgcctctgtcgccccctgggtcccacgccgccaaccccgcgctgtcaccgcgcgccccgcactcccactaccggccccgcccccggtctggtcctcgccgccgcgccgcaaccccagccccttccgcgttcccgccccgcgcgcgccaggctcgcgcagccgcagtggactgcgccgggctcgggctgcggaaaaggggcgggtcttcccccgaccgagagggccagtagctcctcggctcattcctatcccgcaccaggccttctcgtttttttttttttttctttaaaatggaagcggcatcgtgaaaggatgatttaactcgaagcctcctttgagggaagtgttggcttttacgttttggaagagaattggatctctctcttcaataggcgatgtgcacaaatcattgcatggattctaggtccaggatctgaccccactggctttcaccttgaatgagacagtcaaatattgagcctcggtttcttcattcataaaatggcaataatagtcgactgtctcgacattcttactttccactctctctttacccccccaggcttttgtgccctacacaccaaaggtgatcgcctttcgcgagtcaccagtgacttccatgttgctgatgccttttattacttctctgccctgattttttctccacctctcagtggctttcaatgcagtttatcatccccatccttaaaacactttcttctcttgctaagcactccatagttcctctctcccttccgctccaccccttctcctattttaatagccactcccaaggctacagtccagcctccccagctcttctctcttctccagatgtgttgttccatagatggatagcatagagtctatccattaccacgctgtaaattctgtcaaggaaccgatgactcccacagctctatcttctgccctgtccttcctccctctccgtcaattcataccagttgcttactcatgtaagcatgtatacaacatgtatccaaaaggcatctcagaccaacatacacaaaattgaaaatttcattcattgcatgttcacctttaatctgctcatcctgtattttccgtttcagtaaatgacaccaccatccaccaatttgctcaaggtaagacacttgaaatcacctctggttcccctcttttcctcattccccatattaacccatcaaatccaatcaactctactcctgaagtatttctggaacctccttctctttctatatcttcactatatttatcctggtcgaaggcaccatcctctttcaatgggaacacagacagttcttccagattctactcttttgccatacacacccctataatccatccttgacacagcagccagaaagagttatttaaaagatcaatcggatcacgttgctcccctgcttaaaatcttccaattgcctcctgggcacttggaataaaattcaaactacttacccccttaaaaagccctaaaatttgaatgttttctagcactgtatccaaattgattactagtcacctatcatgtccttgacaattaagacataatagccttttttttttttttttttttggtgtgttcttagaaaattccaggtttatttccacctgtggtgttttcacaaacttttctccaaactgtcccttgtctggctccttataacataagggtcacatcctaaatagcatcacattagataggttttacttaccattcaagttacacacccaatcacttcctatcacgtagcctgtttctcaacttagtacacattagaaaatttattcaataattatttgctatttattaatttagttgtttacaaacatattttaaaaccacgacaaataaggcattcacctcaggtacaaaatttacgggagccaaaaagctcagtaatcaagataagtaatattttaatacaatatttaaaaaattcaaaattaatgaaaaaaaatctgtgatgaacaaaatatcaaaattttaaatacacaggatctgttagggctgggattggatgaggccagtgaggtaagtagcacaagtacaggcccagatgtaaactgctctgtcttattaagctttgcatccccagcaatgaaaacagtgaatggcacataacagacacccagtaaa

SEQ ID NO: 585051 - DNA, 4001 bp, Homo sapiens
acggtggagagtgaacagctcaagtgggaaaactagaaacagccaaaggaaagctgagataccaccaccaatgggaaggcaaacggagcccacagacttatgatgaccatctttattgttctgttttaatttaaaaagcagaaggctcgtggtgctgatggattccagtgctcatcggaatataatacaagtatttatccaagagagagacagtctgtttccaaacttgatcactcgccaaaaaaaaaaaaaaaaaaaaagtgaatacaattctctttaccaaaataccccagtattgatatgcaggtcccaaacacacaatagttctttcacaaactgggtaaccaggacacaataaacacgacatgcgcacgtgaaaagttagctaggttttccctgccctaccgtgaatccgcatttgcaacactccagccccaacacccaaaccactgctgacccagtgctgagggacatgaaaaaaaacacagccacattgccatccccacccagtgtggaagctgacggcatgtagagatgtgggtgggtggagcgcaatgaaaaagtgaagcagaaagacgactcatctaatccaggaccattcaaagacccgtaaaaaggtacttgtctttgttgcgggctttgtaaagtcttgtcaatccttcctcgaaaccagccaagtaccaagtaacaaaatccttaaccctgtggttcacatgaatacaccccggcaactctcagctgccagagctggaatctggcaacttccctggacgggaaaggctagcccaccgcccgggaagtgaggtgcgggcaacaaaagaacacagggtggggcccagaaacggacgggacaaatggagcaacacagattttccagaaggcctcatcagcgcaagcagccagcaacaggttgcccttgttgcagaagtcacataacctaatcaactctgaatcttttctctcctccccactatctagaaacagctcaggacttaggactctgttaacttctctgtccacaagaaaaacttctctgtgctcacaggcacacacacagaatctgaggagaaagaggaaattacagaggacacccgtttactaatgatgtggggggggcggtggtggcttcaagagcgtagtttgggagcgaagaggagggcaaaaaagaagccacatccattcggagctcagctgacctctcggcagaacaagtgtcaacgctttcaaagggcgcggcttgtttcagccacgaaaacgcaccggctggcaaggcaggcggctgggggctgcctacccggaagccgggtggggtgggggcgggaacacctccgaaccccgactccgcggtcgccgcccaggcgcgccgcccctccctccgcgcccgtccccaccgcgggaaagggcaccccgggctcgagtcgtcgggcagccgacgccggcgagacggcagggcgtcggagcggaggcaaacccagcgcgaacgagggaagacgttaccttgttcatcccattccccatggtggctgaaggcgaacgctagcgccccggccgtgtggtcgcaggcgcactatggcatgttacagggaggaggagcggcggggcgggcggggaggaggcgcgcgggagggactgagtgctcgcagtgtcaacaagtcagcggcagggaccggccgggcaacccagggcgctccagagacccggcgtggagggcagggctttctgtgcggcggcctagaacttcccggcgggagccgggcaggggcaccggagcctatgccgggaaatggtcccgccttgccggtccccgcccccgtgcgcaccgggcaggcccagcgtccctcctcgctccgcccgcccgcaccctgggattcgtagtcgggttcctggctgccgcgccccactccgccctcgcggaccccggctcgcggccgccgggcgtgggaggcactaggctcgggctcccaggcggccggccccggaggccagagcgcgtgcgcggcccgagccgccccgccgggacacccgaggctgcgcggcggggcctggcggacgcgcaggcgctgccctgaccgggcggctgcgctcgtctcggagcccgctccccggccgggggtctccagatccccctttggccttttcccctggggcgactccgggggccagttaccagcagtcgctacccagccttggctgcctccgtgaatcaggtgctaatcagaggcctggtctctgggggctcccctgcctgggttttctgagtgcggcagatttaggctgggggatttcctgcggccctgccccatgcaccaagaccgagaagcctcgcctggtggggagaggtgggctacgtgactcaccccggggaggcccgacctccctaccctgggggagcagatggctggatctctgacctcagacctcacggccttagatgatgtgtgtcccttaatgtctgcattgtggttctgtctggaatggatcaatttctaaactgtagcagaattgttttgggtgttctatcaacgttattaaactctgaagtttctctccagcgacagaatccttgagccagtggtttttcttcttaatttatgtatcctcaacaatgtcctgaacatagtaggtgcttaataaatatttgctgaatgagtacatgcgtcaatctgacgtgccctggctcacccctgctgacttcattttatcttcttgctaagcgagttacacacatgctggtctcctgtctgttccttgagcctgtcaggcttgctgggctgtgctctctatccagacacctggatccccagctctctgcatacctgcctgttatcgctgaggtatcagcccaaatgccatctctcctaagaggcttttcctaaccacccaattccaggttggtcctccagtcactatcatattactccgtattattgatcggaaatacatgtatttgctttctttttatctgtctcactagccagcaactttcagattaaaaaaaaaaaaaaagttgtcttattcagtaatacagccatgtggcctgggacaaaatctagcacaaaatagtgatttttaaaatatttgtcaaataaattaataatttcttgtggccgagaaaacgggtgaggttctgaggaatgtgaacgtttggaaagagcttgtagactccatctgtcgccatttctgtacttgtaccccatatcttctgggcaacaaatggtatcaaaaccccccgtgtagaaagccctcaatcaatatgcgcttgcatgttttctctaggtagaatgggacccagacccggagtgccctttctgcctcttgttttgggagagtgttccttcttcactgccttcacttcctcttctcccgcctgcttctcagtcacctggacagcctgccctttcccctctgccacacactgccattaagtaactgtttttaccaccttcctgcttagagacaacacagaatcgttagtggactgcctggggaatcccagtaatcagcctctatttctaattcttaaggaggtcttgagcaagatgatcaacttttctgagctagctttttttttctctttaaaacaagagcattaaactgtgaatttttgaagcttctatccagcaaccaatgaattacttctgcagccttctgccctccttgggccattcatccaacagtcagatgaacgtttaagaacacaaccagttcataaactggtacttgaccatgaatgacaaattcatactgatttttttcttctgtcatccacttgcaatatttctctcttattcatactcttcttgtagatatatttctccagcttggaccatctgcttttccccctaaactcagaacctgccatggcttcctccttaccgtcaaaatcagcattcagtatggcctaaaaggtccacatgcccagagttcctatcaaaatctcaaatttttcttttgggttaaataggaaaagaggagactattaacaccagaagtcagaagag

SEQ ID NO: 585052 - DNA, 4001 bp, Homo sapiens
agagaaggcaggctgttgccctggatgctagacctgtggtcttggtgtttggggatacgggtgggagctgcaacatcgttcccttaccctgacatattcaaacatcttcatggtaggaaaggtcttgagggaagagacaaaaccgtctgggttacggaagccagcaacaacattcgggacccctgggaggaatgactgagcccaccatttcaggagcttgtgtctgacaggaaaagcaagggatcagtgggacccctcgtgcaccctccattctgccttcaccctcctccccaagtccctttcccagccttcaagcctaagctctcgccctgcccaccccgatcctgaacctgtagaaactcctccattggccagggctgtgcatctccttggaggtcttgagctccacatagcaggttgggggctgtgtggatggggcttgggggtctgtgcagtctacctcccctgagaagagcagagggtggcttcccaggcggctgcgtagcacagagcagaaggccacgttggtgttaacctccccagaggggtctggggagcttccaggtttgtctgcacaaggagagaagcagcagcaggcgtggggggctctcaacctctgggaaggggaagggggctatgaagcaggggcaactcacctgcacacatgtactgctcaaatttgtatcccatgtacataagctcccggaggagcggtggccgagcaagcctctgggcccgagcgttcggtgtctccacttcactcaggtatagtgttccctggaaccgggaggctgccagctgccagccctcctgccgctcatacggtgtcgtcagcagttttgtcaggtgcccccgccacgtcactatggcctctgccagccagcctggacccctgagaggcaggagttacaggctgaaggtctgacacaagcattagtgagatgctcccctcgaagaatagtcttgtttcttctaaggactgattctcaccccggctttggctctcctaattttagagggtaggtacgggtctccagatatactgcctaccacgctttgctcacccctccaaccggcctcggtgttccaggagccagcacagcaggtggtccagcctttcctggacctcctcgtcccggggctggtatcgatccgggtatccgtctctgaggtcaaagttggggcctggaccgttagtggggggtgggctatagtagcgcagggctcgggcatctccatggtactggcgttgagcatccagggagaagcagcccagttccgaagggcgccggtagaaaggaaagggcccagagtagagggcagggtctgtgggcagagaaggtgctggacgaggtagtttgttccgaggctcagctacctctgtcttctcagctcctctcttggtccccctgggatccatgaggtcctaagacaagcaggggtacagagtttccattctacagaggaggcctggagaaggatgactggtttaggactaagcgagccacctgatcgccaggctctggccttgaaacattcaggcccctcagacgccaccgcggccaagctctcatcctgcctctttccttgcccttcacccaccctccctccaggtcctccaaatgcagtgaggttaggaaggacgtctgcgctcagatcaagaatccagttacctcaaagctccccaacttccacctccgcagagctatgacgtcatggcaggcacgccagaggccgaaggatgcaaaagtggttttctgctttcgatgatgcaatcattcagcgacagtggcgggcaaacccctcccggggcgggggaggtgtgagcttcacgaaggaggttgacaccaacgtggccaccggcgcccctccacgccgccaacgagtccccgggcgtgcgtgcccttggagggagccaatccgcggccggcgtggggcccggcctggcggaggtgatgctggtatgtgcgtcgccaccgcccctcccagcactgacgggcctgagggacgacaagttgacgctcctttcgtcatcacctggtctaggagggacgcccggggagaccgtacgtcactgctctgcgccggaagaccctattttcaggttctcttccctccattcctaccccttccccggtaccataaaatcccgggatatgagctggaagaggcatcacctgatcccggagacctttggagttaagaggcggcggaagcgagggcctgtggagtcggatcctcttcggggtgagccaggtaaccatggcaaccccgggggtggggcctcgcttccggtagccgagagttttgttagaaccgcgtccccgccccagttccctgtccgtgagccgatttatctgcccagggtcggcgcgcgcggctgtctcagaactcatgcagctgttcccgcgaggcctgtttgaggacgcgctgccgcccatcgtgctgaggagccaggtgtacagccttgtgcctgacaggaccgtggccgaccggcagctggtgaggggcgtcggtgcgaccgccggaagcccctttcctaactcctggaattccctgtcactcagtcactccgccagccgttcagcaagcattaggcctttcaggcgagggcactgtgccaggcactggggtgccacagagaccctgttaaaagtcccgcaggtagtacagggcatttcaaatcatggaggtagaagaacgaggcttttggggaaaccgagtcatggggcatggttcgaacatacagcgctgggagtgcagtcagacgtcagatcatgacaggccttgtacatcagtgttgtttccatcttacactgaggcgatgggctggtagagaatatcatagagagagggaatggtgtattggagatagtggatgaggcagggaggtcagctaagaagatactgcatctgagaagtggtgaaggcctaaattaggtcagtgcagtagggagggagaggagagtgaggaagagggaggagtccaggacaactcagactttccagatgactgcgtggctggtggtattaggagcacatttagttgttggactacagataatgtgtttaattttatacaagttgagttgatggtgcatgtggagcatccaaagacaaaggtattagacagttggatatgagagttggagagaattctgggccagtgataatagaattacaagtcatggaggtgtgaatagcaagtggttaattctgtgatgtggtgagatccagtaggaagagtgggtagaggagtgatttctaacctttttgtaatctttagaaggtgataaaagctatggctatctctctccagaaaaatgcacgtttgccacatatacatagggtgtatgtatagttaggggggaaatattttactaatcctgcgaggtccgtggttaaggactccaggtttagagtggaagttaatagggtcaaatccacaatgctgggaaacaccatcatttaaggcagtgttactgaatatatgagctgagttattatgcctgtgtcaaaattacgtgggctgcttgttaaaaaaaatacaggttcctgggactcatccaaggttaatgaattacgctctcttggggcgggatttgggactctacatttttgaactgcctcaagtgctttttaagtgtgccttaaaatttgagatccactgacataaagggaaagcagaagaagaggaatctgtgacagaggcagagagggacttgcctgagttaagaggaacccagaggccggcgcggtggctcacacctgtaatcccagcactttgggaggccgaggtgggtggatctcttgagctcatgagtttgataccagcatgggcaacatgacataaccccatctctacaaaaaatacaaaaattagccaggcgtggtggtacgcgcctatagagctactggggaggctgaggtgggaggattgcttgagctggggaggcggaggttgcagtgagctgagatagcaccgctgcaccccaccctgg

SEQ ID NO: 585053 - DNA, 4001 bp, Homo sapiens
aaaggttgagggacattttaaagaatttttagtggaaagcagagttgtattgaatccagtggatagttttaacgtctccaagaaagatgaatggtgagttgagagaatagttacaaaggcccaggcatctacacgaagttagaagagatgcagaaaaggctgctaagaggctggtgggaggaccagaacgggccattcagtaaatacctaagacatgcctactacaagacagccatggtctccacctcccagggcctccatcccaggtagaacactcatcactctgtccagccccttcattttacacatatgcgattgagatctcgaataatgaagccacttagccaccttatttgtgggagtcagaatcggactgcagtattaagcgctttcctttacaaagcgatttcttttttagaagttttactcgatattactgtaatacaagacattttccaatattatattagtaacagtttaaggggaaaggcttttttctttgccaactgctcctgaaccagctcttctcgtcattattcacttggttgccatcagcattcaaacactgattatgccactgtcacaggaagtgtgtgctagttaggaaatcagatcaaaactgaaactctagaatcagtccttaagttttagttttattttccctgaaaacattcctccttaaacgaaatttttttctttttttttggtttttgagacggagtttcgctcttgttgcccaggctggagtgcaatggcgcgatcttggctcacggcaacctctgcctcccaggttcaagggattctcctgcctcggcctcccgaatagctgggattacaggcatgcgccaccacgcccggctaattttgtatttttaaaagagacggggtttctccatgttggtcaggctgctctcgaactcctgacctcaggtgatccgcccgcctaggcctcccaaagtgctgggattacaggcgtgagccactgcgcccagccactaaatttcataaatggtaagatatccaaccttaccaaatgtatctatagtttatatttttgacaggctgcataataaatccatagggctctatctgaatttcaacaaggattattcagtaagaagaaaatgagtgttgtatctcagctgcgcccatcagctctattccccgaatgaccgtgagcttgaaggaaagccatttaacgcacacggtgccgatgggtgtcttctgcttggcgacatcgtgggctttatcctacttcctcaaggaggcataaaagatgattttttccccacaacaatgagctttcttacagacatattaaacggaaatgaaatgtgctactcattcccagcgttgcagaaccaggtgaggcccgagacaaaggcgcgggatggccgggacgccagcccggggcggaggggctggcggcgggagcgtcacccgcacctccgcggggagacgtccaagcctcggcgctcccagcccggccgccgcgccccgctccaggctggggctggggctggggtcagccccgcagagcaaggggcggtgatgtcatcctctcggcgagcttggctgcgggccggaggcgaggccctgcgggaaggtttctcggcaccgctcaccggggcgctctctccgagtcacgcccggtgcctccccgcgcgggaagaagctcaatccccttcccgccccccgcgccggggaaacggcggcaatgtccgggcagaatggggccgggcggagcgccggcgaccgggaagctcaggccgtgggctgccgagactggcctagctgaaggaggtgggcagccaggcctttccgggcaggaccgcgtgtccttccgcggccagggctctaggcctccacccttccgtcgccgacccggcggttacctcctccgcagcctggtagtcttccatctttcctccggcgcgtcccctccggctccctgagtggcgcggactgcgcaggcgcactcaggccccgccccggacctgccacgcccctctcctctcgcgcctgcctcgcccatgcccagctcccgggccccgcccttcgctgcccggaccctcagtgaccccatccctgggcggggcccgtgggtggaccctgaattcgcctctcctcctgtcctctgggaggtggtagtttccatgggaatccgtgagggtagccgggcagctccctaaaccttagcaacagaaacaaaacacacgtacaaaaggcagtcctggaggggaagcgtggtcccggcccctcctccggtttgtactgtgtggattgacgcggacgttcaaacccgctcggacacctggcaacaaactcgaaagtgactgctgaaggcagtgcgcccggtgagacgttgttgcagttcccttggggactgggattggcatgctttagctatctgaacgaaacttccctttggggagttaagttttccaggtaaatgagaatttttcctttaagcaccattaaaaaaaaacattttgggtggaaaattttgtaaaatgtggcacacttcctgactaccttaaccatagtgaactagacagactttatttgtatgtgggttctttatggaaattaggaattgcactgggctctggtaaactgccctccacggaaagctggggcatatgcatctattggcaggtattctgaggctccgagttttgattttggcgtttgctttttctggtttcgtcatgcacttgaattcaggttgctggaacccacttcccattccccaagaaagagctgactgcaagggtcccagggatttggtagacctaaacttcaaatcccacatctaatccatcaacaacccttgttatttctaccccatatgctcgggaccccagttaaagattgatatctctcatctggattatgaccatcggactgtaacctggtcggtctatcagggtcttattagagcccttcaagaggaacctaacccaacgactcctccctcccctcacccattctgccctgccataagtcaatagttactaagttgtcagactatagactaatcttagtgatctttggatgactaaacttttaacatatcttagctcaaaatctcctacagagagccattctgtgaccacggcatctaaggtagccgacctcctcatcctccacccctgcatcctgtacattttcctcatagcacttctctcagtttgcaagaacgtatttatggttgcttgttgatggtgtgtctccatttagaaactaagtaccatgcaggaaggatctgttttattcactaatgtatccccttccttccacattgtgcctggcacataatagctacacaattaacatttatttatttatttatttagagacagggtgtcattctgttgcccgggctggaatgcagtggtgtgatcggagattttgagctaagatgtgttgaagtttagtcatccaaagaccactaagagcttgaactcctgggctcaaggtattctcctgccttagcctcctgagcagctgggattccaggcactagccaccacacccacctatttttttaatatgtcttttgtagagatgggatctcactgtgttgcccaggcaggtctcaaactcccgggcttaagggatcctccagcctcagcctcccaaagtgctgggattatagctgtgagccaccatgcccggcctaaaatttattgcatgaatcatttccctcatgggtgttagctttgcctcagacccaaatggagagaactggggagtggaggaagatgcaactacctgcctccttgagggaaacagggctggcgagaggagggcagagccctgactgacacaaggctgcttggccctgggtgttcggcctgagcgaggagacttgctgggcaggctggttgctttaccacacctggtcttcctctccttggattctgaactttatctaccttttgaattcctttcttattacctggcttcaactcccctgtcctggtgtttcagtcgtg

SEQ ID NO: 585054 - DNA, 4001 bp, Homo sapiens
agctaatttttgtatttttagtagagacggggtttcaccatgttggccaggatggtctggatctcttgaccgcgtgatccgcccccctcggcttcccaaagtaccgggattacaggcatgagccacagcgcccggccagtagaaatagctcttaaaagtgtagataaccggccaggcgtggtggctcacgcctgtaatctcagctactcaggaggctgaggcaggagaatgcttgaactcgggaggcggaggttgcagtgagccgagatcgtgccattgcactccagcctgggcgacagaatgagactccgtctcaaaaaaaaaaaaaaaaaaaatgcagataaccaatgattcagcatacattgcaatcatataaaaaatgcttctgaatatgtatatgagtaacatttatattcctgtaatgaaaaaccttttgtgtgcacataaactcaaaaggatattattattcctggaataataatttcatgtcaaggagaataaagttttgaaataacttggaagatggtgagggtaatttagtatactttaaatacttaaatacaatgaactagatataataaacctggcttgaaagatagtcttagggacctggcccaacaaacactgttaaaattttttaaaaatcaacttgaagctctcataatttcccattatcaaaactaccccctgcaaatctgtgaatctaatccaagaagtatgtcaatagctggttgtttaaggttaggtttatgaaatagtaacagaactgtgcaggggtcaaatatgcttaaaatatgtccaaacatgcttaggtcaagtcagtaagagtatctgaagctaataaaagcatggaatattcttgcgactgaaaacccagcacaccggatactgctatgtctaagcaggtactgtgctccgtttcccccctgctggcagaccctagtcactaaaaaacgatgagcttctttgactaagactacatcacacatgcccagcaagtatctctggggctggaaagcagttaagaccgaacccggggagaaactgggaacaggaaagaaataaaaaacgcctcattattcccaaacccatcccatttcccaaagtgctgcctatgtgctgactttcttaaagactcccgcaaaatcttgattctccaaaaattaaacccatttggagctgagacaaggtgaggtccacgcctggtataatcaggctaccatggatctaactgagtctggttcggttctagccccgtggaggccaagcctcaccacgagggtgaagacccggaggcatggaggaagggaatgaaggagagaaaaggagaaaggggagacctccgggccacacttctttctagtaccaacaaaaagagaagccgcatactgacctaaatcatctctcaaaggcgctttataaattacagggacaaagggagggggtggcgggtggcctgggaatcctacagacaccctaccctctgacccacccccctccccctccagcacaagggaaggaagacagaaaacagagctcaactcggccattggcgagaagccccctccggttttctatcgcccatccatccgccccctagaaaaaaaatccacgtaaacaccatacccaccccctggggcagacactcccgccccgaggttcctagaaccggaggccggggcatttacttagttagatttttcttgcttactcatttccctcgagcacccaaccccccgttcccactccaaaaccccgctcaaccgcctaccctcaccgcttcagcccccaacagaatccggtgcccccgcggcgtcggcggcccccgagccgtcccggtcactaacctgctgctgtaagggcatttccgaaaccagcctggctccggggggaggtggggggccggctggagagggggcccggagggccgaacagaccggcggcgcagggcgagggcgggcgccggtgggggggtggggagaggagagggagggtggcggtgccgggggcgggtgcgagggcgccgggaccgtcccaggccagggagccggcgagcaggaggaagtgggtgcccccctctccccctccagcgccccctcccgccgccgcctcctccccagtcacaggcgcgtcctgcgcgcacgtgtgcgaaacgtcaccggcgggtcccggagagagggacagacccaggcggcgggacgggaacccagctgcccccgccctccgtcgccggggggcggagagggggacagggcggggaaggaaggggcaaggggagaggcgggtcaagggcaggcccggggcccggcgaggaaggcctgggcgcttgggccacgcgggcgccgccgctgccactgccaggatgcgcccaggccagagcgccagcccgcgagcccctcaccccagacagcccacgccccagtccgcacccggcttccagccccacctcccccacgcccgactcccctccacctcccccagcccctttgttgccgggagttacagatcctaaaatgtgtcaagcgcagccccgccgatcccctgcgctccgagcacgccgcagggacccccggccgccaacgagcctccaaggccgactgggggctagcaccccaacagtcccccggtttcaacccctcagagccccccacaccccagttcactactccctcccccacccccttctccatccggggcgtgaccccttcctacgcccgagaaagaggaagcttcgagttggaggggaagggagagtgggggtagggaaaagtgcaggaaaagaagggggggccgcgaaaagttttggagtgtttgatgtggttcgcgccaaggcaatccccgccgccccgcgcgcctggccgagccccccgaccctcctggcgccgggaagagcactcaggtctaacaatgaaccctcgttggaggggcagcccccgaggcccacgatgctcggcccagtgctctccccgagcggcccgcagcgcgcccacgaccccgcgcggtgcgagcccacctcccgccggggctggggacggtggggagggagggtattaccggagggccgccgccgccgccgctgccgccgcgtcccagcgctggtggctgctgcagcagcccggctctgctggagggtccgtgcggcgtggtgtagaggaggctgccggcggtctgctccgcgccgggggcactggggaggagggggccggcggctacggcgccgctttggagggaggaggaacaggaggtggtggaagtgttcgtggtgaggatctggatgtacgcgcccggggcggcggcagcggcggcggcggcggcgaagccggggctggctagcagtgcccttttgtccatggaggctgcagcggcggcggcgacgacagccgccccctccccacccccggcggtcaccaggtactgctccagagcgggctggattccctttctcatctctcgctcctgctctttttagtgttatggtatattaatgtattgttttcaatttctttattatttgcagtcggagtttccaagtctctcctccttctctcctccccgcccggcgcttccgagccccctctctctcttttctttttatttttccgcaccgcacaggccccgggggccaaaaataatcggggctctggagagaggagggtcccggccgcacggatatcgggccccaagcggggatggaggcgtcgggggcggccgatgcaacggattgcgaggcggcggcggcagcccgggtgctgcggccggcagctgaaaaatggctccaggaagctgctgctgacaatgaatgaagggatacggtttacgcgccaaggtcctcccgcgaaactcggatttcccgccggcttttcaaaccatatttgcatatccccgcccctcaacccgccgaggaccgttcccacagcccattgggccgctacctccttacttcagtcccaatcatggagcagggccgcgacttgctggtttccattggctgccgtgcatca

SEQ ID NO: 585055 - DNA, 4001 bp, Homo sapiens
tcaccgcttcagcccccaacagaatccggtgcccccgcggcgtcggcggcccccgagccgtcccggtcactaacctgctgctgtaagggcatttccgaaaccagcctggctccggggggaggtggggggccggctggagagggggcccggagggccgaacagaccggcggcgcagggcgagggcgggcgccggtgggggggtggggagaggagagggagggtggcggtgccgggggcgggtgcgagggcgccgggaccgtcccaggccagggagccggcgagcaggaggaagtgggtgcccccctctccccctccagcgccccctcccgccgccgcctcctccccagtcacaggcgcgtcctgcgcgcacgtgtgcgaaacgtcaccggcgggtcccggagagagggacagacccaggcggcgggacgggaacccagctgcccccgccctccgtcgccggggggcggagagggggacagggcggggaaggaaggggcaaggggagaggcgggtcaagggcaggcccggggcccggcgaggaaggcctgggcgcttgggccacgcgggcgccgccgctgccactgccaggatgcgcccaggccagagcgccagcccgcgagcccctcaccccagacagcccacgccccagtccgcacccggcttccagccccacctcccccacgcccgactcccctccacctcccccagcccctttgttgccgggagttacagatcctaaaatgtgtcaagcgcagccccgccgatcccctgcgctccgagcacgccgcagggacccccggccgccaacgagcctccaaggccgactgggggctagcaccccaacagtcccccggtttcaacccctcagagccccccacaccccagttcactactccctcccccacccccttctccatccggggcgtgaccccttcctacgcccgagaaagaggaagcttcgagttggaggggaagggagagtgggggtagggaaaagtgcaggaaaagaagggggggccgcgaaaagttttggagtgtttgatgtggttcgcgccaaggcaatccccgccgccccgcgcgcctggccgagccccccgaccctcctggcgccgggaagagcactcaggtctaacaatgaaccctcgttggaggggcagcccccgaggcccacgatgctcggcccagtgctctccccgagcggcccgcagcgcgcccacgaccccgcgcggtgcgagcccacctcccgccggggctggggacggtggggagggagggtattaccggagggccgccgccgccgccgctgccgccgcgtcccagcgctggtggctgctgcagcagcccggctctgctggagggtccgtgcggcgtggtgtagaggaggctgccggcggtctgctccgcgccgggggcactggggaggagggggccggcggctacggcgccgctttggagggaggaggaacaggaggtggtggaagtgttcgtggtgaggatctggatgtacgcgcccggggcggcggcagcggcggcggcggcggcgaagccggggctggctagcagtgcccttttgtccatggaggctgcagcggcggcggcgacgacagccgccccctccccacccccggcggtcaccaggtactgctccagagcgggctggattccctttctcatctctcgctcctgctctttttagtgttatggtatattaatgtattgttttcaatttctttattatttgcagtcggagtttccaagtctctcctccttctctcctccccgcccggcgcttccgagccccctctctctcttttctttttatttttccgcaccgcacaggccccgggggccaaaaataatcggggctctggagagaggagggtcccggccgcacggatatcgggccccaagcggggatggaggcgtcgggggcggccgatgcaacggattgcgaggcggcggcggcagcccgggtgctgcggccggcagctgaaaaatggctccaggaagctgctgctgacaatgaatgaagggatacggtttacgcgccaaggtcctcccgcgaaactcggatttcccgccggcttttcaaaccatatttgcatatccccgcccctcaacccgccgaggaccgttcccacagcccattgggccgctacctccttacttcagtcccaatcatggagcagggccgcgacttgctggtttccattggctgccgtgcatcatggttaccggggcgacagggaccctatttgcataggcctccttgattggctggcagaagagcagtttttagggggtggggcaaagaatttccttctctcccacggaagaccacgcctggcctaggctccgcccctgtccccgcccgcccgccgggccggcgctactgacctgggcagggactccgcgccccgcagactcagtgtagatctagtctagagcccaagtttcgcttttggaaattgtcaaggtgactaagggaacactctttcctttgaccagtcagtgcaataaacgaacagcgcaggagatttttccagatacgtgccaaaggcaagttggaccatgcggacgatgtctggcaggtgcaaaaggagccctttaaatcgtgggcttctcccttcctgaaatccaaccaatgacgcggcgagagctgatcccgaggccggggctgatagacagaagcatgtgggcagacagaatcgtgggggcagaaggttcagcagacgcgattgcgggcaccagttaacattccagatcattcccggtaccttcattattagcctggataggggtaaagtacaaattaactcttttgtcttacaacggatattggtttgaatccagcagacattccctctggcccagaaacacccagggcagttaatcagggctaacctagaactgatctacgggtttctaatccgccaagcagtaatccgaaaaagtacacgcttcccacgatgacgtcgtgcccccaacgaacgcaggcacgcccaggcatcagcactttatatcttcagttttgtaggaagttctctgactggaagcaaacacaacgactcaaacctatcccaaagtatttttaaaatagtgtctttttttaaaaagtaaactagaaattgtcatcagaaaaatataaaatgatgtgtcaaactgactcctgaatttgttcaagtattcatgggtcttaaaattaaagcttgctcctgagattgagcaggaaaagagacccctgcaggaatgtgggggaagttatgtatgtagagactagatcataatttatagttacgtgcaaaacagctgcagaattggtgctcataggtgatgaggattgcaacaccttgagccctttcacaagatttttattactattattaatttcccaaaactcttactcagagtgctatgaaacacctgacaagatgtgtcagatcaggctaggactccttaatattttagccttgttaccttttctgaaacagatgagttaaaagttccattaaaccttgcaccaggctcaggaatattttagtcttgcattcaggctagttgaggatccatagccctaaacatttgtcgacactggtagaggtgacactatctttattttttgagacagagtcttgctgttgttgcccaggctggagtgccatggcacgatctcagctcactgcaacctctgcctcctgggttcaagcaattcttctgcctcagcttcctgagtagctgggactacaggtacgtgccaccacgcccagctaatttttgtatttttagtagagacagggtttcatcatgttggccaggctggtcttgaactcctgaccctaggagatccgcctcccttggcctcccaaagtgctgggattacaggcatgagccaccgcgcctggccagaagtgacactatctttagggcagattaagtggtactcaaagggcatgagctagaagtgtaatataccagcagcttccctgctcttgttccatcaa

SEQ ID NO: 585056 - DNA, 4001 bp, Homo sapiens
tggagctgaacaagctcactaccaagccactgaaaagaggaaagaaagtccatctgagatcaaaggtcgcacttcccatttttttcaagttctgcaaaggtgatctgtttccctttagtgcacaggaaataagtgagatgttctctaaaagcctttacctgtttcaccttatactgtaatcactaaatccagaagactaacgcaaactcatacttaaaaagaaaacaattagcctagagcacgtaatagaaatcagaagcatttgatttcagactgtctgtatatcgcctgtttgtaaaagttctgattcggttgtaggctgtcataacataaactacctttcaaggttcattacatgccacccacaactctctccctcacacagccaaaatgcacaactttcagttcctgaaatccttttgattttttcgccatctcaagctttcgcatatgcgatctacctgttacatttttgtcttcctcagagtaacttcaaatcatctcctctaacataggactacataaagtccccttattgtctgctctcagaacatctgtatctctcatcaccactctcactcactctttgctgtaattagttttttaaccagttcttcccattagtcttagctgcaagagggcatttgcagtgcctaaagataatattcttaagactaaacaggggcttaagaatctggccacaaatcaactctccaactaccctgtttataatcctcacaactcaccctgtttcaatgccatgcttcttcacaggctggcttcccttcctggaatgttaatcattgcaggaatcccagctgattatacagtcgcctttcaggccagaacccaataaaaaatcaagaaaggatcgcccgttctattactgcgctgctccctcccctcgtagatttcacaaatatacttctcaccacaagcttgtctgttccaagagaatgctagctcttctaaagaaggagccctttgttttccttgcccttgtccagttcctctgcatacctctagcacctagagcaacaactgctatacaggagcccagatgtggaacagagcaaagaactgagtgttgatttaatgttgcctgaagtccttaacagcaccttcaacctaaacttaactgtgtttttaatcccctacacgtgtaatccctgtatgtgtgcgcagcgttaaaaggattattgtagctcaaaaattctccaatgaaagaacctctaccagaaaggagttgctcatctttcgttcttgaaaagttggctgcacgatacaagtaagaaaagttttagttaggcaagacaacttatacataaaagacaattatagggaacattacctaacttagcacagggcctcgaatgtattccgaaattaaatcagcatgtagaaagcaagcctcctcatgctttttaaagtgtaatctcgcgacctcgcggcgcgctctgggaagaccgattcatctcttcccctcgccctctttccccggccggcgcacagccggcccgtggcgctcggcaccgcgtctccacgtccagcgcggggcaggcctgcgcggcgcttgcaagggacaagccgcggagccggggaggctcgccgtctgggacacgtttggagaagcgagcggtacagtccattccacggcgacattttaggattctcccactgacaacactaaactgaagcgctaagaccaacccttacgaccacttaccgtcgcaggccacggtggtgacttccttttccgctcccctacacacgcttttccgttttgcgtgcctttgtttccgctccccccgggaccatcgtgcgcccctgtcctccgttcttgtaggtcctctcctcttctccgcgtcttctcttttactatcccacgctctcctttcctttctccgggaactttatcccgttcccctgccggttcccgtgaccccggaaatcccgctcctgccgcgaggcgccctccgcttcgcgctccctcgtgtcacgagggagccagggtgggcggtctcctattgtacttggcttttgaattttcgcttttgcagcacaaaggtagggctgggaaaggaggctgccgaaccgtgcttgttttcgctcagataaacgtgagaaaaagtggaggtgaggaagccagtgtaggcaaatagcgagaggggagaagacagaaaggtaccgaaggtcgaccttttttaggtatcttatccaagttattgaggggaatgggtatttagccagttttttgtttgtttgtttttatccgaatatccagtgtgtgtcttgaatgtgtgaatgtgacgtgtttataaagctcagtaagcttaaaattccgtgccaatacattttgtatgccgcagacaggaagtgctttggaagacccttgaaaggggaggtgattttacaccaatattgagatcattttgtcagagtcgtgggactaaaggtagaccttaggtagtcgatgtcaaagataagcgcagctggacgttaaagcggtgaaaacattcagttaactactgacaggaaagagctgagctctatttcgattcgtgcagagatcatctgggcatttttaaagggacgttttaaaaggagaaaggggatatgcgggcgctcagtagagaaagtgaacctacagagttgttagtgtaaatgtgattaggccagctgtgtgtttgtgtgtgcgcgcgttttaacagttaccgcaggattctatcctcctacggaggattttatccttctcgattacatttcaaaggaatgactctctggtccttgagagagaacttctgagtggcaagaaataagtctttacaattgcaagccctttagtaaacgttctaagaaagggatgtcagagacctatcatcagttgtgtgctggttacatcacgtagttaagctttctgaggcagtcgccctgggcacagggccttatgctgctaaagcttgctagagtttggtcaagtctctgaacgcaggggtttagatgggatggtcatgttcctggagttctgcagtggtcataggtatgatttgaataagtacagggaatattctagtcggaggaacagaatgtgccaacgcgccgaacagggaggatagttttacgatacggagatgtgtatgatagggaataagtgggagcccagtttggactaattggaagaagtcattattagaagtactgtatttaattctagtttgttataaaatgagactccaagatcactgagccatttcactgagactccaagatcaccccaatgctaggctaatctccatggcgcctagatctatgcccactccattccccatgttggtccccatagtttcaggcaccaggctccaacaccaggttgggccctacagccccagtctccaggttggcaccagtggatataggctttaggtccactgactgctggtccctacagccccaggttccagtgaacccaggttccaggcctgctccaacaaacccaaggtccaggtctaccccagtagaccctggcaccagaactaccccagagggcctagcctacaggctaccacccacaaacccagcctccatgatggcctctgaagaatcaggctttaggtcttccccagcaccagactagactgctagactgatgttccacttttgtccccatggacccaggcaccaggcccatctgagaggtttcttcagttttatttttcagtaataactttcattcttctttctcagtgataactgtagtactcagtgggctttctatttctggctcccattttccatctttctttttaacactttgggaaaatatccaagttaaactctatatagtggggtaggtggacaatgaaagataagtaaatacataatatgtataatcaacggagtgaaaagacagcctgcagaatgggagaaaatatttgcaaactatatatctgacaaagggttaatatccagagtatatgaagaagtcaactcaatagccaaaa

SEQ ID NO: 585057 - DNA, 4001 bp, Homo sapiens
cctagggctgccttcaatttgggaagtgtcccattctaagaaggccaaatagcctagagctcagggttccttaggaatgcttctagtctagggaaaataagctgtcaaggtcatgtaccagttcagctaataaacctgggaggcctacatattcagagccaaacatagcatgcctagggtcttgcttttgcctagaatatgccgttaatcaggtatgaagatacaacccaatgaagcagatacatgtggggcagaggccccaatttccaccttgataactttagaataaaagtgctaaagaaacttggtaaggacttagatagttgctttaaaagttttttttttttttgcctgtctgccataatcctctgtttagaggaagaaacaaggagttaatctagaaaataaggaggagggacttataaaagcattagcattttgtgggaaagtagaatcagtaaacaacatatcttctgctctcattgtaaagggtctgtctgctctgtcttgatacattacccctctctccaacatcaacactacagcaattagtatgaacgccatcagatctatatccttttatcctcaaatctttaaaacattaaatatttaagtaatagtagtattttgcctcattagacatctttgatccatcactgaaatgccaatttttccaagaaaatcttgtaatacttcatgtatcctttctctattaattccatattttctatcttctctcattctattccctcccactactgtctctccttttctctcctcctcttatattccttgtctgtgccagaaaaacctgagaacactgcttaagcctgctagattcactgaccccaagtttagaaatccaattctaaaaattttataatagcctattatgtacactttcgtcccagttctaaattcagagactatcttagacaaaagctcagtgatgagatgacaaggtgttagtcattattaacctactatagtatctaatagtataaagtgaacaaagcttaagattcaggttctgtagaagtatgtagttaaacgattggttttttttggatttcttccagaatcacaggaagatgaaaaggttctgaagcatttacaattttataagctttcttcggggtaaaacttatgtttaaaacttgccatgcaggatgtcttgcagccccaccacaaagaagattcagtggagctgaacaagctcactaccaagccactgaaaagaggaaagaaagtccatctgagatcaaaggtcgcacttcccatttttttcaagttctgcaaaggtgatctgtttccctttagtgcacaggaaataagtgagatgttctctaaaagcctttacctgtttcaccttatactgtaatcactaaatccagaagactaacgcaaactcatacttaaaaagaaaacaattagcctagagcacgtaatagaaatcagaagcatttgatttcagactgtctgtatatcgcctgtttgtaaaagttctgattcggttgtaggctgtcataacataaactacctttcaaggttcattacatgccacccacaactctctccctcacacagccaaaatgcacaactttcagttcctgaaatccttttgattttttcgccatctcaagctttcgcatatgcgatctacctgttacatttttgtcttcctcagagtaacttcaaatcatctcctctaacataggactacataaagtccccttattgtctgctctcagaacatctgtatctctcatcaccactctcactcactctttgctgtaattagttttttaaccagttcttcccattagtcttagctgcaagagggcatttgcagtgcctaaagataatattcttaagactaaacaggggcttaagaatctggccacaaatcaactctccaactaccctgtttataatcctcacaactcaccctgtttcaatgccatgcttcttcacaggctggcttcccttcctggaatgttaatcattgcaggaatcccagctgattatacagtcgcctttcaggccagaacccaataaaaaatcaagaaaggatcgcccgttctattactgcgctgctccctcccctcgtagatttcacaaatatacttctcaccacaagcttgtctgttccaagagaatgctagctcttctaaagaaggagccctttgttttccttgcccttgtccagttcctctgcatacctctagcacctagagcaacaactgctatacaggagcccagatgtggaacagagcaaagaactgagtgttgatttaatgttgcctgaagtccttaacagcaccttcaacctaaacttaactgtgtttttaatcccctacacgtgtaatccctgtatgtgtgcgcagcgttaaaaggattattgtagctcaaaaattctccaatgaaagaacctctaccagaaaggagttgctcatctttcgttcttgaaaagttggctgcacgatacaagtaagaaaagttttagttaggcaagacaacttatacataaaagacaattatagggaacattacctaacttagcacagggcctcgaatgtattccgaaattaaatcagcatgtagaaagcaagcctcctcatgctttttaaagtgtaatctcgcgacctcgcggcgcgctctgggaagaccgattcatctcttcccctcgccctctttccccggccggcgcacagccggcccgtggcgctcggcaccgcgtctccacgtccagcgcggggcaggcctgcgcggcgcttgcaagggacaagccgcggagccggggaggctcgccgtctgggacacgtttggagaagcgagcggtacagtccattccacggcgacattttaggattctcccactgacaacactaaactgaagcgctaagaccaacccttacgaccacttaccgtcgcaggccacggtggtgacttccttttccgctcccctacacacgcttttccgttttgcgtgcctttgtttccgctccccccgggaccatcgtgcgcccctgtcctccgttcttgtaggtcctctcctcttctccgcgtcttctcttttactatcccacgctctcctttcctttctccgggaactttatcccgttcccctgccggttcccgtgaccccggaaatcccgctcctgccgcgaggcgccctccgcttcgcgctccctcgtgtcacgagggagccagggtgggcggtctcctattgtacttggcttttgaattttcgcttttgcagcacaaaggtagggctgggaaaggaggctgccgaaccgtgcttgttttcgctcagataaacgtgagaaaaagtggaggtgaggaagccagtgtaggcaaatagcgagaggggagaagacagaaaggtaccgaaggtcgaccttttttaggtatcttatccaagttattgaggggaatgggtatttagccagttttttgtttgtttgtttttatccgaatatccagtgtgtgtcttgaatgtgtgaatgtgacgtgtttataaagctcagtaagcttaaaattccgtgccaatacattttgtatgccgcagacaggaagtgctttggaagacccttgaaaggggaggtgattttacaccaatattgagatcattttgtcagagtcgtgggactaaaggtagaccttaggtagtcgatgtcaaagataagcgcagctggacgttaaagcggtgaaaacattcagttaactactgacaggaaagagctgagctctatttcgattcgtgcagagatcatctgggcatttttaaagggacgttttaaaaggagaaaggggatatgcgggcgctcagtagagaaagtgaacctacagagttgttagtgtaaatgtgattaggccagctgtgtgtttgtgtgtgcgcgcgttttaacagttaccgcaggattctatcctcctacggaggattttatccttctcgattacatttcaaaggaatgactctctggtccttgagagagaac

SEQ ID NO: 585058 - DNA, 4001 bp, Homo sapiens
tttagtaaacacacagtgtatttatttaagaagtcatttgcccaaaattctttaaataacgttcgaccgtaggcatttacctgcttatatagcgcgtagagttttagcttcacttcgtttcctggatcctttttcaagagtttcacttgattcattgaattttcaaagtccttctgactggctctcattgctgttctattcatgtgcagctgaactaccgggaaactagtgacctgcagagaactacaattaggcagactgatttctatttgttcccaaccctcacatttctgcagcctgatttctaattgttcccagcctatacataacaaaatgccatgtttgtctatagatattttctttatacttgcctcagcaaactggctgcaaataattggctgtaaggattccaagataataagtcaatacagaagctaacagtagtaactttaaataaaaggaaaagtaaccatccagggaggtatctgtaagcaactaaagataaaagcagccagaacaggaatgaccatgtaaattttgccaaaggcaagaagtgaagtgcatgcaagacagtggacagcaggaaaccaaaaggctaaagtgcacagaatttagtgaagtgtcccaaagtcctgaaacagcctctgcactcactgataagccataagctatatcaggtcaattcttgcctctttgctggcgaagctggtgttccaacatacacacaggtggaaggaggggagaatggatgtgaacatacaagaaatattcaaaagaacacacgagcagttgctggcattccagatagagccacagccttctcagcagatgggagggaatctacctgcagtggaagggagtcagtgaagggggctcagcaggcgtgcccctttctatgggtatgtttaaccagccagccaggaacagagcagaaacagcaaccaccgcgggggtgatcagcacgtttttaagcacacatagtgagcgggggtggggtggcaaacttgaatgcacaggactcaggccacaagctaaaaatggagttcacgacgatgacactgaataatagagttaatggcaaaaaagatgattaaaataatacaggttacaaagcccaaacctaacacacaaacacaattatgtaactcgaaaatggtgcaatgaactctaggttcaaactttggactattagtaactgattcagtaagatcagcctagagtaagttttacattaaaatgattttctgtaaagggaaaaactgcatcttatatggcaaattccacgtagaaaacgaaagaaaaatttaaaatatccacagaaagccgaaatgtacaagtttccacaaaatgtggaacaaatttatttttaaataaagcgtgagttttaaaaacaaatagcaaaaacacgaccatttaagaaaatacataaagtcgggaaaatcactcataattctaccacttcaaggccaccaccgtgtttcggttttgttccctatgcacagattcgtgcgggttcccgggaccccagggaggtgcagcgtgcttcttagccgttactctgtacccggccatttcactttatagcatacgtgttctccaagaagcagagtgttaagtccacacgagtgataacggcttgcgtttacctcgcttttagcaagcgacgctttgcaccccagaagcagcccggctgggaagtgcaggcccgggtgctcagctggggcggctcacccgcccggagtccggccccaggaggatgggagcgtgcgcggaggcaggcggagaccttggggactgctgacagggaaccatagccctgacctcccgacgcgcccatcctgaccactccgggcccagcggtgcaggagggcgcgcgtgaggtcgtcactttttagcactacctcaccggaaaaccagcaaagcaaaatcctgttgccacctagacaatagggaaggagggtcttccaacggcggcgaccttcgcctggacagcggtatcctgcgggcgaccatgggccgaacggccgggactccaagcttacctcggacacgaacgccgcgccagtctccaagccaagtacgccatcgccatcccttgggcggctctagggctgcgggggctcgggggtggggccgggtctcgggggcggggcctagctcggtctgcgggggctcgggggtggggccgggtctcgggggtggagccgggactcgggggcggggcctaggctcccgggctgcgggggctcgggggtggggccggggcttgggtgcggggcggggccgagagcagagcccaggcaggagcctggggcatgggcggggccagggttggggcggggccaggctgagagcgtagccacgccgcattcgccatcgctagcccgtggcctcctctggggctgcgggggctcgggggtggggccgggggggtcggtgcgtgggcggggcgggagctctaggcggttaggagtcggggctcagatgcgggggcggggccggagcgaggccgggtatcacccgggagtggaggaagtgcggggggttcgcggcgcggggagggtgatcccgggaggacttgcgcggcgcgtggggcggggcacagatgctccccggcctggctccgagtaactgcgagctggaggcgcggctgctctctcgggcggacctcagctctgcgaaccctgtggctgccggagcactgagcgccctgcccggagtcccgcggagcctggcgaggaggggtcgctgcatcccgagggccagccctgagccgggaggtggggtaacaattgagggcgtatgcttaaaagctgctaggtcatgcatccccaaatcgaaggtttgcagacctggtaggacgcctgggggtcagaagtgatttttggagtacccaagtttttagtgtcagtgaagagtttgtggatatttttgagttctgctgaggcatttgcaaagtattttctttggggaagaattcttaagagttggaagggccttggctgtgtcaccttgtccagttcccagagaaccaaaaaacaaaacagaacaaaacgaaacaaaaccacccctctaaattctgtgcccaagttgtcccatccaagcatgcctaggagttttagatttatgtagctgacacctgtggactacctatagtgagccaggctaattgtaagtctttggacaaccctgtaaggaaaatgatattgccctgttgagctgatgtggaaattgccctgttgagcatattgccctgttgagctgatgtggaaactgagacccagaaagattaatcaggtgaattccccaaagacaggaggcttgcaggtgggcagagtccaagtctcaagtaactttatcattaagtttcatcaggtagatctgggtaatagtgtagatggggcaacaccaaaagtcaaatagaacaatttgggcttatcccaaagagatttttttttttttgagatggagtttccgtcttgttgcgtaggctggagtgcactggcacaatctcggctcactgcaacctccacctcctgggttcaagtgattctcctgtctcgggctcccgagtagctgggattacaagcatgcgccaccaggcccggctaattttttgtatttagtagagatggggtttcaccttgttggtcagactggtctcaaactcctgatttcaggtgatccacccgcttcggcctcccagtgttgggattacaggtgtgagccaccacacctggcctctccatatattacaaagtggtagttggtaggctgagctgcctctctcagagaccttgactctctccaaggctgttagataacctcagaggtaatggaaatgcagtaatcagatattgcagataatacaagactcattcatttccagaagatgaaacagctgtcatggaaatattttttaaatctcatactggtaagcatattttgatagtgaaaccttttgcaatgcaagcaaactactctcaggcttatacctacca

SEQ ID NO: 585059 - DNA, 4001 bp, Homo sapiens
tttttcaagagtttcacttgattcattgaattttcaaagtccttctgactggctctcattgctgttctattcatgtgcagctgaactaccgggaaactagtgacctgcagagaactacaattaggcagactgatttctatttgttcccaaccctcacatttctgcagcctgatttctaattgttcccagcctatacataacaaaatgccatgtttgtctatagatattttctttatacttgcctcagcaaactggctgcaaataattggctgtaaggattccaagataataagtcaatacagaagctaacagtagtaactttaaataaaaggaaaagtaaccatccagggaggtatctgtaagcaactaaagataaaagcagccagaacaggaatgaccatgtaaattttgccaaaggcaagaagtgaagtgcatgcaagacagtggacagcaggaaaccaaaaggctaaagtgcacagaatttagtgaagtgtcccaaagtcctgaaacagcctctgcactcactgataagccataagctatatcaggtcaattcttgcctctttgctggcgaagctggtgttccaacatacacacaggtggaaggaggggagaatggatgtgaacatacaagaaatattcaaaagaacacacgagcagttgctggcattccagatagagccacagccttctcagcagatgggagggaatctacctgcagtggaagggagtcagtgaagggggctcagcaggcgtgcccctttctatgggtatgtttaaccagccagccaggaacagagcagaaacagcaaccaccgcgggggtgatcagcacgtttttaagcacacatagtgagcgggggtggggtggcaaacttgaatgcacaggactcaggccacaagctaaaaatggagttcacgacgatgacactgaataatagagttaatggcaaaaaagatgattaaaataatacaggttacaaagcccaaacctaacacacaaacacaattatgtaactcgaaaatggtgcaatgaactctaggttcaaactttggactattagtaactgattcagtaagatcagcctagagtaagttttacattaaaatgattttctgtaaagggaaaaactgcatcttatatggcaaattccacgtagaaaacgaaagaaaaatttaaaatatccacagaaagccgaaatgtacaagtttccacaaaatgtggaacaaatttatttttaaataaagcgtgagttttaaaaacaaatagcaaaaacacgaccatttaagaaaatacataaagtcgggaaaatcactcataattctaccacttcaaggccaccaccgtgtttcggttttgttccctatgcacagattcgtgcgggttcccgggaccccagggaggtgcagcgtgcttcttagccgttactctgtacccggccatttcactttatagcatacgtgttctccaagaagcagagtgttaagtccacacgagtgataacggcttgcgtttacctcgcttttagcaagcgacgctttgcaccccagaagcagcccggctgggaagtgcaggcccgggtgctcagctggggcggctcacccgcccggagtccggccccaggaggatgggagcgtgcgcggaggcaggcggagaccttggggactgctgacagggaaccatagccctgacctcccgacgcgcccatcctgaccactccgggcccagcggtgcaggagggcgcgcgtgaggtcgtcactttttagcactacctcaccggaaaaccagcaaagcaaaatcctgttgccacctagacaatagggaaggagggtcttccaacggcggcgaccttcgcctggacagcggtatcctgcgggcgaccatgggccgaacggccgggactccaagcttacctcggacacgaacgccgcgccagtctccaagccaagtacgccatcgccatcccttgggcggctctagggctgcgggggctcgggggtggggccgggtctcgggggcggggcctagctcggtctgcgggggctcgggggtggggccgggtctcgggggtggagccgggactcgggggcggggcctaggctcccgggctgcgggggctcgggggtggggccggggcttgggtgcggggcggggccgagagcagagcccaggcaggagcctggggcatgggcggggccagggttggggcggggccaggctgagagcgtagccacgccgcattcgccatcgctagcccgtggcctcctctggggctgcgggggctcgggggtggggccgggggggtcggtgcgtgggcggggcgggagctctaggcggttaggagtcggggctcagatgcgggggcggggccggagcgaggccgggtatcacccgggagtggaggaagtgcggggggttcgcggcgcggggagggtgatcccgggaggacttgcgcggcgcgtggggcggggcacagatgctccccggcctggctccgagtaactgcgagctggaggcgcggctgctctctcgggcggacctcagctctgcgaaccctgtggctgccggagcactgagcgccctgcccggagtcccgcggagcctggcgaggaggggtcgctgcatcccgagggccagccctgagccgggaggtggggtaacaattgagggcgtatgcttaaaagctgctaggtcatgcatccccaaatcgaaggtttgcagacctggtaggacgcctgggggtcagaagtgatttttggagtacccaagtttttagtgtcagtgaagagtttgtggatatttttgagttctgctgaggcatttgcaaagtattttctttggggaagaattcttaagagttggaagggccttggctgtgtcaccttgtccagttcccagagaaccaaaaaacaaaacagaacaaaacgaaacaaaaccacccctctaaattctgtgcccaagttgtcccatccaagcatgcctaggagttttagatttatgtagctgacacctgtggactacctatagtgagccaggctaattgtaagtctttggacaaccctgtaaggaaaatgatattgccctgttgagctgatgtggaaattgccctgttgagcatattgccctgttgagctgatgtggaaactgagacccagaaagattaatcaggtgaattccccaaagacaggaggcttgcaggtgggcagagtccaagtctcaagtaactttatcattaagtttcatcaggtagatctgggtaatagtgtagatggggcaacaccaaaagtcaaatagaacaatttgggcttatcccaaagagatttttttttttttgagatggagtttccgtcttgttgcgtaggctggagtgcactggcacaatctcggctcactgcaacctccacctcctgggttcaagtgattctcctgtctcgggctcccgagtagctgggattacaagcatgcgccaccaggcccggctaattttttgtatttagtagagatggggtttcaccttgttggtcagactggtctcaaactcctgatttcaggtgatccacccgcttcggcctcccagtgttgggattacaggtgtgagccaccacacctggcctctccatatattacaaagtggtagttggtaggctgagctgcctctctcagagaccttgactctctccaaggctgttagataacctcagaggtaatggaaatgcagtaatcagatattgcagataatacaagactcattcatttccagaagatgaaacagctgtcatggaaatattttttaaatctcatactggtaagcatattttgatagtgaaaccttttgcaatgcaagcaaactactctcaggcttatacctaccacagaaaagagtggggtgtgggaaattagcttatctttttcaaactataattttaaaaatatagaaagagcatgtgtcaaagatttacttagctcattaattagggaaccaacagggtgctaaagaagaa

SEQ ID NO: 585060 - DNA, 4001 bp, Homo sapiens
ttccacacccttgcccacatacctttctctgggcctctcttctatctggctattcatctgtcctttgtaatatcctttataataaatgggcaaacataagtaaagtgtttccttgaattccgtgagtcactctagcaaattaatcaaaccggaggaggggcttgtgggaatccagatttgtaactggttggttaatcataaacaacatatagtcacaacctgggacttgtgattggcatttgaagtggggggcagtcttttgggactgagccctgaacgtatgggatctgacactaactccaggtacacagtgtcagaactgggttaaattataggacgtagagttggtggccactggagaattggttgtcggtgggaagaaattcccatacattttggtgacaagaggtgaagggctgtactgagtgtgtgagagtaaagagaaaaaagttttttgttttttttttcctctcagaacaaccaaagccagattaaaagatgaaatggctgaacaattgccagcccatatagagagctaaatcctcactgggatcacacagaagagcaatgatgtcaattaactgtgtttccacaggttatctgttatacagctggagaaatgcaagttagtctggtccttctccactacagtagacagagtggcttagaaattaaaacactgctcctcggcagaggtatgtacctacatgcgcgtacttctgcaattcacacatgcaaattgtgcaatgattcctttatttatcaaaaatttacttccttaaatatgcctccaaaaaggtatctggttctaaagatcgcacaaaagaacgggagtagaagaaaagtaagtgtgattggtgaaaaaacagaaatgaaagacaattccagttgagttaaatgtcccacatttagggcatgtaaaactacatgccagtatataatttttattaagtacacactaagcaatggataatgaaaataatggcgtgttttgaggaaacctgggctattgatcttacaggcggtgatagaaaataccatacttgtgctggtattttcaaatggtggatgtgctcactgatttataagtttaaagctataaaactaaagctgtaacaaacaagatgcaactgttgctataaaacttccaagtccttaacccttcttcctcccactgaaataagtgtttgtagagcatgatttttgaggtttctgtggagcacaaatgtcagttcctgcagaacagactttaacaggcttggatacaattgcatgggttgcagtgaactttaacaccaatgatgtcaggatattgtgttctgatacatatgcaaagtttattaataagcacagcatcggtatttttaaatcgatattttaaagtaccactgttttatttgtcctgctcatcaaatcttagcatattaactcttagagctatccttataaccaagacctatattcacagtagattttttgtattcctccctcattcccccaacccagcccccaccctactccctacatttttggaccccataggaggaaagagggagagaactgtcagaaggaagaaggcagttggtgtgaacctatgaaaatcagcgttttccaaagtgttcaagaactttacttcgatcccaaatcagttctctggaggaggtaagagtttacttggcatggcccgatgcaaaccctaccctacgcgtggattttgtttctccccagagcctcttcagaatcttggttaattccagagctgctaagggactccagggtcgcggagggagggccctgcgcccctcagcgctgcttagggtcttcctgggcgactgcactgggaaactaagccggcccaggcgatgtgccccgggcggccccaagaaaaagactagcggctcagaagccacgggctttacctctaggaagtggctatgaggcccggtacagtggcggctgtctcctcttggaaccgcgcagtgaaaatcgagtgcgccaactcgggccgcagctccggagaggggtggggcagggacagggtcatctccatagggatccaacaacacggagccaccaccccgccccacaggcccgcagcccctcccgccgccgcgcccggacggccaacctgcatctccccagctgcagtgagcaaagccgcccgcgccgtgcgagccaccgcccttctcttgaggccagctaggctcgggtcccggctcctttccctgcctccagggagcttgcggtgggagaaagcttccgtggggtcccgtgggtcgcggcacgtctcggaagccctgcgaggtgcccagcagaggtgccagacccaaggccgtgggaccccaagaagagacttggacactgaagccaacgtttgcttgatctcaaacaaagccagcgatgttaattaaggctgtgtgatgaggaaagtggagtttcttattttttgtcacattcatcttcagcagatcctcagaaaatgttaatatttactgcagaattaccaatttcagcattatacaggaggtacaaaaacaaaaccaaaaaacccttcttcattagtttcaggtcaaaatgtcttttaactatttattgtgaagcctgtttttttcttttgtatgtaatagttatggccatgaaaagatgctcacagtacattacttacaaaaagcagcttagaaaaccagcagaatggtacgatctattttttttgcaacgtgtgtaagaaatctgggagtatgtacacaaataggttaaatggtttgctctggtagttttaaaaatcatctgtaattcaatttttcctacaacgaataagcaacatctatgtaataaaccataagtttcattctagtaaagtttcatatgagaaatgtgatcttgctatgctgcctaggctggagtgcagtggctattcacaggcctggtcattgtgcactatatttttatttttatttcaaatatctttttctttttcatctgtatgccagtaaaatcatcattgtacactatagcctagaactcctgggctcaagcaatcctcccgcctcagcctccagagtagctaaaagtactggtgcctgtcaccaaaccaggccttaaattttattctaatccaggcactgcattttttcctgtttccttgaacatgtgtttaaggagtgtgaaaggatacaaattagataagctaatatttcgctacctgggacccatttagggccctgtgacacaaagggcgaatgaaccaagtgaataaacaaggtcaatccactgctctgtcacaacccgcaggaaccagctttttgctttactctatctcaggaccaatccaagaaaaacatgtcacatgacaaagtgtcctttcgccctgtcagaccctagagtacgactttttcccccttaaatccctattctcacaacccaaatgaagtttcctccatgatgctgtaatttttaaaaggggtattaaaaagaccaatttactgatcaaaatactttgaattcagaaagccaaaaattattaaaatcaagatttgaaaaatattcagtaagtccctctcctcccctcccccaattaggtgcttatttctgtggcctggaaacaaggagacagaagcatgagcatcttctgcaacacaaaggtaactgagttataaataagcaaaatgtgttctatccataccatggcatatgatcagccaaaacaagaaatgaagtacatgcaataacatggatgaagcttcaatccttgaaaacatcatgctaagtaaacgaaaccagtcacaaaaggccacgtattgtatgattccatttatataaaatgtctagaatagaaaatccagagagctggaaaggaggttagtggctgccaaaggctgaggggattaggggacaaggagtgactgttaatgggattctttttagtgtgatgaaaatgttctagaattagatcacggtgatgggtatataactctatgaatctactaacaatcactgaattg

SEQ ID NO: 585061 - DNA, 4001 bp, Homo sapiens
gccgagagacatgctggatcacagtagagtcagagctagcagagcagataaaagcagatgaagcacacagcctgccatcagcaagaaacacagaaaaaagggctctttatttttttccctccttaacatgagttcaccttttgcctccccctcatgcccttggcttatccaccttcagggagattacacaaatgcagaggagataaacacctgaaaagggacttcccccacccctcttgaagcaggctcagggaaatgctgtggaatgctgcctgttgaaaatccggctggcttctacaaggaacttggtaggacagcactatccactgaagcttacttaacattggcacatgactaaagacaagaaatcacagttattcctagctttggggccacttccccattcaggatgaccctctctttagggggtacccatccacttcacatgctgtgtagggcacagggtaccccagatgatgtatatctttcaaaattaggtggggaaaatgattggagagagaaattaactattcaatattcaattcaggagggtaactccatagaaaccagtgacctaaggtggggctgagaagcaggtcaggggactgaaggtaggctggggggattttgaattccgaatccctgggcatcaggcttgtgtgggatccactgcctcccccttctccactactgccttgcctcttcctcctaacaatttagccatgcagcttatctgcccaattttgtacatttcaaatgatcagacacattccaggattttcattcccttgacatcctttctctttagtcagggtcacgaaaagacaaaaaaagtgcactgaccctaaaaacgggggggacccgggcagatgcacacgcactgcctaaatccttcggcagccaagaattatcctagctcccctcccagcacaggtgaataaagctgaaaagagagctcacactgttttgggtgccaaaaacctgccaaaagaaacctaaagtcaatgatgacaaattttaaagaaaacatctgcttcacccagaaaccgcctgcggggggtggtggcggggggggggggaggcggtagttagtcaacagacttttgctctgcaggtgattttactgaacatacattgcttgaacgactggatacaattccttggcttcaagctggaatgcttaaatattttacacgttaacacactattaaaatagtgtttaaataagatttaagttcctatatggcctgtgtacctgtataaacacatatattacaaacatacatttgactaaattgtatatgtccatactcttctcattttttaaaagccaaggaaacacataatggaataataataataaaacgataagttattttaatgtcatgttatagtcaattgcacctaattgtattcaatagaggaattttacattttacactagaagacttaaagtagctttcagcaataattctcagacacttgctctctaagctgcagtcataaaaagaacggggaaaaatagaagcaagaaaagcatgaaggtggataagaacacactaacttgtaattccgagacttacaagtcaacgagcgtgcctacctgtttctggagctccttggcaagccacaaacagcagagagaaaatcatgagcaaataatccattctgaaaaaaagggatcaaaaacctcccgttcaaactgaacccaaaggaaaacgaagaaaaacagcttcaggtccctcaaagcgctgcgggttcctcagatctcaaagcgatccttcagcccaagtgcccttttaacggggagaaaaggcagcgcctgccaggagagaaggcagcgagcggagcgtctgcaggcgcacgcggcggtggagagctgggactgcaggaggcgcaggacccgttcgcctggcgcagatgcagaggcgcgtctgacttggacagctctctgccggctttttatattgaacccctattagagtgggggtaaacagctccgactttattccagccccagacaatgttattgtgttattagtcaccaacaggcaacgtgcagccggagataaggccaggcccgaaaggaaatcactgctaacttcagaggcagacgcccgccgtctgacaattcgggggcagggctaagaaaaagaaaatacccattagagacctttgctaaacctgcccgtgcagtgctggagtccgcttcccctttgcaagctgccagccccggagttcaagaatcagaagaggggactccagaaaaaaagtcataccattggtatgaaaagtatgagccacagtttaaatagattgtattgttgtgtgcggggaattttttttaattgttgctcgcttcattttccttttatgtctctccgattctagtctcagtcaaacaagggaatgctctccctcgtcactgccccactactgggggtcagactattttggcagatcaacgtacttttctcttcaagccccttcctgcgggtcttttttgctgaagttctttgcatctatcggagaaagatccgtgagggattggcaagaaagggagcttaaaaataacatcagagctcgtttaggcacatgcccagtcttttccctatcactgatgagaagccccgataagttcttttgtgtgtccacacttcccctgcggaggaggctgataaactgattgaaaagcaaaggtgtttttcacacagaacttaaatcttaagattggtcggtgccaccaatcttaagacatggcgggagaagaacaccagggggagatgaagagctacaggggctgatgttttactaggacaaaaaggaaaacccttctaaatggcagaaaaaaacgcaacctggcttgggggccgaggagggtcaaggaatgttgcctaacataggaaggaggaatgcacctcagaatattctatttattccccgcacaagcagggacatattttctgggactcttttttttgggggggtgtcttcatttagggcaaaaaggtgttcttgtacaaggttaagtgaatatgcaaggaaggtggtgctgagaaggaaatgccattcgaacaaggaatcagataatacttcacatttaataatgtgtttacattttcaaaacaatttcctgtctatctaaccttgaaatccccccctgaagtacacacagggcagttactgtacaggtgacatcatgccttaataaagaaagcaaaaggtgcatggaacacattggctttttccgctagtcccatttttcaggttagacaactgagcacccagaatttttgtttgttctccaccaaagcgctcacagtggcccagtaagacctatgggataaatttagagtctcttcccaggggatgccatcaaatacacactttgtccatctcctctttttgttttactccagtttttctggggatggagggtggaattcaagcacggatgaatttccaagactggcacaacacacatgctgggaaaccttttttccctcctccttctaaaatcaaaaggacagtttttatcccaacagcaaagccgtgggtttggacagactcagatccccagacctccctcgaagtcacagctgggggaacagggacagtggcagcgacaggtccataatgacatgcatcctctaaaagagccactgaagcaagagttggagatgggagagagagaggcaagaactctccctcccacacccacacccacacccacacccagagatgcctccaccctatccccagggcctctgccggggcccctggcctccgctgtgcgcttacctcagcctagccccggggcccagggaggccacagctcccggaggacaggcggcactgagccggaagccagcgctgccgcctgtgccaggcaagggtgccctgacctccctctccaaagccgaccttgggagaggagaggagagctgatgtcacattcacaggttccaagcagcgcctcccccccaacactcccgcggaag

SEQ ID NO: 585062 - DNA, 4001 bp, Homo sapiens
cttccttaacaatttcctcatatctcttctggctgtagggtggctcagtggaatccattttgttaacaccgacaattagttgtttcacacccagtgtgtaagccagaagggcatgctctcgggtctgcccattcttggagataccagcttcaaattcaccaacaccagcagcaacaatcaggacagcacagtcagcctttaaagaaagcaaagacatatccctgtcaactctccaaatgacaaaaccagtgtacaaagcaagccttttgggataaagaaacctagaattattaatcccaccaacctgagatgtccctgtaatcatgtttttgataaagtctctgtgtcctggggcatcaatgatagtcacatagtacttgctggtctcaaatttccacaaggagatatcaatggtgataccacgttcacgctcagctttcagtttatccaagacccaggcatacttgaaggagccctttcccatctgtaaggattaagagtcgttacttggttactaaaacacaaactccagcttcaatttccttgtccccagcccttaattggcagtttccactttacaactccaagtccaaagtgattttagtcactttgggttacagaagcaaccaaaaatcaaacttttataagtcggatcttaactattaacatccaaatctactcactagcaatacgattacagaagtcaccaaaagcaaaattatttcataagtaaggtcttaactattagcattcagatctaaaccactcactagttctggggaaatcacctaatgattctgctggtaaaactcattttagttgatctttccctttctggtattaaacatacctcagcagcctccttctcaaatttttcaatggttcttttgtcgatgccaccgcatttatagatcagatggccagtagtggtggacttgcccgaatctacgtgtccaatgacgacaatgttgatatgagtcttttcctttcccattttggcttttaggggtagttttcacgacacctgaaatggaagaaaaaaactttgaaccactgtctgaggcttgagaatgaaccaagatccaaactcaaaaagggcaaattccaaggagaattacatcaagtgccaagctggcctaacttcagtctccacccactcagtgtggggaaactccatcgcataaaacccctccccccaacctaaagacgacgtactccaaaagctcgagaactaatcgaggtgcctggacggcgcccggtactccgtggagtcacatgaagcgacggctgaggacggaaaggcccttttcctttgtgtgggtgactcacccgcccgctctcccgagcgccgcgtcctccattttgagctccctgcagcagggccgggaagcggccatctttccgctcacgcaactggtgccgaccgggccagccttgccgcccagggcggggcgatacacggcggcgcgaggccaggcaccagagcaggccggccagcttgagactacccccgtccgattctcggtggccgcgctcgcaggccccgcctcgccgaacatgtgcgctgggacgcacgggccccgtcgccgcccgcggccccaaaaaccgaaataccagtgtgcagatcttggcccgcatttacaagactatcttgccagaaaaaaagcgtcgcagcaggtcatcaaaaattttaaatggctagagacttatcgaaagcagcgagacaggcgcgaaggtgccaccagattcgcacgcggcggccccagcgcccaagccaggcctcaactcaagcacgaggcgaaggggctccttaagcgcaaggcctcgaactctcccacccacttccaacccgaagctcgggatcaagaatcacgtactgcagccaggggcgtggaagtaattcaaggcacgcaagggccataacccgtaaagaggccaggcccgcgggaaccacacacggcacttacctgtgttctggcggcaaacccgttgcgaaaaagaacgttcacggcgactactgcacttatatacggttctcccccaccctcgggaaaaaggcggagccagtacacgacatcactttcccagtttaccccgcgccaccttctctaggcaccggttcaattgccgacccctccccccaacttctcggggactgtgggcgatgtgcgctctgcccactgacgggcaccggagcctcacgcatgctcttctccacctcagtgatgacgagagcgggcgggtgagggggcgggaacgcagcgatctctgggttctacgttagtgggagtttaacgacggtccctgggattccccaaggcaggggcgagtccttttgtatgaattactctcagctccggtcggggcgggttggggggggtggtgacggggaggccgcctggaagggacgtgcagaatcttccctctaccattgctggcttagctccaaaggttgtattgagattagggtgtaccttcgcctctcaatcagcctcccgtcctcagccttgccatctcgctagtccgggacaaatccctagagcgtcttcctctgcgggtctcagcccagcccggggttggctcctcctccgccccggcttccgcgcccctcccgtgtggcaaggagtaccaggcccggggaccccgaggggcttggggcgaagggtcgggactgggggcctccttaacggctcacggacttgcgagaggttcggctcgatggccgtgaaagcgacgaatccgctcctgtgctggcctcttggctccttccattcaaagccagctgcttttatggaagcccgtaacacgtcatctccccctggtactccagatgtccaggctttcagtttagaatagactcagtcctacagttagctttagatctaattctagttttgttacgccaaaaagttcctgcgagtgtgtgtgtgtgcctcatggtactttttaaattaaaaggtgtacagttatttgattgcaaacataaggaacctaaaatgctttcagattttccacatgatctcatgtagaggctaagatctacagcatcagcaagtttatccacccagtttcctaaccccaacacttgctatgaagtcacagcttctcctatttaaataagtgcctattatatttaaataagtgctgtcgttttctgtcatcctatcgattgtaactgcattttagcataaatctagggcaagattggatgagcttggcctttttggatggctatcaaggcaggccttgggaaatgctcctctgaggaaagaagaacgtttatttttaatgagctaattactagatcattatgtttcttcttccagctgtagaatatcattgcccagcttctcgaacaaacttatttattaacaagtatttgagaacctactatgtggccaacgctaagtactgtggagttccttctggagaggaaaccacaatcaaattggaagaggaaaacaagttgggaagcagttgaaggcaaacgctatggtgctttcttggtttctgtatctttgtagtgtagtttttctagtcctttcagttttcacagtccacttttttttctttctttcttttttttttttttttttgagacggagttctactctgttgcccaggctggagtgcagtggcgcgatctcggctcactgcaagctctgcctcccgagttcaagcgattcctcctgcctcagcctcccaagtagctgggactacaagcgcgccccacaaatttttgtatttttagaagagacgggggtttcaccatgttggccaggctggtctcgaactgctgacctcaagtgatccacccggctcggtctcccaaagtgctgggattacaggcgtgagccacggtgcccggccacagtcaaagtttttcctcaagcccctgtgattgcggataatagtaaacgctttataaataccttacacagaatgttttttaaaatatcacgcaaggaatgacaaaattacatgaatccttgatttatacc

SEQ ID NO: 585063 - DNA, 4001 bp, Homo sapiens
tggtgttatcagtactgcacaaacccctcttcagcacacaactgaagtactattccgtaaaatccccagccagcctttgtttccttgcagttagctcctctcttactaacttgcctgttgcactcttgcaacatattttcatactttctctaataaatctgcttttctttacgtacagctgtcctggtaaattcttaccctggcgccaccagccccagagagttgctgctcacccacgacagtccatgaagtgcttactatgttgtgctttaaattatttgctgatgattgtttctcatactagataatactcatatcttggcaatggtccctaaaaaatataaactaggccaggcacagtggttcacgcctgtaatcccagcactttaggaggccagggcatgtggatcacctgaggtcaccagttcaagaccagcctggccaacatggtgcaacccggtctctactaaaaatacaaaaattagctgagcgtggtggcgaacacctgtaaccccagctacttgggaggctgaagcagaagaatcgcttgaacccgggaggcagaggttgcagtgatccgagatcatgccatggcactacagcctgggcgacacagtgagactttgtctcaaaaaaaaaaaaaaaaaaatatatatatatatatatatatatatatatatatatatatggcactcttccaatttaaacggttgcaatgtttgtccactcggccatatatattatatttatactacatatatattatataatatatacactaagctagggagtaggggccgaagggacggaattatcactggggcagaggaaacaccaaaagaaggccactttggctccaacgcctactctgccaccaatcacagggctgatcttaggctgaacacttaacctttctaggcttcaggttaacttaaataaaaactatactactactttctagacaagatcttcacatggaccaaatgaagaagagaaaaaattaaagacaaaaaccaaacatcatttggaaaaaatctcaaaggagcaaaaaaaacatatatccaaagtagtcttcctacaaccaatttccttctctaatacattccttctacgacaaacaactataaaacacaaacgttctaacagtgcctaaccaggcaatctcataccttgtgatgtttcccgcattcactgtgggtcgtaacacttaaactgataatccaaggctttagaaacgccttccccgaatcccctagattgggccaagactccttaggtgttctctctgccatttatggtgcaacgtggcactcttccaatttaaatggttgcaatgtttgtccacctggccaaaaagcaagctgcctgagaggaggaagcatgttcccctaaatcatcattgtattccccagacccagcacggtgctacctggcaccctgttagctataacggagtcgctgcgcaataactgaatgaaaggtgcgattacgggaaaaaaaaaaaagccagttactgaatacattccaggttggtctaagagccctgtgaggaccctcctccaactggttttgtttcctcataatgggatgatgacaatttcccaggaggtgaagttcaggccaagcccaacctgagctggttaacccctccctccaggaggtaggatggcaggggccgaggcccagaggcgccagccggctagcggcgcagacacgtggggagctgggtagcagcatcctcactccgcccgtatctggtggccggcccgggtcctgccagggctcggcaggccccgctcccgtccacctcttcccctccgcgccgcctctccttctcacctgtcgctcgccctgagcactgtatttattccccttactcagtcccagggacttctccagtagcgacaactctgcggccgccgccatcttccggccgtagctcctggcagacgcgagacctgcagaacaagaacctcccgcattggtggaaacagaagtcccactcctgcaaacttcagcggcgattggctgaacggaaggggcgtggagagcgcgcgccaaagcacaggaggcggggccggtggaaggggcggggctgagggcggggtgtgagacaggtggagaagtgatggtaaatttccactcgaactgttggggagctagttactggtagaaaggccccaaggccgggcttcggtggctgcagtagactggatctggatctctaaatggcaatctattgacatggctgccagcggtaactcgttaactcatttgctagtctaagagaatttatatatgatgggaactgaaatttgccttagtttggttcaggaatctgtaaatttgaacaatcaaattgaatagcaaaaagttcacagtccattaggagtttctaacgtgtagcataattcatgaggattttaattgtgttgtagtggtgaattcgaaaaactggtttttctactgttgatctacagctcaacactagcagtagaattatacatttaaagattattcacagaacacggagtatgtcagataggggtcaaataattacagctcaaggaaataagccattaatggcattaatgatctttttttgcagtaccagaaggctggttacataatttatgaagttttggtatataaataaacaaggtgcataactttgccccactaacttgctacattcttgtatcttcaaaaaagaaagaaaggaagaaagaaagaaaattagtagtatatgttgaatatttccaaaagatttgtgaaaatacaaaatattttccactttgaagaatgaataaacaaagtgtgtattagtctgagagaaatagaacaatcctacaaggtaactcatcattgaatcagaaatatcaaagtttagtggggaatgttgttactgtgttacaccttccctatcccagaatacttaatgagtttactctgtcagcagaagtaaacataaggaaaagaaacttttgccaaatcaacataacaaaatacaaaagaaatttcagtataagtggattgttaggcactaaattatctgttttactttccatattcagataatggaatgactattctactactttttaaaagaccaaccctctaagataattcacatatccattttcagggtttaggtacactttttgcttgtaataaaacattttttaaaaaaattaacatttatccaatgccaatgggtggtatattgaaaataaggtttggcctttgcataattatagaaatatcaaattaaaaaagaaatccctaaaaaactgaaagcagaacaaagcatattgtacatcaaattgatgacatcatcacccagtgtggacctcttttaagtgactttatagcacagtcatttaattgtatactcttagtaagatatgctttaaggacaaaattcatgaaaacctgtttttggttctttttgtttgttggtttggttagcatcttggcagtgtcagcattggtatggtgctgtatatgtactgtggaataaagcaaagatgcaatcatgtggtgttgctggaaagttgggtgtttggtgttgcccaaaagaggagttgtaaggtagatgaggttaaatcaaaactttctggtcctgaatttgaattgtaatatcaatatgaacttatgacgcttttatcttaaggaaaatgaaaagtatttcctacctagctctgtttacttaaaaggcctagaaacaaggacaactcagtagcaatgagcaccccagcacccagattctggtttcaaatactatttcccacaaaaagaaatgggggctctttggagaccggctgaatccaaaccttgcggggagatcagtctggaccatctagttatagtagaaagaaaagaaagtatctaagagtaatgaggggagtcaaagggtaggatcagatcacttgagggtcaataatagtcattacaagctgagagtcgataagaataattgcaatgaattgaaacatgttgaa

SEQ ID NO: 585064 - DNA, 4001 bp, Homo sapiens
catatgaagacatgagtaaatgatcgaaaactcactcaatggattatggtgctgtcattaaaatattgattttagagatcacgtggcaacctggtgaaaatatttatgatttaataagcctgaaaaagcaacatataaaattatatgtgtactgcaattataagcatggaaatatgtgcatgaagagactggtttggtcctctgtattatacatttctaaattatgttgattttttacaatgaacacatttttatttaaaagattaaataaaaaagagtagaaaggcaaattagaggttatgttaatggtttcctttttctgttgtgaggatactttcacaattacttatctataatattcaaatatatacatagatacaatttaagattaatcataaaaaatatttttatgaaaaaaactttctacatcctaattgctttagagcccagcctaccatctttcaagatctgtactaacatgaaaggtacaacagaataaacttcttttgctaaaagggttataaactgtatataacccataaaaacaaatgtatgacatttgtttttaaaggtcatgtattcagagtcacaagtcagttgacagggactgctccaggtatatagtaaacatgacatagaacaaaatgcgctgagttgacatcctcattgggtaatttatggaacttcaagctcttcttccaccaccaaagacagaagcaacatcagtgacttcagtttatttctttgttttagacaaatgtctctaccatcattcagccataactcacagacaccccaggcaaggcaacctcggccctttccacccctcttgtccattatggttcaccttctgtgtgtctttttttaaaatcgttttcccactcccctttaaaaattttttaacttcttatctgcatgtctttagaattacattaatacatattcagtccttcactgctgaagatatactgacgatgcttttcaaatttcaaatagggcaaattggttgacacttggccagtgtatttaaaatctgaaatatgtccaatgcacagttcttcttacttgtaatacagcaatatgtttttagagctttgcacttccatccacacctctgtaattccctgtatcaactcagccctgtctatactcaccaacaccaaaagcttaagctcatcctgtatagggcaggcaagtgcctacaacattttctaaattacataaaactgaaaagtccactgaaactaaaaatctatgatgttgtgtcttaatgcagggataattacagagattcagaatacaaattctctcaccaaactttcgatttcattctaaattgattcttccaaagaaaataaattgacaaaatattttaactttgtgaagctggagaggaaggcaagagtttaaagtattaaactatataaacataaactactgttagctcatctatgatgatcagtctactgaatctcattattgatttttcagcacatacatttcagtagccctgtcagaattaaaacaaaccaaataattttaagagctaaactgtggcaagagtttaaaaaaaaaaaagaatccaagctgctgctactttttaaaaaattttgtctagaaaatgcaaataaaaacacaaggttggggaaggagcaaaacaaaatctaaacaggaatctttttacaaaaacgttagaataaaaagaacagggccggggaagaataaacagcaactaatcaattcttgagggaactggaaaggaatatctcttacaaagcagggaaagatgctttgggaggaaggtgagcaagttttggggaaaacccgcaacggagaaagaaaggaatggggagaggatgggactaaattgtggaaaatgtagaagatggagaaaaaagaatggggttggatgcaagcataaagaagaaaggaaaaagacctggcggaaagaagaggagcggaatcgatatacatacaaaacaggaaatggagctgggagtgggagatactaccgggtacaggattcagaagaggaagaggtggggcgggaatgacggacctgtgggaatgaggttgaaggtgcatagtggcggggggttttaagggcggcgatggacggagacaggttatgatgtgagagaacgagctagggagagggcccagagataggttgggagtagggtgggggaaacagtgatctaaagggacaagaggcaggggcttggaggagcagggccgtaagaaagaacgcggctaacgggatgagaatgaaggcgccaacacactgccaagatggagtgggaaaaaactagagagggatgaggcggagggcaaaggatcggagagaggggatgaggatggctagggaagaacggcagaagttcggcccagaataaagaacagggtcaggacagaagacgtgtttggagagaagacagacttgagtggaggggaatggaggtgcactgagcggggaaacctcctgggctgctggaaggtggggacaggtgggagtctggcagataactgctcaccgtagagtccttaaaggacgtgcccggaagaaagggcaagccatgcacgggattggacaccattgcagccggtaccaccgccgccacctaggtcctgcttcgtcctctccggttgcccaggcgacaagcagtgttcgcgggcacctccaggatccatggtaacgctaaacatccggaactcccacgagcggaaggcggggccaggaggcgcaggcatcacaggaggtttgcgcgtgcgccatccgcaggactccgcgttctcgcggtaagtgggccgcggccttggagcgcggctagtgggcgtggttgtgtcggcccctcctcttccgcttcgccccgccccgctcccggaggatgagacgtgggagctgttgggtggcgcggggaaaggcgggtgtagcgaggcggtagttctcgctgtgagatccggggtccgagcaggcccttagatgagttgcagagagggacgttccttctctccttccacctagtcctggcggacctcactgcgccccgccaacgctgtgagctcaggcactcttttctcccccctctgccccatttcacacagaagtgtaaatggtcggtccagttggcagtgctactaaactagacccatgcttcttgtaggcaggggccgaggattacccatgattgtgtttctgttgctcagggatggtcaatgaactaatgcaatcatctcatccttaattctcccactgccacattgtatttttccccttttaactcttttttaaaatcaatctttctctttctttctttcctttctttctttcctttcttttctttttccttccttccttccctccttccctccgtccctccttccctccttgcttccttccttccttccctacttccctccttccgtagagatagtgtcccactatgttgcccaagctggtctcgaattcctggggtcaagcgatccgcccacctcgcctcccaaagtgctgggattacaggcatgagccaccgcgcccagctctctttattctaccatcaatcccttcggttaaacacctttgtttttgtagggaaagccttgaatatgtgctgcagggcagggtgcactctgataggtacttgatttttgttgactgaagagctgcaggttgaagggtggtcacctcaatccctcgtttgtacctgcagctgcaatgaaaaagatcagaaccactaggaggaacacagctccttcaaagagaaagactaagtcttgggaaagaagcagataagtgaggtgaaatattgtcagcatcataggtatagcctttgatgctttttacaaaacttgcttaaattattttttcttaaaagaaacataatcctattcctgaaacattttttttggggggggggggagaaagctatccatcattgctgaggagcttaaaaataaaaagtaatcaaaacccacgtgccgagagatttggattcattagg

SEQ ID NO: 585065 - DNA, 4001 bp, Homo sapiens
cggccctttccacccctcttgtccattatggttcaccttctgtgtgtctttttttaaaatcgttttcccactcccctttaaaaattttttaacttcttatctgcatgtctttagaattacattaatacatattcagtccttcactgctgaagatatactgacgatgcttttcaaatttcaaatagggcaaattggttgacacttggccagtgtatttaaaatctgaaatatgtccaatgcacagttcttcttacttgtaatacagcaatatgtttttagagctttgcacttccatccacacctctgtaattccctgtatcaactcagccctgtctatactcaccaacaccaaaagcttaagctcatcctgtatagggcaggcaagtgcctacaacattttctaaattacataaaactgaaaagtccactgaaactaaaaatctatgatgttgtgtcttaatgcagggataattacagagattcagaatacaaattctctcaccaaactttcgatttcattctaaattgattcttccaaagaaaataaattgacaaaatattttaactttgtgaagctggagaggaaggcaagagtttaaagtattaaactatataaacataaactactgttagctcatctatgatgatcagtctactgaatctcattattgatttttcagcacatacatttcagtagccctgtcagaattaaaacaaaccaaataattttaagagctaaactgtggcaagagtttaaaaaaaaaaaagaatccaagctgctgctactttttaaaaaattttgtctagaaaatgcaaataaaaacacaaggttggggaaggagcaaaacaaaatctaaacaggaatctttttacaaaaacgttagaataaaaagaacagggccggggaagaataaacagcaactaatcaattcttgagggaactggaaaggaatatctcttacaaagcagggaaagatgctttgggaggaaggtgagcaagttttggggaaaacccgcaacggagaaagaaaggaatggggagaggatgggactaaattgtggaaaatgtagaagatggagaaaaaagaatggggttggatgcaagcataaagaagaaaggaaaaagacctggcggaaagaagaggagcggaatcgatatacatacaaaacaggaaatggagctgggagtgggagatactaccgggtacaggattcagaagaggaagaggtggggcgggaatgacggacctgtgggaatgaggttgaaggtgcatagtggcggggggttttaagggcggcgatggacggagacaggttatgatgtgagagaacgagctagggagagggcccagagataggttgggagtagggtgggggaaacagtgatctaaagggacaagaggcaggggcttggaggagcagggccgtaagaaagaacgcggctaacgggatgagaatgaaggcgccaacacactgccaagatggagtgggaaaaaactagagagggatgaggcggagggcaaaggatcggagagaggggatgaggatggctagggaagaacggcagaagttcggcccagaataaagaacagggtcaggacagaagacgtgtttggagagaagacagacttgagtggaggggaatggaggtgcactgagcggggaaacctcctgggctgctggaaggtggggacaggtgggagtctggcagataactgctcaccgtagagtccttaaaggacgtgcccggaagaaagggcaagccatgcacgggattggacaccattgcagccggtaccaccgccgccacctaggtcctgcttcgtcctctccggttgcccaggcgacaagcagtgttcgcgggcacctccaggatccatggtaacgctaaacatccggaactcccacgagcggaaggcggggccaggaggcgcaggcatcacaggaggtttgcgcgtgcgccatccgcaggactccgcgttctcgcggtaagtgggccgcggccttggagcgcggctagtgggcgtggttgtgtcggcccctcctcttccgcttcgccccgccccgctcccggaggatgagacgtgggagctgttgggtggcgcggggaaaggcgggtgtagcgaggcggtagttctcgctgtgagatccggggtccgagcaggcccttagatgagttgcagagagggacgttccttctctccttccacctagtcctggcggacctcactgcgccccgccaacgctgtgagctcaggcactcttttctcccccctctgccccatttcacacagaagtgtaaatggtcggtccagttggcagtgctactaaactagacccatgcttcttgtaggcaggggccgaggattacccatgattgtgtttctgttgctcagggatggtcaatgaactaatgcaatcatctcatccttaattctcccactgccacattgtatttttccccttttaactcttttttaaaatcaatctttctctttctttctttcctttctttctttcctttcttttctttttccttccttccttccctccttccctccgtccctccttccctccttgcttccttccttccttccctacttccctccttccgtagagatagtgtcccactatgttgcccaagctggtctcgaattcctggggtcaagcgatccgcccacctcgcctcccaaagtgctgggattacaggcatgagccaccgcgcccagctctctttattctaccatcaatcccttcggttaaacacctttgtttttgtagggaaagccttgaatatgtgctgcagggcagggtgcactctgataggtacttgatttttgttgactgaagagctgcaggttgaagggtggtcacctcaatccctcgtttgtacctgcagctgcaatgaaaaagatcagaaccactaggaggaacacagctccttcaaagagaaagactaagtcttgggaaagaagcagataagtgaggtgaaatattgtcagcatcataggtatagcctttgatgctttttacaaaacttgcttaaattattttttcttaaaagaaacataatcctattcctgaaacattttttttggggggggggggagaaagctatccatcattgctgaggagcttaaaaataaaaagtaatcaaaacccacgtgccgagagatttggattcattaggtctgacatggaggccaggaatctgatttttgtaacaggcgtttgtgacaagccagtttaggaacatgatagagtaataagccagacacagaaggcatatctcagtgtcacaggtagtttactgccaatacagacagcagctttacttttattgctgcttgtcagagcaaatccccctgttgggtttcactaatttgtgtgacgctcaggaggcccaggacatgaatgcattaagtggcacctgaggcagttattgatgcctgcttaccataccctgcccagagagtttcctttctaactcttctccccttactacatctgtttcctgttcttgtccttttttaaacctctttttctttttctgtaagtacattaccttaatgcagcagtttaatacattttttaaaaacttcaatgaagtttttttgcctttggtgctttttacaaaacttgcttattttttaaaaaaataaatgtaatcatattcctcaaacattggttagcattgtggaagttactgaaaacttttaaagtacctgtccgttgtattataccttagacaccaactgaggatggatgccagtcactggaggaatatgtcaagatggcaagtttgctgggtgcggtggctcacgcctgtaatcccagcactttgggaggccgaggcgggtggatcgcctgaggtcagagtttgagaccagcctggacaacatagtgaaaccccacctctactaaaaatacaaaattagctgggcatgggggcgcatgcctgtaatcccagctacttgggaggctgaggcacgagaatcgct

SEQ ID NO: 585066 - DNA, 4001 bp, Homo sapiens
atgcgcctcccagcgcacaaggtcaggtagggcttgtacactggttggctgtaggactcgttgtagtggagcgggaccaccagtgtctgcttggagcagactccctgactgcgtccatgccagaggatgaggtgggagagattgagtaggccaggccctggggagccaggagtcccacttccctcaagaggctactgaggccccccgctctccctccagatgacagcctctcacccccattctaaacttacagttatgttttgcctcctgtgaagccccacccccagcagaaggctcctgagaagagctcaccccgggccctaccccctctgttgtcacctctctctgagggatccacccttggccccctcgcctggtatcagtagcaggaggaaggagaatccgcctaagagagtgcacagctcagccctggaccccatgattcgctttgacgctggaccctacaggctgcaggcaagaaaaggttaatggatgcccgtcccctctcctattaatttctccagcactagtccctccaagggcactctgcaggtaccctctaagggagtcaggacattcacttttacatactagccaccaggattgcctacacctgtgtgtacaacccaacactatcctgtccttagcatatcatgatcctttcagcatcataaaagctcacaccccagcacactccctccacctcccctctaacctacttacttctaatcccctctgcacaacctggagggacacacagtcaaccctccccttatgaccctcctgtctttttttgggtttttttttgtttttgtttttgagaaggagtttcgctcttactacccaggctggaatgcaatggcatgttcttgcctcaccgcacgacctccgccccccaggttcaagtgattctcctgcctcagcctcccaaatagctgggattacaggcatgcgccaccacgcctggctaattttgttttgttttgttttgtagggtgtgagggtatatagctagggttttttttttttggttttttttttgttgttgttttttgagacggagtctcgctgtcaccctggctggagtgcagtggtgcgatctcggcttgctgcaagctccgcctcccgggttcatgccattctcctgcctcagcctcccgagtagctgggactacaggcgcctgccaccacgcccggctaattttgttttgtatttttagtagagacggggtttctccatgttggtcaggctggtctcgaactcccgacttcaggtgatccgcctgccttggcctcccaaagtgctgggattacaggtgtgagccaccatgcctggccaaccctcctgtctttaacatgccctcttataacttcataccttcaaaaccctagctggttgggcgcggtggctcacacctgtaatcccagcactttgggaggctgaggtgggtggatcatgaggtcaggagttcgagaccagcctggccaagatggtgaaaccccatctctactaaaaaatacaaaaaattagccaggcgcagtggtggacgcctgtaatcccagctactcgggaagctgaggcaggagaatcccttgaaccctggaggcagaggttgcagtgaaccaagatcatgccactgcactctagcctgggcgacagagcaagactccgtctcaaaaaaacaaacaaaacaaacaaacaaaaaaaacccctagctatataccttcacaccgtacacacaaaccaagcacctggaaactccacacctttcacacactgctactcccctcatatacccacaccgtcacataacgccctaaatgcacatcccttgctccaacaaaacaccccgcaactcatgcccaccctaaggctctgagtaaaccccactctttccccatttgaaattctctccccacttgccttcctctctctctccattcccacctggcttctttctcctgggaggcttcaagcagaccagcctcagcagaagcagctcagactggtgggtgggcctggcaggctaagaaggagaggaggggctgggccagagagtcctcccattcctgccccctcccacaagcctcctccttagctccagcagggtcagctcagtagggtcaagtcccactaccctcatccccaccccagcaaagggctccctagaagtatctttccaaccctctgaggcccctatttctggactccccagatcagaagctatgagctctgtaacaccaccagtacccccttgaacccaaaacagactaggggagagttagggggcagggagagaaccagctgcagggaacaaagcagttcaggttatgggagaaaaagcaagatcagctgaggaaagctagaagggcaagtcgtcacaaaggggcaggggggcagcccagggcaccaaggggaaaactgcccccctctcttcatgacatttgttagggcttagggggaacagaattgagtcagccaccaccccccatgccagaacagacagggccctattgtctcagccaaaattccttctttcaaggaagaggaggctcattgtccagccctacacccagctctggcccacaaagctcaaaagcggcacaacgaatgcccaccctgaccctctgccccctcgtctagcctgggggtggcaggcgcattccacccatgaggctgaggcccaaaccactggagccctgagcttaaccccccagtcttggggactgggagaggaagagaattgtcttcagcaggaaagaacccgcagagaaccaggaacccacaaagaatgggcattgagagagagcggaaacaccaagggggtccccaccctagaccaggcatctgggcacccaggcctcaggctccacccccaccctccttggggagccaggtcccctccacctggaaatgagccaagtcacactgaggaaatggaactttatttccataaatacagggataacacctattcaaaggtagttaaaagagggcctggggcctcaaagaaactaggctctcccaggggggtactccaacactgatcatagggactgggggatccccaaacctgagatgggcctcataggccacagatattccccaacactgacacttcaagaacggaactgtccccataggggagcctcagaaccccactctcatgggtagtccctcttaggagttgggagggctgatgtcaggggactttagagaaaaaagggaacatggggaggagagaagctaaaaatgtcctgagtggcctggaaggagacccctgtggtgggcagggggtgggttctccacccatacagccagatacggaggagcagcagcagcaaaagcagccacaagttaaaaacatggtttctcacttcccaacttcggccttgagagaaagggacagcacggagcaatcccccaaatgagaggacatgaggtaggggaggcctggaattgtcattcatggaggagcagaggaagggggttctgggaggccaagtctctactaaaaccccgtctctactaaaaatgggggataatatgggagcaatgaggtggtcacaggcacaccaaagcctgacatctgctttccaaggccaccacttggtctctggaccgaggagttcctggggacccctgaatatatcctcaggagagccaaggttcaatgcaggtctcataaagggtacggttggagtgccaggctgtgtgggagataccggccattggacacctcactatggccccccgggccaatagagtcttcaacccaaaagaatcccgcagataaaccttcaaggtggtcgaaggggcgtggaagcatggaagagagacacaaggagagacaaagtgagttactgctgggatcctggacctcctccccacagggtgaacccttcagctcaggagtcacagagagggctctggaataaggtgggacagcggctagaaggggaagtaatcccagggggctcaccagttgctcctccatctc

SEQ ID NO: 585067 - DNA, 4001 bp, Homo sapiens
ttgtacctgactagggtgctgcttcacccattatcttcatgtgcctaatatctgtgagacaaagaacaatgtatagcagatcaatagcttgttattctaatgtaaactggtaaacaatttaggaactgcctcttcttttcctttgttatttcttcaatcttttaaaaaatttttatctttttttttttctttttgcggctccttccagagcagggctaactcctacgcagtgtgcccagagtcagcctgttttttttcaatatcttcacgtcatccaatcttcttttcctttaaaaacctacttgtgggctggttgtggtggcttgcacctgtaatcccagcactttgcgaggtcaaggcaggaagattgctgaagcccagcagtttgagaccagcctgggcaacatagtgaaactgtcttcaaaaacaaaacaaaacaaacaaaaaaacccctacttataactgctgctaatcagagtgtattttcacggcaacttgaatctttgctcctaaaggctgtcctcaaaacctgaccaaatatactttacttaatgttaagtttgcctcagttttttcctttaggtcaacaataggtatgacccaagaaccctagaacttggtcataaagcttctggtgcccttgtcacttccctcctctattatttctgtggccctcatctcctttcccactgggattcccaggaaaaactttacaaatagagcagtgacagatgagttccccaagggcttgctttgaggtagaaaggaagagtggtttgaaattcccttaccttgtcattatcataagagtaattaagacattaactatataattgactctttaacatcaaactttcaccacccaagaatgtaaactgcaggaagagaggaacctgtctgttggttcacagatcaagcacagcctaatatttgacacacagcagccccttgcttaaatatgtgaatgagtaaatggagtagaagccttaagtgaaactgtaaaagagctcaccaaaggtttatggttgattatcccatctctcccatcccactcacctgtccatttcctggtttggacatggttttgcgggctcggtggaccttgggctgtccctctgggctcgtggtggctggagggggttcagaccctgctgctgcagctccctgggctcctggcatactcagtagcctcatagccaaactctggacagatggaggtgattttcccgcccctgtcattgacatcttggcccggctaggacaggaaccccccttgctgggggaagaggggaatgactttgtggcatggcctagaaaacaggcaagcaaaaggcaagataagaaagaaggcaagagtcagaaatttcccaccaaccccccaggctacccagcctctcacccagcaggatccggcccccacggaggtccccatctccctcaagattctcagattcatccccaatgagtggtgtagcccctacaggggtgtcagccccctcatcaccaacagtgacagtgacagaggctggagatgaggggccagcaggctccagggagtcgggggtggccttgggcagggtttcttcactacgaggggtgtcccccaaagagccatgaactgtagaggaagagaaaaagttcagagctaagggctcaggagatcctgtgtttagggaaggtgacggtccaattggggcccgttttagctgcactcacctctctcggtggctcctctggtttccttctccagcagcagcgcccccatctcagcgggggcctccccctgggaggggagacaagggacaggagggctggtcagcccagtagagagttggggggtccaggatgcctgggccctgggaagagagagtaggctccggggcctacctcttcctctgtggggccccccccttccgcggcctcggctgcccggaggggccgcacgacccctcccccgggcccgcatcaaccccctccctctcggtagaccccgcatctctggggccgagagaagaggagggggagggggcggggcctccgcgccccggccccgccccctcctcccggctgcacgcgccgctccccctttgtcccccaggccgcggggaccccgggcaccaacccctccagcacccgctgccccccagcccggtggacggcccctcgtgcccctcacgcgtgctcctggggccccggcgcccgtcgcccactcaggggcagccggcggctgcacgcgcgcctccgtgcccactccccccacctcccacaccctggtcccctcatccgcccccggtgctggccccctggattgctgcaagtcccgcccgggccccccggccccgttgcacccccggagcattgcacgggcgcgcgcttcccccgggcgcgcgcgcgggcatgcacccgcctctccccctccccttccgcacctcggcggccgccgccgctgcagctcccgccgccgccgccatcgccgcttgcgctgggggccgagccggcgcgcggccgccccgggtcacgtgggcgagggagggagggcgaggaggagccttaaaggagccgctacatgctttttggccattttcccctgagagcggcctcggagatggctgtgactgtcctaagctgggagctgcaagggagaattcctgtcattcctggcctcagttctgcagggaccgagggcgagacacgcctgggcccaggtgtggcgtctctgtccccatctggttttaggtaacaagcggagcttctgaacttctcggctctcggcagcggctgtatttcctctggcctggttgggcttttcccgcctctggttgcttttctgcctttctagtttttgggttaccagatagaaggcttggcctcagttttggcctcgcctttttgctctttctaacgagcacgaaggggcgatagggacgcggaggacacctttattcttggctggttctagcatgctgcttcatgtcccctggagcagcgtgcccttctgaaaacctgtggctaaatgtctcttctgtttatatcaggcgtgttacaccttcacacgcactagggatccaggtaagcccagcggcccgaacgtcattactgactggtgacactgcagtaagtaaaccttttttgccgaacacttcataagcacagtcaggtactccgtgggtcatagcccagcggacaatttaagtataaatgatatacaccaagatagacaatctcgatagctgtatttagggtaccatccctttaggtattacgttttggtcgagtttggaaaagatctgtatgatttcacacgcagtatttgacacaggcaggtggggcacctgaggccaattaaaggccttctgggaactgtagttctctttggttaactattccagagctttctgggaattgtagttttccctgcaccttaatccaaacttagctttttttttttttttttagctttcctgaagacatgacctatttaccccagacaaaatatgaccaaacagactcctgcttacaatttccgtgggcaggttggccacctgtagctcatccctagcactgatcctaagtccctcaaatagagttcatgtgcatccccacgactgccaatcacttgtactgtgaggtacctggctaagtgttgagattgcagaactggtggagggctgggggtggggacttgggggagtccctgaccagaggagctcacttgtcacactcctctcccatgtttagggctgggctccttcaggcaagggatatgcagagttgtgacctctaggtattaagaacgcagcatcacagggagaggctgtctagggcaggatagtcatgtacacgcagttgccagagtgtaaaggaaaaaaaaaagtttttttttgttttttattttgtggaaaacaaaagcagaaaaactaaaaccccaaactccagaaaaaatcctaaaaaatatgttttttcttaaaaaatactgtatgtctctactcctctccctccct

SEQ ID NO: 585068 - DNA, 4001 bp, Homo sapiens
ctttgctcctaaaggctgtcctcaaaacctgaccaaatatactttacttaatgttaagtttgcctcagttttttcctttaggtcaacaataggtatgacccaagaaccctagaacttggtcataaagcttctggtgcccttgtcacttccctcctctattatttctgtggccctcatctcctttcccactgggattcccaggaaaaactttacaaatagagcagtgacagatgagttccccaagggcttgctttgaggtagaaaggaagagtggtttgaaattcccttaccttgtcattatcataagagtaattaagacattaactatataattgactctttaacatcaaactttcaccacccaagaatgtaaactgcaggaagagaggaacctgtctgttggttcacagatcaagcacagcctaatatttgacacacagcagccccttgcttaaatatgtgaatgagtaaatggagtagaagccttaagtgaaactgtaaaagagctcaccaaaggtttatggttgattatcccatctctcccatcccactcacctgtccatttcctggtttggacatggttttgcgggctcggtggaccttgggctgtccctctgggctcgtggtggctggagggggttcagaccctgctgctgcagctccctgggctcctggcatactcagtagcctcatagccaaactctggacagatggaggtgattttcccgcccctgtcattgacatcttggcccggctaggacaggaaccccccttgctgggggaagaggggaatgactttgtggcatggcctagaaaacaggcaagcaaaaggcaagataagaaagaaggcaagagtcagaaatttcccaccaaccccccaggctacccagcctctcacccagcaggatccggcccccacggaggtccccatctccctcaagattctcagattcatccccaatgagtggtgtagcccctacaggggtgtcagccccctcatcaccaacagtgacagtgacagaggctggagatgaggggccagcaggctccagggagtcgggggtggccttgggcagggtttcttcactacgaggggtgtcccccaaagagccatgaactgtagaggaagagaaaaagttcagagctaagggctcaggagatcctgtgtttagggaaggtgacggtccaattggggcccgttttagctgcactcacctctctcggtggctcctctggtttccttctccagcagcagcgcccccatctcagcgggggcctccccctgggaggggagacaagggacaggagggctggtcagcccagtagagagttggggggtccaggatgcctgggccctgggaagagagagtaggctccggggcctacctcttcctctgtggggccccccccttccgcggcctcggctgcccggaggggccgcacgacccctcccccgggcccgcatcaaccccctccctctcggtagaccccgcatctctggggccgagagaagaggagggggagggggcggggcctccgcgccccggccccgccccctcctcccggctgcacgcgccgctccccctttgtcccccaggccgcggggaccccgggcaccaacccctccagcacccgctgccccccagcccggtggacggcccctcgtgcccctcacgcgtgctcctggggccccggcgcccgtcgcccactcaggggcagccggcggctgcacgcgcgcctccgtgcccactccccccacctcccacaccctggtcccctcatccgcccccggtgctggccccctggattgctgcaagtcccgcccgggccccccggccccgttgcacccccggagcattgcacgggcgcgcgcttcccccgggcgcgcgcgcgggcatgcacccgcctctccccctccccttccgcacctcggcggccgccgccgctgcagctcccgccgccgccgccatcgccgcttgcgctgggggccgagccggcgcgcggccgccccgggtcacgtgggcgagggagggagggcgaggaggagccttaaaggagccgctacatgctttttggccattttcccctgagagcggcctcggagatggctgtgactgtcctaagctgggagctgcaagggagaattcctgtcattcctggcctcagttctgcagggaccgagggcgagacacgcctgggcccaggtgtggcgtctctgtccccatctggttttaggtaacaagcggagcttctgaacttctcggctctcggcagcggctgtatttcctctggcctggttgggcttttcccgcctctggttgcttttctgcctttctagtttttgggttaccagatagaaggcttggcctcagttttggcctcgcctttttgctctttctaacgagcacgaaggggcgatagggacgcggaggacacctttattcttggctggttctagcatgctgcttcatgtcccctggagcagcgtgcccttctgaaaacctgtggctaaatgtctcttctgtttatatcaggcgtgttacaccttcacacgcactagggatccaggtaagcccagcggcccgaacgtcattactgactggtgacactgcagtaagtaaaccttttttgccgaacacttcataagcacagtcaggtactccgtgggtcatagcccagcggacaatttaagtataaatgatatacaccaagatagacaatctcgatagctgtatttagggtaccatccctttaggtattacgttttggtcgagtttggaaaagatctgtatgatttcacacgcagtatttgacacaggcaggtggggcacctgaggccaattaaaggccttctgggaactgtagttctctttggttaactattccagagctttctgggaattgtagttttccctgcaccttaatccaaacttagctttttttttttttttttagctttcctgaagacatgacctatttaccccagacaaaatatgaccaaacagactcctgcttacaatttccgtgggcaggttggccacctgtagctcatccctagcactgatcctaagtccctcaaatagagttcatgtgcatccccacgactgccaatcacttgtactgtgaggtacctggctaagtgttgagattgcagaactggtggagggctgggggtggggacttgggggagtccctgaccagaggagctcacttgtcacactcctctcccatgtttagggctgggctccttcaggcaagggatatgcagagttgtgacctctaggtattaagaacgcagcatcacagggagaggctgtctagggcaggatagtcatgtacacgcagttgccagagtgtaaaggaaaaaaaaaagtttttttttgttttttattttgtggaaaacaaaagcagaaaaactaaaaccccaaactccagaaaaaatcctaaaaaatatgttttttcttaaaaaatactgtatgtctctactcctctccctccctcccaacagcccttcttgtgttctttcttttctaagtgccctatcccccccacccccatgactatccattgtttcttgctattgtacccccacttcccaatatctacccaggatgcgcaccccacgttctcttacctggcgtcttactttgttctccctcaaatttcagcaagcctcatactcgcagtctcatttccccagcatgcaagaactgtctcccacttccttttctgggactcagtaatcttttccccttaccactccctcaccccaggtctattctaagcaggagcatgtcctcctgccaaattccctccctgttcccacccaccccccaacccttcttatctcgagaaatgtcagaaccttcccctgggcagccttagccaggaataaaacatttttgtcttccctcattctataggacccttttccctccctccacatatacatgcacttctaagagaaggaaatctttctctgggaccccgtattcccctgg

SEQ ID NO: 585069 - DNA, 4001 bp, Homo sapiens
gagaaatacttatctaaacaggaagcatcacacttgggcaggataaagctttcaagagcttgcccttgattttagctcttttaggttaacattcccatgactttcctattcagctaaagagatttccttggacttattcccttactcactacaattcctacctatactttaggacaaagcttcagagcccaaaaggagagccagttggtcctaaaaatgctttgtccactctgatgccaaggtgcaaagagcatgaagcgacagacaaggcataagagatagccgcctagactcgtcattgaaggctgccaaaatcgggtccctcctgtcgggagtatctccctcctcccaaacttcacttgagactctcatcattacaaatgtcaactgcataatctttgcagttactccccacctgtgcattaacataaagcagcttgctttattgggttaattcaaaagagttatcaagtacctactgtgcgccaggcactgctgtaggtactagaaatctagcaagcaatgaacgaaatgacaaaaatctgtgtcttcctgaaacctatattctggtagaggagacgttcaagaaacaagctaaagaaacaaaatatgcagtacgctaactaatacatgctcaagagaagacaaatgaagcaggcaaggggaatatacactgtggtgggcggggtaggaaaggttggaattttaagattaagtggtcacacataatcaggcagatggtacgtgcctaaaagggtagccagagcaaaatcagatggagtggggaagagaaaggaagtgcgcttattttaacaagtcctgaagtggagagaaaaccctacgggaagggggtgaggcaaacactgaatatggaccactgaagacaaacgcggatttcacattttgcctaaagaccagtcctttgaggatggcacaacagatgttctccctttgtaaccaaagaaccaggctctgctactaaaactgtcaggcagttcatcggacacgggtgaacacacacacacacacacacacacacacagcttactgtcaggcagttcatcggacacgggtgaacacacacacacacacacacagcttactgccgaggagaaagaagcgttactaatccagagtggaggactggcctgggaaatcgggcagagagaggagttgtcggaaagaacacaccagaagcccctccgagcccagacactgatagaaacccagccgcttcccaagccaatctgcaaacccaggaggcacccacgagtgcacagacacacccccggggtgcaggcgcggtgaagggaggagaggggcaagagcttgaccgttagggcccgaaccccagaactcccgaggcagggtgtgtgccgcgcgcgggaaacgccgttctccgctccaggcgtcggcgggcggtggcgagagcaggttcgggggtccggagggtcggagggtgggctgcgcgcgggaatggccgccgcgaaggaggggcggcttcctcgggcatcccgggcgcccggccccgtgcatgcaacaggggactgggcgcgagcgggcgcctcgaggtgccggggcgggaccggggagaggggaccgagacaaagttcccgagacccgcgggcctcgggccgacccgcgcgcccccggcccaaacgctcagctcccgctccccaggcccgcgcggacccggcccctccgagggtagcgggttccagcggcgaacccgcagcgcccgcgccggcgcccgctcggccctttcccgcccggtgcgtgggtccaggagagaaagaaagcgcggcggtgtcggtggcggcgcgcggccccactcaccatgatccgcagcggctgtggcgcggcgacccgggcgggcggcgatgcgctgtccagggtagccgggtccctctgcccggcgctatctcggcgcccgcgccggttacccccacccacacccacgcccggcgcgcgcacacccgcccgcgcctccccgccccctcgggctcgcgccgccgccgcgcggcgctccgagcctcggggccgtttcgtccccgccccctctcccacaggggcctcgccggccgccgcgccaggagggcgcgcgggggaggggcgcagggcaagtgaggcggcgccccccgcccctgcggcctcgcgcgccccctcctgggcgaccgacctcgccctcgcgtccgcggcgtcccctgccggccgggcggcgatttgcaggtccagccggcgccggtttcgcgcggcggctcaacgtccacggagccccaggaatacccacccgctgcccagatcggcagccgctgctgcggggagaagcagtatcgtgcagggcgggcacgctggtcttgcttacagttgggcttcggtgggtttgaagcacacattagggggaaatggctctgttcctgcaggtttgcgcagtctgggtttcttaggtttagggggttgggtgggtttctctgggggtgcggtgggaagcggatcagttcggataacggccctgagcaagagtctctgtcccgctcccggcctgacgcggggcttccagcggacacgaccaacggtgagcgcaccctcttcactgtgaacagaacggtggcctcctagagcctgcgcttctagttactttagttgtgtgtgtggcccaagtgaaagacgtcgaaaaaattggacttgcctgagtattacatgaactttcttccatttctccctcaagcatgggaagttggcgggcgtggtggttccctcctgtaatcccagcactttgggaggctgaggcaggcgaatcacttgaggtcaggagttcgggaccagcctgggcaacatggcgaaaccccgcctcttaaataaaaaatacaaaaattagctgggtgtggtggcctgcgcctgtgatcccagccactcgggaggctgaggtgaaggatggcttgagccctggaggtggaggctgcagtgagccgagatcacgccactgcactccagcctgggcgacagaatgagaccctgtctcaaaaaaaaaaaaaaaaaaaaaaaatgtttaccacatgtgaggctcatgtggtaaacatgtttattggggttgagagcagcccgtgtggctgtgcacggaggtacctgcaccatacacttagcatcccacacctggggcggtgtgggagcccttgcagagttttgtgcagtagcagagtgagtaactgtaggtaccggggctaaatcttaactgtcatacaatcacctaatatatagtttcctaatagagagtttttcttcctaatatagaatttctgtagctgaagtggtaaatattaggcatatatttgtttataaaaggcggatgattttatgaccataaacaggttaacctagtctgataaaaatctcaggagtcagctctgccacatactgggtgtgtggtattgggttggttacctaaactgtctatgctccagtttcctgatttacgaatttgggataaaatagcacttaacattacatgtagctgttagggttaaattaatatgggtaaaactctagaaaaatatctggtacaaaagtactagttattgatttgttatcaatttgatgcatttgagaatcagaaagtgatattctatttaatgctggcatatttttataaaaaagtgtggcccaaatcaaagatacaatttgatttcagcttcacttactttgttcactcagcaaagatttcagtgcctactatgtgctaggcgttttggtaacagctagggttacagtgatgaagaaaaacacagtccctgctgttaggagtttttagaacctgtgatgatctatattatgatattgagagacttgaaggaaattcacacgaatagtccccaaatattgtttttccttggaatgattttattctttctgttttacctgtgttctttcttctatttgatacgtgttatatttgaaagctataaaagtagcttccacgtcttttggatattgaatgataaaaa

SEQ ID NO: 585070 - DNA, 4001 bp, Homo sapiens
caacagtgtctgactcctaggtgtgcgaagtgcaattacctgctaaagaacttgtctgatgttcagctctatacaattgtgtaatgggaagccctgatgcaacgtttaaagaaccgaaatcacagacgtgaagggaagggcacatctttcccagtttttgcaggtacagtgtaacatcagtgtaatagcgcatagaaacaaaaaaaaaaactgaagaaacactccattgaaaactgccttttaaccattttcagctgtaatggcttattaaatagcttatttcccagtgtcaaagttgagatcttctgaaaaagaacatacttttctaaagaagtgaatgcagtattaatgccaaataatcattttgtctctcacaaaaataattccagcatacgtttttcccaaaacataagccctatgtatcggactacattcatgctgtaaccactgtctaatttcctctaacaacaatgaacacaaaaactacaggagtacattttcatttcgaagtagggaaggcagagtcataagatggaacgttaatatccttcactgataggatgcagtgtgatactgcaaaaggaccagaaaaattgacctcgtaaaatcatttctgaaatcctttaaaccttattttagatttcaaagacttttaaatgctttaaaatcaaaagcagcgaagcaaatgaagaaataaacagtacaatgtaaaaatataatatcacagttggacgctaggaaagctgcataaatcaaacaattgacagccctgccaaattaactgcaacagctaaagaaaagtttgctgatttaagaactgtatatatgtaggcatctgggacaacctctaggtgttgctgtagagacccccttcctaaagactgatttcttccccggtgttttggcctccccctccccctgactgcactgcagtgcgcaaagccattatagacaatcacttcaaacatatttgctgttgaaaatgcctcggaaactaacattcttcaaggttcaaggagccaaacaatattattttacttttcagtccgaattatactatagatgaaggagctagatagaagaaaagattagcagggttctgtcaaagcgaccaggaggctgaagaaacctcctgtaccttcagctgcccctgaagccctccttcctccccagcccgctctccatacaaaataggactaaatgttaaaaggaatcctgtgcacggggaagagggaggcgagctcgggagatgtgggagcacagggtggggcggctcctgcgaggagctcctggctgcacaggctccatctgatatgtcagctcccgcatccgagagctgatgagagatggagggagctcagaagaaaaccctgcgagtgtcgggggaggggaggccttaacattcggatcagattaaccagtgctcaaccgcagtgcccgcgccggcccctccgctgatccgcagcatccgaaagccgcagggcgcgggggcctgtggggccgggcccgggagctgcgagaccaggggccggtgaccccccgcgggggaccgagcgaggatggggaagtcagcggctttacctgcgatggaccaggtccagcggtagaactctaccgtgtcgttgagtgccgtggacactacgtttaggacactacccggctccgagtccaggagccccatcgcggcgatgagcgggcgctggcggcaggagaaagcggagacccagagagagggctgaccccggaggcggtggcggccgacggggcgagcggcggccgggaacccctctaacggcggcggcccggctgcgtcttctcctgctcctcaaggcgccgcggcggcggggatgcggcagaaggcagggccaagcggaaggcgtcgtcaaggttcccgggagaaagacgaggaggtggaggaggcccagccgccagcacagtgcgctgcaccagtctgcagcctcgcgcagccgcccctccaatctcctcagccggcgtcacgtggccgcgcgcgggggcggggggccggccgcccctcctccctccctccctccctagtattgggactcgctggcgtagggatgctgcgctcaagggtgcgacgccaactgggctcgcgcaggcgcgcgccgtcgagcgggagcgggacacctgggctcctccttggcccctccccgcacaagtcgcctcattagccttccccgcccctgtcccgggcatcggcccctgcggaggagttcaccgcctccccacgggtgatttcttatccgccccggatacgtcctgggaaacaggacacgggaagaatgggtgttctgtgggcaaagatgaggtaggcgtggtgctttggtccttacctgacactcacctcgatttcacttgtgttcctgtttctttgacctccaccagcacatgcctgtcaccatgacaagagaagtgcatgtgttatgcctctgaagaagtgaagggtatttgtcttccatgcttcagcgatggagaatagactttggggtcgacccatgaacaaatcaacatataattgcatgaatgcttgcatgtgttttgtagactcttttactatacatggaatgaacaaagcaatataattgtgctaaattaggccattagtagttcagagaagagggagaaccgagaggggcttacaggtgaagtccgcttgaacctgaagaagttgaggtgaatctgaaaaagataatcgctcaagaggcaaagggcaatttagtgtagagaggaaaacaaagtaattgtggctattttgaaaaattgtttagataaggtataggagagcctacccttgaaaagtaaaaaaaatacagtacttggaattcataatttgatggtttctcacataaaacaagatttttgagaatagtcctttcatctacttgttttttaaatgtgtcacctacttgtttaaccttttctccacttgctcattttggatgctacattttaaagaccagtgagtcaagtgtcttattgttcctgccctttcacactgttaatgtgaatactatcttttatcatactgaaatgatctatttcccaattgacctggttatatattgtctatattttatattggaagcatcctagatggtaagaattatttttggttgcttgatgagtacctaacccagtgctataaacagtaattaataaatatttatgatgacaaaaatataacatgtctttcagagaataataaggattattgtgagtggcaggaactttattgccgaactaaagcaaacacagacttctttaaatgccctattcttgaaattaaccaaataaaatgttaatttattaatttgtcaaatatatttgcaaatctaaagttttctggattggaatgacaatttctcaagtctcaatcctaaattatgtgtaacagattctagtagctatataaaaaaaagaaatccagtcaagtctcttcatttagggagtggataaatacccattcatttacagtgatgatctaacaaagttcggattagttcgagcttcacctaaaaatttgattactatttctatattgtggaatcctggagtttttagggagaacagatctctacccatacttccattcacacacgcaaaactgcagcataatacttaatacaaggagaaattgttaaaacagcttcaggtatttccctggtatttcttctaccgtggaggtcaacttaagtccctattcactagggggtgccagtcacgtataagaaaatcatagatgagataaccttcagctgggaatggcggtcacacggatatcaccgtgtccacactccacctgtaagagtagaatgtttatttacatttataagctgtctaaacatataccaagaaccagaacataaaacttacccaatctggaaccctattacctggcatgaataagtggtttgtaaataccagtgactgcccagaaccaaagcctaccttgtttagttgtgcaaagggagggaaacccg

SEQ ID NO: 585071 - DNA, 4001 bp, Homo sapiens
aaaatttcccctttgtcttcaattagaaatagaaacgaaaatgcaaaaagagaaacagtacagaaaaagttcctggcaataagaagttagaatctagggtaaaaatctaaaaggaaaatgagtaacatttccctttcaagtgcagagctttcctggagaatcccaggcagtgtctgagctaccagaaaagtaacccacttgtccccaatcacagatggaaggctaaaatgtttgtccacggccatctaatgcaaaaccgcctgtttctatctgtagattctgcacgaaatgcttttggctgagacgtgcaagcaaaacaagtgcagaccaacaggttatctgccaagcggttaggagaatgagttacaaaacctgacaagcaacatcagctcttccgtacaattctatgaagcacttcctgccacgggtcccgctatttaaaacaaattaggctgctcgctccccacaaatcccatctagcacctctcggttcctcagtctagctaataaaccatgcactggattcttccgaaagagaccccccgcccccgaccccgccacctccgccactttgcataactggccaaatgcattctccaaatttgcaatcaaggagcttaattcacaattgtggatggggcggggggaaccgccaagtgcaagaacacggaacggttgcaagacgcagttcagcaagaacaactcttgctctaggcattgctccgtcgacccgaggtggtggggtgggagagtcttaccggcgtggaaacagtaaaaaggcacttttccttacaactcgcaagacaacacacactctagctcccccggcgcagagcacaaccgcccccccgccgcgcgcctccctcgcagccaaccgctcccgcctctccagggatcaggctcccagaaagggccgccccggtcgcccccgagtccccgccctctcgctttcccaccagcctcatccctccctgagtaccaagggctgccgttgtctggtttcaataaaaactgaagcggtcccgagctagcaggcttccctccgaggggcggacggaaggtccgcagggttaacggaagcggagagaacaggacaaaaaggaaaggccggagagtccccccagcggcgcccggtgcccgcagaccctcgcacaggctcttcgaactcacccgggtttcgccgactccaaagaaagcgcgctccctccgagagcgctcccccggctctcccgccgcgcgctccggcccgcagggcgggaggacccaggcggacagatccatccctccgcgtctggtgtgggcacggtgtcgtgccccgcggcgcctgtcagcgcgcacaggtgggaccgcagcacagagaacgctcccgagcgccctgcctcagcctcggcgtggggcgagccgcccgcgcccgcacccgcacccctttccccgcgcccgaggagccgggctgtaccccggagccggcggagctggaggccgcgggcggagcgcgggttgccccggcagctctttctcggcaccaggtccgagacctaacggcagttctctctgaccgcttcccggccgcgcgctcgcgcgggtgtcatggccgagcggcggcccccgacgaagtttcccggagctgacggctttaccttttagcccaaggggcggcagcagctttgagcagcagcaaggcggcggcggcggagggagcgcgggtggcagccggcgcagaggcggatgtagaaggagacaccggtggctaggacccgcgcgatgggaagaggaaggcgccggctatctacaatcagaacgtgggctgaccgtgacgtcacaatggcgcggccagccaatcgggacccgaaggatgaatcaagcgctatgatgtcatgcggcccgggagccaatcgcgggacaatagaactttcgtgatcgtaaattccagaatccgatgcggtggagagcctaggccggggttggcccctcggttccacgtgtctctgggaaatttttttcccctttcttcctaataagcctgcgtggaacgcagagcctgcgcaatagccccggtgaagttgtcgatgccctgaactctggtttttttactgccaggcgtggcaggagtctgtggccgcatttgggtggcagaagcccaccctcgttacggtctcctctatgagttatgtcatgctgaaggggatccacttcatcgttaaagctgaaagggttaaatgcccacggagaccgccggagtgaaggtctgcagttgaacaagataaaggaacaagaacaaaacgactcaaaactgttgtaaccataactcccttgcaaaggatttaccgtgtatttttcttagggattctgatttttctttggaagccactatcaactccatttctactctagaaattattctaaaggattgttaaatgaggaaagatggaatcagtgtcttttcagctaagcatatttaagcacttaagacaaagggggttcagggcataaacggaagatccttgctgtttttcactgatatttggataattaaagaccttcattagctttgtatcctactgtttccccattcaaaccccagagatttagcctttcttcgtgtgcccctcttgctgtattcttactcctctatgtgcatccacctaacagtcggctatttaatgtaggcaaatttattcttttttttctttttttttcttttttgagacagagtctcgctctgttgcccaggctggagtgcagtggcgcgatctcagctcactgcaacctccaccttccgggttcaagcgattctcctgcctcagcctcccaagtagctggaattacaggcacgcgccaccacacccgactaatttttgtatttttagtagagatgaggtttcgccatgttggccaggctggtctcgaactcctgacctcaggtaatccgctcgcctcagcttgccaaagtgctgggattacagacgtgagtcaccgagcctggccggcaaatttattcttttacatatttacaatgtaatgcttatcacgtgccagctgtgttccaggcagtgggccattgcaataggaatgcaagtatacaaaccatgtacaaattaagtaaattaaacatatacaaagaatcgagattgtcagttgccattgagctccacaaacactgaatgacttcaatttgctagatactatgttaggtattcaaaatttgaaaccttcaaggacttcttgggcctggaaaatgatacagtcaggaagcaactacaatgcagagtggtaaatgctgctatggacatcaagggacatgagaaaagcatatgctggtggcatagactatttttttgagatatctccttcattcttcacgcttctgccagtagtccaaggccagggttcatctctgtcatcccatctaagttttgcctttccaggttttaaaagtttctaatttaacttgagattccaaaagtcttaagttttacgccgcacttgtttgaattgtgcttacctatcaataaaatgttttaagcccatttgaccaaaatatctttaagttcaggcttatataactgtcaagctatgcattaaatatcaagtgatttttcttattgtatgattaagtatgacgttttgctgttttttcccatcccccaaaggctgcgtttttacacagttctttgttgatgtgtgtatcttggtttccattatagcatcaccaccctgtattgtagttgctttctgatggcatcatctcactcaatccttggggtatatgtaccccactttaaagaccaccgctttaggtagtaaactccgttgaaggggaaaacatgttgaattttgctccttattgatctgtagatcttagtacaatccctggcatataagggctcaataaatacgtgttagatgagtgaatctgtgaacagttactccccctcaccatcaccatcacttttcagctccagagttccaatcctctgtcagatagtcacatcccaggatta

SEQ ID NO: 585072 - DNA, 4001 bp, Homo sapiens
ggcagactcaatgctgggctctcatttgcattatctcttgaaatccacaatgatcctgccacataaaatccccatgtatagacaaggaaattgagtcaaggaggtgaggtcaatatctgaagttacaagatatttttcttgaaaaacatcaaattttagtaagccttctactgtcgcttttcagcaaagttctgtactacattctgtaacattacctatctgtaactatcaataaaaatttcccctttgtcttcaattagaaatagaaacgaaaatgcaaaaagagaaacagtacagaaaaagttcctggcaataagaagttagaatctagggtaaaaatctaaaaggaaaatgagtaacatttccctttcaagtgcagagctttcctggagaatcccaggcagtgtctgagctaccagaaaagtaacccacttgtccccaatcacagatggaaggctaaaatgtttgtccacggccatctaatgcaaaaccgcctgtttctatctgtagattctgcacgaaatgcttttggctgagacgtgcaagcaaaacaagtgcagaccaacaggttatctgccaagcggttaggagaatgagttacaaaacctgacaagcaacatcagctcttccgtacaattctatgaagcacttcctgccacgggtcccgctatttaaaacaaattaggctgctcgctccccacaaatcccatctagcacctctcggttcctcagtctagctaataaaccatgcactggattcttccgaaagagaccccccgcccccgaccccgccacctccgccactttgcataactggccaaatgcattctccaaatttgcaatcaaggagcttaattcacaattgtggatggggcggggggaaccgccaagtgcaagaacacggaacggttgcaagacgcagttcagcaagaacaactcttgctctaggcattgctccgtcgacccgaggtggtggggtgggagagtcttaccggcgtggaaacagtaaaaaggcacttttccttacaactcgcaagacaacacacactctagctcccccggcgcagagcacaaccgcccccccgccgcgcgcctccctcgcagccaaccgctcccgcctctccagggatcaggctcccagaaagggccgccccggtcgcccccgagtccccgccctctcgctttcccaccagcctcatccctccctgagtaccaagggctgccgttgtctggtttcaataaaaactgaagcggtcccgagctagcaggcttccctccgaggggcggacggaaggtccgcagggttaacggaagcggagagaacaggacaaaaaggaaaggccggagagtccccccagcggcgcccggtgcccgcagaccctcgcacaggctcttcgaactcacccgggtttcgccgactccaaagaaagcgcgctccctccgagagcgctcccccggctctcccgccgcgcgctccggcccgcagggcgggaggacccaggcggacagatccatccctccgcgtctggtgtgggcacggtgtcgtgccccgcggcgcctgtcagcgcgcacaggtgggaccgcagcacagagaacgctcccgagcgccctgcctcagcctcggcgtggggcgagccgcccgcgcccgcacccgcacccctttccccgcgcccgaggagccgggctgtaccccggagccggcggagctggaggccgcgggcggagcgcgggttgccccggcagctctttctcggcaccaggtccgagacctaacggcagttctctctgaccgcttcccggccgcgcgctcgcgcgggtgtcatggccgagcggcggcccccgacgaagtttcccggagctgacggctttaccttttagcccaaggggcggcagcagctttgagcagcagcaaggcggcggcggcggagggagcgcgggtggcagccggcgcagaggcggatgtagaaggagacaccggtggctaggacccgcgcgatgggaagaggaaggcgccggctatctacaatcagaacgtgggctgaccgtgacgtcacaatggcgcggccagccaatcgggacccgaaggatgaatcaagcgctatgatgtcatgcggcccgggagccaatcgcgggacaatagaactttcgtgatcgtaaattccagaatccgatgcggtggagagcctaggccggggttggcccctcggttccacgtgtctctgggaaatttttttcccctttcttcctaataagcctgcgtggaacgcagagcctgcgcaatagccccggtgaagttgtcgatgccctgaactctggtttttttactgccaggcgtggcaggagtctgtggccgcatttgggtggcagaagcccaccctcgttacggtctcctctatgagttatgtcatgctgaaggggatccacttcatcgttaaagctgaaagggttaaatgcccacggagaccgccggagtgaaggtctgcagttgaacaagataaaggaacaagaacaaaacgactcaaaactgttgtaaccataactcccttgcaaaggatttaccgtgtatttttcttagggattctgatttttctttggaagccactatcaactccatttctactctagaaattattctaaaggattgttaaatgaggaaagatggaatcagtgtcttttcagctaagcatatttaagcacttaagacaaagggggttcagggcataaacggaagatccttgctgtttttcactgatatttggataattaaagaccttcattagctttgtatcctactgtttccccattcaaaccccagagatttagcctttcttcgtgtgcccctcttgctgtattcttactcctctatgtgcatccacctaacagtcggctatttaatgtaggcaaatttattcttttttttctttttttttcttttttgagacagagtctcgctctgttgcccaggctggagtgcagtggcgcgatctcagctcactgcaacctccaccttccgggttcaagcgattctcctgcctcagcctcccaagtagctggaattacaggcacgcgccaccacacccgactaatttttgtatttttagtagagatgaggtttcgccatgttggccaggctggtctcgaactcctgacctcaggtaatccgctcgcctcagcttgccaaagtgctgggattacagacgtgagtcaccgagcctggccggcaaatttattcttttacatatttacaatgtaatgcttatcacgtgccagctgtgttccaggcagtgggccattgcaataggaatgcaagtatacaaaccatgtacaaattaagtaaattaaacatatacaaagaatcgagattgtcagttgccattgagctccacaaacactgaatgacttcaatttgctagatactatgttaggtattcaaaatttgaaaccttcaaggacttcttgggcctggaaaatgatacagtcaggaagcaactacaatgcagagtggtaaatgctgctatggacatcaagggacatgagaaaagcatatgctggtggcatagactatttttttgagatatctccttcattcttcacgcttctgccagtagtccaaggccagggttcatctctgtcatcccatctaagttttgcctttccaggttttaaaagtttctaatttaacttgagattccaaaagtcttaagttttacgccgcacttgtttgaattgtgcttacctatcaataaaatgttttaagcccatttgaccaaaatatctttaagttcaggcttatataactgtcaagctatgcattaaatatcaagtgatttttcttattgtatgattaagtatgacgttttgctgttttttcccatcccccaaaggctgcgtttttacacagttctttgttgatgtgtgtatcttggtttccattatagcatcaccaccctgtattgtagttgctttctgatggcatcatctcactcaatccttggggtata

SEQ ID NO: 585073 - DNA, 4001 bp, Homo sapiens
aattctttccaattcaatagatgcaaaagaccccaattaatggataaaaaaggtccataatagtcctacttgtggaagtaagtcctaggacacttccatgtcaaatgcccagagtagcatcatcacacagaatgctgtttgaccagttgactgcaggtctcaaagactggacagcttattccaaaactagacctttgctgatatctgttgtggatgtataagtaaatgagcaagaaaaatttaaaacctgaattttgcaattggaaaacctgtaaaggtttataggcatgtagaaatggttttacacaagagttacacactgattccatatacaattatcgactacctcatcgtgtgtgaaacacctcaaggtattaatactaaacaatttaagtgatcaggttgtaaaagctaaggtcttccattaacaaaatttttaaaaggtgactcaagagactaagttctcatcaatattgtgttattatagactcaaaacagtgttacaagatgcaaaattttatcttgagatgcaaacatcatgtggcttggggtacttattctgtgaaactaaggcttctttttaagtactaagcatacggcaccatctcttaagtctaggaagattgattcctcaaagtattatagcatctccatgatgtcccaaatatagtgaaaatggaaatgcatacaaaatgaaaggagacttgaaaaattagaaatttttctacaaagcattattcaatcatatgtaaggggatatattttagggtacactatacatagaaatctgtgatttccatataatacaataaaaatgattctatttccttgctgttttcaatttacttccctacctacattcttcagcttgattttcacaataatcccatgcaatgcacaagggagttgatgttgtcccattttcacacattagaaattgaggtttagggacagttacgcaaggcctcagcaaataataacagccaggaatccaggccttctctcaatcagcacttcccaccatgaattcagaataaaaaccaacccccacatttcatgaagttgactgtgggtcctgcaaatgtcatagcaaaatagcagaggagtaataggtagcttttgttagcaacacaaaccgtgtagcctctggttagaagagtgggcaaagaatcataaaggtttcttcagtcacataatgtgaacatccatggaatttctgagcacctgcaaggaaattccaaaacggagcgaaagggaaaaagtgttccgtagagttcctaataaaacttaaagagctccgctaactcttcaactgcaatcagttaacccaagtgaagtcatgtatactgcgcccagagccccctaaaagaagcaacacattgatgcaccttcttaagaccaacaactttcgcgtttgacatttttctcctctaaaaacccgtactctcctggggcagggggtcgagtatttctaaggatgaccgttttgaacagcctgctttcacaggcatccataattcaagtgagagtgaaccatcctgccctggcaaggtacctggcaggggcggctgtgtagggcacttgcaaaggctgcggaggagagcgcgcgggcgaagaagcactcccggaccatgcctctctccggtgcccggtgctgactgcgctgagagcgcaggagctcggcgccgccctccccgtactcccagccctcccgggcgccggggcctggccgcggacctaccagcgagagtactttataggtgttggggtccttggcagtgcgggcgcgcgccgccttctccagcggctcctcccccacgtccataggggccagcaaggacgcggccgcctgcgggtccccgggcgcctcggcagcgtggctgcggccccgatcgcggccgttccccgccgggccctcccggggagcgcgcccgccctcgccgccgcggctcccgccccccgcgcagccgtcgcgctccatcgtggccccggccgctccggccccgctgcccggccgcgcctttaataggccccgcgccgcccgccccgccccgcccctccccgccgcgcccgcccctcgcggtcagatccttggctccccgccctacacccggctctcgcagtcagggcaaagcgactcaacgccccggattatttggcttcctgtctgatttcgggcactctgtgtgtcggttattttgggtcccttacgtgggcgtgtcttaaacttccccccaagccgtcccctccccgcgccccggccaccctcccgacacttgcaggaatcgccctgcgtggcctcgcggcgcgggctgggctggaattgcagcgtgtggtctgcagagggcatgagatcatggggccccaaaatagagcggggaggaggagaaggatgcagccgccgatgccggtccggcttctcaaaggcgggagagagtggagtcttggggtcgacctgtgagtttctggatggaaatgcaaatgaaccatggaggaaggcgactttctgtttctccccctctgcgccccgtcccccactacctacggtactctgagagagaaatcgtccacttaaaatacgtgggttcacatgtactgaacacacgtaagggatatttcgattcccacggttttatgtggtttctggagtcttctcgctattgtttgtatgtatatttgcttatttttctagactttctgtattgaaggtttcaggagttggcgttgccctctcctgaggttgacactgatacctagctatatcaaaagtgttaatgcaatctgaaatactttgataagccttatttttcaactaggacgctaacagtgagctgattcttggtgggttttgttttacctttgattctggaacttgtacattttctggctcatcacttagcaaaatcaccagtgtgtagtgaagtgagacagagggaaaccagtgacttcgaactactttgcaatacccaggactgacttcaggtaccaaggaaaacaattaattttcaatacattttgaatacatgaatatatacaagtgtttacaaatgagaatgaatgtttaacaaatataaaatgcatgttatccctttaaaatagtcaacttgggatgctcttcatttatactgactcatccatccacccatccatttattcatcaagtaatgaatccttcaactcaatcttttggcctccaactatgcataccatataaaaaatgaattaaaatgtatctttccttaagtgtggtggaagcgggggtgggggggtaggaccaactcgtaaacaaaataattaaaacctaagtcatatatgcagaatagagtcacacataggatattgatacaggagatagaaattatttaggcagatagtatgagcaaaagagccctcggcagaacttaccttctaacaaaaagcagcccaagaaatcacttcctttctaacaaagagcaacctggaagattgggctgcaaacataggtaaggaaactggaagcttgcacgggagatgccggcagcggcacagacagaaggggctactggggccaggcatgtccaccatgggggttccacctcccctcttttttaccacatgcacagtaagaaggaaataagcaacacggagtagctacctgcctatatagtagaagattggggccggggctgccagacacttaagccctatgcagatgacacacctggtcctaaccgggttttcatgccatatgcacgaaaccgggttttccctccttatgtagatcagacaccgcctccccactagctcatctataaaaacccctgcatttcaccacgtattgcaacccattttttgggacccctctctgtagcagagctattctcctccttttgcctattaaaaattctgctccaaacctcaccctttgtgtgtgtccacatatttgatctttgtggccgtgagaccaagaacctcggatgtcaccatagacaacaaagctacttcaatattatgagagctta

SEQ ID NO: 585074 - DNA, 4001 bp, Homo sapiens
tgtctccaaaaaaaagagagagagaaaaaaaaaaaaatatatatatatatatatattagcataagagctataaagagcactctgaaattgaaattctcagaaggataaagaataaatggaatatattgaggatttactttgttactaggcttaatacttacacacattgttttacattattttatttacttcttgaaacaattctggagagacagagaatagcggtgaccttaaaatatgggatatagggaaaagctgcggcaagattggtgtgaaaaaataatgcaattagttttggtgtaaggtactgagtcaggagtcaggaagcaggcatttgaaacaggctagtgcactggggcacacacatagtccccagctactcaagaggctgaatgagaggatcacttgagcccagggttcaagaccagcctgggcaacatagcgagacccagtctctaaaaatacacatattaccaaaataataaaattaaaaaaaaaaagaaattgtgtgacagaggctgggcaaaaagtcagagctggtggattacttggaattcttggctgaggaaaacactagaggccaggtgcagtggttcatgcctgtagtcccagcactttgggaggccgaggcaggtagatcacttgatccaggagtttgagaccagcctgggcaacatggtgaaacccagtctctacaaaaaaaagaaaagaaagaaaaaaactcacaaaaacttagctgagccttgtggcatgtgcctgtggtccaagctactcaggaggctgaggcaggaggatcacttgagcctgggaaacagaggttgtggtgaggtgagatcccaaaggagagagaccctgtctcaaaaataaaattaaaattaaaaagactattagagaacatgagatttcttaagagatcttagatagggtttagtgaagcttgtgttgtaattttcatgagaataaagataaattgttggctaagaatgcagataaggaaaaaagtcataaaatgaaaatgtcaatgtcatggtagaagcaaggggagagaataattcagaatgagaaagtaccaggaagttattgttgttatgaacactcaagtggatgaaggacgaggaggactgacttttgagtcagggactcagtacagtagaaacaaagccagagcacaaaggaatggttgggggctgagaaaactgaagcaatgaaatgagccctctttaccccaaaagtttgatggcaaagggaaaagagagagtaataaaatcaaggaaatggataagcgtatttctggagtaaaaagaaaaagaaaaaaatttaaaattaaaaaaaagaaaaaagaaaataaaatcaaggaaaatttatttggggggtgagggggggtggcagatcttaccacatgaaatgacaagagagagaaaataggcaaaagagactatctctaggagtgaagtaaaataggatacaattgttggttcagcaaataatagggtacaatgattttaatttctcactttcttgtcttaaaatactcatgcaataaaaaagtgattgagaggtagttataatcatgcaaaaaatcagcgccacaaagcgttctgtcatggattccaacttttgagtttaacgtaatgttaacttgttgttactcaaatttcttacgtgtaaaatatgatttaagatattaatttgcattagagttttcataagggataatactgaatacagttacttaaaagtttacattttaatagcaacacaaagaaatgtaaatgggaaatcatatacttttaacatttgtcacaaaactagaaagactaaaaataagaattgtacttacaatgcaagctattttatatttcttaagagtgttcttcttaacaggttgttccgttgctaaagtcaacgtagattccattgtcctggtagctgcatagacctgttttatcagaataaattagtgctccttctttagtctagtctggcaaagagaaactgtatgagttacatagctgtgcctgacttttaactgtttaggaagatcacagctcttcagtgattgggcaatctggagagaggaaaaaatgttgtaataagaatcgtgtgaaaagattaaagttcatttctagtatattgcagacaactgctccttttttccttataacttttactaaatactagtcaagacatatataacaagaataacacaatcatcaaattttaatgcaatccgatcttctgttttctttaaaaataaccccgaacaaaaagccttgtcacagaaatttcagactttccgcttttctataaacttcatagcagctgaaaatcaacatagcaaaacatgtgctttgacaacagtagaaattctgaaactctgctgaaccaatataaagtacttagttctgtgataattatatcttgctttttacagtgttcacaatttgacaagtttttatacacattagctcaagtcaaacttaaaaatatcccttataaacattttattcttgtttttagatgagcaaattaaggctctgattatttaaattaagttattatatatgacttattgctcaaaattatttactaggtgccagaactagaactgatacccaagacttctaactccccaaatccaagcaattttcactaatcaatttaaattcactattttcttatgtatctagactggtgcatcctagcatgtgtactccatgctgaaaaggggttacagtttggtgatgaaagaagctaaattaataatagtgttggtcaaagagaattttagcaaatagtggatgctaaactcttctagtttcagtgaccctaaggcagtgattctcaaagtttggttccatggaacatgagttctatgacaacccccttggttaaataaagcttgaatactcctctaatgaaaagattatcaaaatcctgtagactgcagtacaccctttggaaaacactactctaactaactaaactcttccaaccctaaaagcagtgagaaaaaaaatatgaaaagaatgtattctaatataaatacaatgactgcatcactactctaactaaacatgtctaaatcatagaatttagacactatttctgaaaatcagggggaagaggattgcttgagtccaggaatttgagaccagccggggcaacatagggagactctgtctctataacaacaacaacaaaaattagccaggcatggtggtgcatgccaatagtcccagctactggagaggttgaggtgtgaggatcccttgaggccagagtttgaggctgcagtgagccatgacagatacacaaacaagcagagacagatttcagacaaagacaagagagggggtgcactcgggcagaacagactcaaaacccactcaaaacctgatcttaaccaaatgcaaagcaggtgtataagcgagccctattgcttccctggcagtaccaggcaaatggcttaacaagcccagatgggaaaataataggctcctggcataaatctggttttaccctttgagcgcgtccaccccgatctccgttattccccagtagggagagggacgtgtggttttgcacatgggatagccctggggagagtctccaggaaaacctcacccggcagctgctgggaatctcccgaagactgtcttgtcacaaggagtgtgagtattccttcgttatcttgtcatgcttcaaggcccaggaaggcctgggaaagagtcttggtgggcctttgttacttgttctggactttgtgtaagggcactggctctctcagcctttaatatttaacctaaccattcagtcagtgctgaaacagttattatggaggcctgcctgtttgtgagacctggcctgccacatgatcaccccactgcactccagcctgggcaacaagagtgagatcctgtctcaaaagtataaaaaaatgaaaaaataaaaataaataaaatataaatctgcagcatgagagccacgtttccttttct

SEQ ID NO: 585075 - DNA, 4001 bp, Homo sapiens
tctcaaaagaagacatttatgcagccaaaaaacacatgaaaaaatgctcaccatcactggccatcagagaagtgcaaatcaaaaccacaatgagatatcatctcacaccagttagaatggcaatcattaaaaagtcaggacacaacaggtgctggagaggatgtggagaaataggaacacttttacactgttggtgggactgtaaactagttcaaccattgtggaagtcagtgtggcgattcctcagggatctagaactagaaataccatttgacccagccatcccattactgggtatatacccaaaggactataaatcatgctgctataaagacacatgcacacatatgttcattgcagcattattcacaatagcaaagacttggaaccaagccaaatgtccaacaatgatagactggattaagaaaatgtggcacatatacaccatggaatactatgcagccataaaaaatgatgagttcatgtcctttgtagggacatggatgaaattggaaatccattctcagtaaactatcgcaagaacaaaaaaccaaacactgcatattctcactcataggtgggaattgaacaatgagaacacatggacacaggaaggggaacatcacactctggggactgttgtggggtggggggaagggggagggatggcattgggagatatacctaatgctagatgatgggttagtgggtgcagcgcaccagcatggcacatatatacatatgtaactaacctgcacattgtgcacatgtaccctaaaacttaaggtataataataataattaataaataaataaatctaagacctgagaccataaaaaaaaatgtcttccaaattatatcctgtaactaatttaagtggaggtggggggaagacgcacaagtgcagcaggcctcttaatttccttaaaacagattgaaacaatctctgaggggaaaaaagaagaaatagaagctcataatactgaaaccagcagttgatatttcacagtagttggcaaatcttccttcagacttgggtccacaagattgcctgattaagcaaagcccttctggagtcagatctggtgtaaacctgaatctgcctgtcactagttgtacaatcttggttggacgcgtcccttcacttctctgagcctgactttcgtcatctgtaaaatgggaatgctatgatctcatagggtggttgtgacaagaaaaggaagcattgtttttaagtccttacgtgcttttaatccagccctttaaaaaggcacttaaatgtaccttttattgtttggttggcttgttttccaggaaattagttcttaaatatcattatctataattaacataaactctaatctaatattcagacagacggatgtcgatgccatgggtggttctcctttaaaaccaaaagcctggcgaccccgccccagctcccctcaattttaccccagacccaccttaggttcctccactaccgttcggctgacttccctcccttcacacttaacaccacaggttgccttccccagcacctgctaatttttctttcctcttcccttcctggcctccgcctcggcccgccacctccctggctctttgagtcccttcgtggacgtccccgccgcgccccaggggatgtgcgtgtagtgggggagagtgggtcatagggtctggtctcaccatctctattttcaaagcccctaggggactggagagggggtgacattgccccccagaacgccgagcgcgcgaggcgcgtactcaccagccgccgcggtcgcttctttccaatgcgcggaactcggcgctcgcggcacctggcactcgtgggaagttgcggggaagggggacctggaggaagaggggcgatgccgagctcttcctgaggcgcctgcgcagtggcaggcgccgcgccgcggggcacagccccaacgtccctatctgcgccgctcggggcgctccgagtgtgcgcagctgccaggcgagcgtctaaggcgccagctcagggctggctgggaccgggcagcagagtctgaaacacgtccttggattggatgctagaaccagcgttgaatgtaactttctttccgattggttagacaggtgcttggaggggttgtatcggacctaagagtagaggttgattccactctcccaccacgcacttttcgtatcatcctagatctggatgcccttcatggaacctaaaaaccagcgagtcccggaaaggcctcaggcaattgccaagccgatggccttctgccacttagttaatgtgcacctggcagcttaggtggccgcggagaaagcaactttggctgcaccaaggtccggcacaagtctggagaagcttcagccagttccagtgagttgggataaatgaaacgtggatctaccatagacgtctgtccgtcttactggataagcgagcacctttaccggggaagttaggtaatagtttacaagtaaggttaaaagcagcacagtgcctgcggcagggaaccagtaatgagttacagctgagaaatgggtgcttactttgacagacgcgtatgtgggattgtgctcctgcttttaattggaaggttatttaatagaataatgtaactaaactttccaacataaagagcagttaccaaacagaagtagaattattcgctaacagttgggttgtccaggcacacttggcagtgagaggatagcatcttttttctttttatctgtagtgccaaacagaacttggtatagaagtacttgctaaatcactattgaatttaattgtcccgcttgttaaaatgcaggctccagaaggtattttctttcttgttcactactgtatctccagctcaaataaaaagtacaaataaattaagaatattaatcacatgtgatatcctcaagtgttaagtatttaatagctgtaaatccagtacctggattagtaaactgcagtactggaccttagataacaaattctgacgttggtccccttggtctgaaccttacagtatagctattaccaacaatctggaagcagccatggagatgatttggcaatagatgtattccgttgattattagtttgtgccttgataaattaattccagttttaagtctcaggttggcctgtgcattggtgaatatgggcatcttagatccatgggctttcagagctggaggggatggtagtgggtctgtagctgaatccctagaacctgcagaccctagaacctggtttgaatactcactctgtcactcaccagcagagcaatcatgggccagtgtctcaacctatttgagctttcatttcctcatctgcaaaacgcgtcttgttacaataccaacctcttactatcaaatgaatgaggaaagcgagtagagtattcagcacagtatctgacacatgttgttttggggattattatcattatgaccaaaaaagtaccccaatttgaacaatagtcagggtaaggccaagttttgggggaatttaggtaatgtccaatgacataacatttaagattagcagaacttaaattttgtggcatttgggggtattgtgcatatcctgtttgttcattcagtaggtgcatatgtatgcttaaagggtggacaaaactgaatgccatctaggtcagatgtgtggtgaagatagcagctggatgggcatcaggagaggactctctttatccactgctactgcctgtgtggctgggttaaattagggagtctcatgccacctgggctcttgctctgtaagataaagtggtcaggaacagagggacaaaatgacacataaggacctttggccctaaacttttgttatcctctatatatttaccatttcaaccacaaccaaaatcctgttatagtaaggatatttatcgtcttgtggaacaagaagtccagaggtaaggcagacttcaggactggttgagttagcaactcaacgatttcataatgtactcagttctttgcagctttacacttg

SEQ ID NO: 585076 - DNA, 4001 bp, Homo sapiens
ctgaaatttgttgttgactttcctaatgttaaaatttgtcaaaatttaatcttatcattgataggtgtagtaaaagcacttccctggtttaaagctctgtgaatcaaggttgctggtcttttcccctaatctgtgtatatttctaaaatactttcattctattgaagaaagctaataagacgctgtatggataaacaatagatatgtaaattttgtcagttttcatcaggcgtgcacatccagcagggatcttttgttctctcatttttctacccattcctgcatgaaggtatttataaacccaccaaaacttagatcaaaccacacttgtacaaataaatctcttgaaactgccttttgatatcttcctaagctgaagacttcttttttttttttttttgagagggagtctcactctgttgcccaagctggtgtgcggtggcacgatctcagcttactgcaacttccgccttccgtgttcaagcaattctcctgcctcagtctcccaagtagctgggactacaggcgcccgccaccacacccagctaatttttgtattttcagtagagacagggtttcgccatgttggccagcctggtctcaaaactgctgacctcaggtgattcacccttctcggctccccaaagtgctgggattacaggcatgagccaccgcagccggcctgaagacatttttaaacttcaaaaatatatcctgtttcaccttgctgtattataggtacaggtaaataaaaactacttggcatgcttgctttgctttcagaaatacaaggtatatgtacattgtgggtattcgctgagggcaataaattctgttttgctggttttaaactgtgttttcaccatacctagacatttcttaaactgaaattgttttaggtattggtctcaagatgatagctcaaatgtcatatttaaaaacgatttcttggatggcaatactctctctgattctggaaggaacattaaacacagttgcagcaaggaatagcaaataggttactgcaaatatatttactcacctatctggctatggatggtagttgctctctctgtcctttctccccctaattttctctcccacctttttaaaacaaggaaggctagtatcaaccaaatgtaatttaaggctaaaagcagaggaaataaactacatggaacacctcattttcatctatcttagcaaattaattcggcacatgtgtaagcaggagaaaactgctttcttgggaccaacaaaagtaagcaaagattaagtgttgtctaaagcttaggaatgtttggcaagaagactcaacatcacatccatgacacagagcaataaacagaggtggggggtggggaatgaaaacaatcagaatttttttttttttcgtgcacaaaatgctgcacaaaacagtggaatccctggatctggctccacatttcattgagtactttccagttctttctcccctccaacccttcctccacaaacagacttggagagcaggaaggacggggcaccgattaaacggaagagggaaagtgcagaaggagtaggtttgtgtagctcgggtagacgtcaagggcgggggtgtccatcttctccaccaggattccatcctagccacccagaatggtcgcggcgtaggttatgttcccaattcccagtcatcccgcccaccgaggcctgggcttcttagatgtgcagtggcaaggaggggacgttgctttagggacccagaggagcagtgtgggttcccgggagggaagccacccacgcccctggactcaccctcgcagcgatccgttcagtccgtattagtttggagcaacgggagggagggtctggaggagactccctcgggcgcgccgcgggtaacggcgggagggtgactggaggaacgcccccggaacgcgcaggagctcacctgcgctcaactctggagcggagcacctgaccgcgccgcttccccgccccgcctcctggcttctattggctgctgcagagatagtcacttctgcctgggttgcccccgaaagccaggctcccaggagtagctgcacggcctgtcaatcagcgggggcaggggcgggcgctgcctgggtttggagggtggagggggaggggactcccgggggcagggacccatctggtagggcgaaggcgtgggatggccaattgcttggtcacacacaaaaccttccggcaacgtgccttttccaggggaccagctgtgctggagtcagtgatgctgagagattattgcgtgttaccccaatggtgggtgtactctaacagtcactgttttttgtttaaaagcgacttgtattctctgatttcttatcccaggcttttttccttcccccgccccccgccccctgccttgtcacgaattggcgatggggcacaccatgggctttgctctgaggaacacctgcacacccgaggatgccaatgggacgatgaagtttcattctttttattagtgggtgttatctgctttacctcagaaagaatttattaacctagtcaactctgcagccccaacgtttgcagtccaggtttttgcaattgaggtccctgaggtatatttgtggtgtacctagcatggcacctgaaattgtgcgaattaaaccaagacaggttcagaattaggttaatttgcacaggagagaggctgaacagccaccctctctggtggtggcatccgagctccagactctgtttctacctttgtttgcaaagtaaacattaaaactacaaacatcaggcctgattactctttcagaaagccttcagtgcttcttgtgtgttagtgcccctattttgtctttttccgtactgtagtggattattttctcagtttttttgggataatcaatggcatttttaggcctgagggagtgtaggcaggtacttagtttgccagtatgatcccaactgtctttaccataaattatagcagtgatatcaaactaccctgaaagaatttgtccatctacacaatcccagctagaattctgacctaattagaattctagttctatctgcagtaggcaataatatcaggttgattgttacaatgtaagtttaacatctaattagctggtaaaactgggagcatatctgcaatggtggttttggctcctgcccggagctcggatcccttgtctggtgtgctggagctttaaagtgaatagagatatctgttgatatttaattaagccatgcaaacattttggtcatagctttttctctgtctgcttctaatagagggacaatctcaaccccaaacattgttacctcctaactgggtcatcccatcccgaagggcatctgggcactcttccatggccttttattcgtggtaacttgagtttatggttttcaacacgtgggatggggattaagagggaggctggtttctatgtttagtgagacccaaacacaatgaagttgaacaagttgttccaattccccaaagccctgtcctttgaaattgcccaaacttggaacagagtggtccaatcttgtaagtccttgtcccccagaataggtcaactctgtgctctcccaaaacactcaaaggacaatgtacgcttatcagagagcaggagtggtgaaaatgggcctgacttttgttcggatcactgaacattgttggactctgtttggatgacaacctgctttgctctgcaaattttatggaagttatgattatattcaccagctattcctgtgaaataggcatggtacagctggtaaccacagtgcacaacacagaaaagtgctcataagactgccagattcctcccagaagtccatataatgatatctaatgttcacctgataggcttgctattaccttatgttgttcatggggagaaagtctggtttacatagtatagaggaatgaatgtaaaacatgagattcctgctcccacatctgcacctgccctcctgtcttattgttgcctcagtatctgtctatttgc

SEQ ID NO: 585077 - DNA, 4001 bp, Homo sapiens
ttgttccaagccattaccacttgtacagttctccaataacctccaaagaatagatatctgaagtttgatggtggttcttaaattgaattaaaagaatgaccactcgagctctgacaggtgacacagcatagctcttcaaaagttgtgtcaaactcacagcctaacggatggagccagttggcccttatcacaattcaagattgcattgcaatgcagcccccatcagtggctgcaacagccacccagtgatttctcacagcaatgagcctgcaaagggaaactgaataggattaagcactattcgttcccccactgaaacctgttcaaagcttgagaattctaaatcctagcccctgcagcatagaaactgactcagtttccctcaactgctaagtccaaggtgaaatctgacagaacaccaactgaaatgctaattctcaacagcgttataaagagaccagataaataatgtattccgttgaaaaaaacaataaaaacgtagggtgggggaggaaataaagactgaaaaactgaggggaaaaccgcgaaagtcgtttttttaaaacagcttaaataacagtaacaagaggaacaagacgcctggcacacacatgccatttcagaggcaagaagttcaagaaactggggaaagatgtgattcagaaaagcgaaaatatagccacagctcctctagattccaccttctctcccatccacccagggatcttaaaattaagggcagctgtggtgttgatggggcaattcaatgaaagactacccgggtccgtagggagggctccatacgcagacccctccccaaaataatagactctaggcagtagttcttctcaccaaacctcattttatttatacatatatataaaaaaaaaaacttgacctcaggggaggtgagcgatctagagaagcataactgatgtcccaccacagacctcaggctgctgggggcagcgtctgcgcctggggatggcgtccccagacgccgacttcaaccctgtcgcgctcctttaggttctcctcgcccttccccgctgctcacctaaaaatgctcccaaccctcggcccccaggcgcaggaggagaaaaaacaagccatctgtggtgagatggcctgggtgtgggaattgtaaggatcggagcacgaaacacgcgtccctctccgcagctcccagacggcgcaggcggcagctgggggcgcggacgcgagcctacagcgggcccgacccgcaccgcgcgtggggctggcgcgccgccctcgcccggcttcccgcagtccccacgcgcgcggccggcccgcgcttcccctcctaaaaccttcctcctgaagggcgacgccgcggccgaccccctccccgcgggggggatggagccggatttttcccgctgttgctccacggggcccggacgcgtgacctgagcccacggcaccccgggggggacggcgtcctccccgtgcccccgcctttcctggctccgccgggacgcggccccggtcccccggaagagggaagagggggaccgcggggagcagcgaagccgggatccggcccggagcaacaggacccggacccccgggcaagaatcgggtcgggcagagaccgggaaggaaaggagagagggagccgcagaaaatcccaaagccgggccccctctccccgccccccatcccggtgggaccgtcccgccaccgcttcctgcccggaatcagcttcccagctgcagccagaggaaaaatctgagccgcccctgcaaccccacactgaccagtcgcccggcccgtgcagccccgcacgcctccttaccccgacgccgtacctcaggagctcgctcgccgcgggacccgtccctcttcagtcccagccgccggcagccgcgcctgcctcctccctccgctaggtttcaaattgaaattccctgactggggccgtcagaggactctgagggccggccccgccccctcgcggcggaagcccctcccgcgaccccgccggacgagcccccggcgcggaaacccccgcgggcggtcccgcccccgacgcccaggccccgcccctgcgcgggcgggggacctttcccgcgggattcggcaagcgcggccgcggagacccgggggtggaggacgtctttcgccctcagggcagcccggatgacagctaatgcgcctgggcaaggcgttctcaactgcgattcccggccttaaatgtcctctcaacttttaaaagttatttattcaaagtgcatttgctgactaaaccttcactgagcgccttcctagaggtaaacactggagcagagcctggagatgcagaataaggaaaactgggtctccctcagtctagagtggaaaaagtgctttcacaggaagggcattgaaaaggaaccatttattcttcctgtgggagggacaggaggggttggggaaaccccgtggaggaaaggcctccccagagtaagtaggatttctctgggcagaggcctgggaatctggattgcagagcatgaccacgggtgaagaagagtctggaaaaaacctagtttggggctaaattgtggaaagccacaagcacacacacgctacccttctggttcttttcttttgtacaatgaggtcaatatgtttcagattcaatatatttcatcttttgaaggtttgcacgtcaagctggtgtcaaacaacgtgtccagctcactgcctccagcatctgcctcacacgcacctcttatcccttttactcctcccacttttattgaggtctttagtgattccaccacagccaaagtcgtctccctttctttcctaaacagaaccttttccaaaattaacaatgtcaaatgaaacctcagtaacaataccttccagttaacaaaatacattcacatattttatcatcatttgatcctcacaatcaccctatgaaaaaggcaggcacgtttgagctccattacatcaaaaagatttgggaagataaattatttgccaaggtccttctagtaaataatacaaataataatagttaaggttgattgtgtgctttatgtgctaggcattgttctaagtcccttacatgtattaatttaatcacaatcccatatgctaagtatacaagttaaattttataaggtgtgctaaaacagagcagaaatctgattagacagcaattctggtaaaggagacctgggaatttaatgagaaaatactattattttctcataataagaaatatgcagcagatttacaacgaaactaatgaaacaaacttcgggatctctcattttcacaagccttgaaactaactttataattttgtatttcattttgtgttttttaaagagtccctaaagtcatataagcttttgggcccataaaacattgaaccaccctgatggagccccctttaaaatgctagtgcaaaataacataaatataggcatagttaataaaatataatgcccttctcataagaaaggatatgcttactatactctgcgttgaagtacatgaatcactcctatatgccacctcttaagaagaaatttttccctccaaaagaaaatattgataagctaaattataaccataaatgggtgaccttgaaaatgtgggaaccagcaagatttagcctaaagagatgattaaaggtgataaaaaggttgtcaaatgtataaaggctattgtgtgaaagaagaattgaactctgtttttggacacagccttacatagccctggcattttaatggaatggaacagattcagtgaggacctagcaggaactgagggcagaaaaatcaagtcccagaagctataaggaagtgaagaaaactgatggaagtggcatcatagagatttagcaaacaacaggtggtagtccagacaaccagggaagtctaacaagaagagaagaggggtttgaacagaaagaaggacaaagtcctggaataggtgacatccaaagactcaggcaggcggaagcactgtcaggacta

SEQ ID NO: 585078 - DNA, 4001 bp, Homo sapiens
ataaattgtcaatcctactttgaatcccaggacactgctacccaactaatcttcctgaactccagttctgatcatatcattcacctgtacaggaaacctcagtgactccactgagagaggaaagcaaacccagaaagcaattcttctacctcgaatagagtcctccacactctggcctgactctccttttccagcctttctactcagttctgcccaggatgaaagctatcattctggaggtaagagccactgtctccaggctcaatcctcaagcctcttctcaaaagacagccaaccaagtagaatgcccataatgacgagcaccaccgtagagtccagttaccaggctatgactttgccagacttccctgcctaccccagctcaatgctgttcttctctctcccagatcccctagtgtcccctacccctctttcagagctcagcacttttctacactctaggcccaatgcgcccatcttatccaccttaccaagcaagtctgtcttacttatttctgtatgcaccacagcaaccaaccatacccttttgcacaaagttctacttaatatatgttgggcagaaagaaacaataagaaaaatccagcatgcctaagttttcaaaccattctaggcattataatcttacttttctattatccaagataaccatcttaatgattcaataaagttattgtaatattaagtcaaacagcactctactggaacaaatattatttcggcacatttgtagtaagaaatctcatgtcgtcttttaagattcctttcaagaaaatgggggaagcatggtatttactatcttcaccctgcatgattgcttctcatggattaagattggcctactgggtcactagcttcaaaaaggtatcaaattctaagaaaagcaagaagaaactagaaatgtctccagaaaacatgctaaaattaatttgggaggggtatacaatcctcctgaatcatattaattttagatctggaagggacccaagaaaataacttagccaaccctttattatgcagatattagagaatcaaagaaattttagactgagctaactgactgaaagatcagctttttagaatatcctgagcaaaggcagaaacctaacctcctggcaaaaaatagttgccaggtatttctcatttgcataaacatgttaaatcaaccaggcaatgagctgaaattaattaggtgataagctcacatttctgaatgaatttacccctcagtgttttctcaaatggagctcacttttgccaaatatactttcctcttgttatctttgttttcccaatgcacatctcactgttgaccttccaatttcctatagatgtaaataccgtataaagatgtggaatagtggctttttaaaaaaaaaaaatacaggcatcactataatctctcatctgtgtataacctttactagactgggtagggaggatcttcttccttcactgttcaagttggtgttaaaatcacagcagaaaataggaacacagaatgcctggaaaagcgaagggtgcctatccaggaaagctcacaactgaggcataaaacaagaaatccgctcttattgttttcttctgcaccccctcaaatataatttgtaatggttacacataacttttaggaagaaaaatacaagctgtctcccaggaaatctgaccaacgcaactaccaaaaatccaaatctgaaccatacatcaacgggttaatggcaccctatgaaacaaaattcacaggtattccttccgtttgaggagaataacacagtaaaaaacagaaataccacttgccccacaacggagcatcccaaggaaaaatcgactcacatttatcagtaataaattcgctgggtaaaccatagatctcctcagaactcacacctgcagcccaggctgtgatcactgttaccaccttgcttgctggcaccgtgcaatccaaggacgcctggattaggataaacgccttaagtacagtgctgacacaatccagtcctagtgcttaagtcagaggggcccagccctgggtcaggagataatgagactgataatagagcccaaaggtaaacataaatatccttaggaagcagcattgcttttccaatcatgaaatgaattcccaaattatttcacttctttttttccagagccaaacaaaaacagatgaaaaataattccaaatgatctggagtgcagctccattattacttaaatataatgaataataaacaaagactaaagagaaatgagatcccgctctagcaacacaagaaactttctgccaagtatattccaactatacaactagacacttctcttttattttaagagaagagagcgtaaatgagtgcgtacatgctatcactcaagtgtgcttagactataaagtgatgtggctgcttctccatgaagctcatagaatcagtcacgtctacgtcctgacacttccatggtgaacaagttgagggacagggagagctccaatgcctactctgagacaagcagctgagagagagcaagagagagggcaagggaaagagaaagagagcacgtgagcgcgaacaagcatgtgcaggcaagcagtcagtcaaaacagagattctttatattacatggaacaaactttttggtacaacactagagaacaagttaagtacagcattataagaagcgcagagtgctgccagaaaaaaaagaatttatttttttagttctgtttcttcctactctatctagtcactcaggacagtttccgtcatctttctccaacacttaagctgtcatctctaccggagtttccccacccaccccatgcgtttgaaaacctcctggaaaagaacgaaaagtataaccaactttgcaaaatgacattcagaattaatcccaccctaatatttggctgtttatcccccttatttcttgatctctttccattctttcttcctgtccttctttccctacctataagtagatcctagcaacgaaagttacttccttttttccctgctctccttagactttcaaaactaaatttctccattgcccccatgccagcttcaattcttccctcaagataaagaaagccgagaaatgcacaaaattgtccataagtctttaggatgccaaatttaatattctaaagatttctgtggaagaatatttccaagcaaaacaaaaactaatgattctcaatcatctatttttcagacattccttctcatctcaccaaattcacctgagccgtcacatatagatttgtctagatttagactaaagtcaaatgcaaataaaggtgagtctgaagccatgattactgcctcaaaaagaactttaactacctgttgattcaaagtgtgccaatcatgccagacttgcttttttttcagaggcattccttcgatcaccagtgccagcacaactataaactcacacagagaagagaccttgtcctcaaattagccccaaatgcactcagaacgtttttcaccagtcctagcaataatactgagaacgtacaaggccctctgctagcactatggagtcgagggaaagtggaggggagagagaagaaagaaggggaatggcaatacaacagccttgtccctgaggagctgataacctagaccgctaacacagacaacctcatggaaagttaacattaataaacaggtcaaatttcaaggtgacattagaataaatgccgtaagtctgtgtatgagcaattgctaaaggaattacacagctacgaattcctacaggaattcagcaaaatgaagtgaatacattccagagtaaaaggaatctggcatgtgagatgatagttactttggcaaaatcattttaaaaggttaatggatttattagttttaatatggtggaagagaaatacttcagatatgactgtgtgtttttaacctctatttctttcaggttcacatcaaacaaccctaaaatggcaacaatccagccacatcataat

SEQ ID NO: 585079 - DNA, 4001 bp, Homo sapiens
atagcccaaactccagcccgagtctgcgtgtgttcgcgcgcggggtttcgccgcggcggtgcaaacttttcctctggtccgctattccagaggaatcacagtatgccagggctgaaggtttctgatcgctaacgtcaggggagtagaaatgtggttttggaggggatgagcgtgcgtttctagcagatgtccgtccttctgcaaacgcgtaaccgccagcttggaggcacggggttctctgaatgggttcagcatctatacaggttgcagatgtggaaagtggggtcagaaggtcaggctgaaagaaggactagaatttggcgccgggtttgaggggggcttgagcgaactaagaggagtgcacgatgagaataaagaaaaggtgcactaagttttcagaaatagatgaatcaaggacctatatgtaagtcccctcaacaccccgcccgataaccaccatgacctaaatttcataacagattcctctccctctacacatcaggaataagtaattatttctcttctgcttttaacagatcgaaaaatgaaacttagatacacagcctgaaagaccaggggggcgacgggatgaggggggttggggatgggattgtgacactgctcaaaagcaagagacttccattgacagggtttatttttccccagctccaactacaggcaccgaaaggtattttaccttctgtcaaaggttcaaagaaggaaaacataaccatatacaggcgtatctgtaacagcttgccaaataaaacctgccttctcctaccagaaccaaccctcagggttcaggtctttggcaaggattgggcactcggattcctcaattgctgcactatggggcaaataattggggactttgagtcgcccaggcggcatccttacaaattgcacagctccagcccgccccctgcctccacggcccgaccaagcccgctgggctgccgctgcccccatgaccgctgggcccgacgcgcagcgcgcgctgaatggagacatccccggccctcgggtcgcgcgccgcacgccgcgcttcacctccgcggcgttattgttccgtgctggcggccgagcgccaaccgcaggaccgcgccgccgcctccgacgcagtgagcacttcattagtaacccgagctttccgagctcatcgaagtctcggtccctctgggaaggctccgggctcccgccactcgccggcgggctggcggagacggtaggggctgcatttcccagtctccaacccaactctggccgcagctcccacagaaggcgaataaggagacaaggaagaccgagctagagagagatgtgacccgcctgaggtactaagaaataagctcgccggcagttcctccaaccccaccccacccccgttgctgctcacgccctccagactgcccgcgccagaaatcccgcacccgtcggatggacggctccgggcacagggctgtaggcggctcggaacagccctggttcgcgctcgctggtccgccaggagcggcctcagcggtgagggggcggggagccggcgggggagggtcgcccggcgccggaggcgcggccggcagcgccgcggacgagctggcttgtgcaggtagacatctaaataaataagtcagaacaaactttgctttcccatcaccttaccttccttcgcagcctgcgcctcccctgtgtgtgcaaagcggagcagccagatgtagcataaaataatccatgaagggtaccgagtttgaaaaaccatggtgcatgagcaggttttattttaggtttcagttatcttgagtcgtggatttttaaatgctgtttgttccgaagtagcttttgttttattgtgctccttgcatcgattccccttctcggtccccgatcggctgctccacgtttagctttttttaatttcccccccactcctgttcgctcgcaccgtgtttgctgcctgcaagtctccgactgcagaccggccgcttgctccacactccaataatatcaattagggggggagggggcggggctccgagctgagagcctccgccactcgggctgagtggcaggcacagccggcctgccaggaggcgattcccagggccaaggggcgggtcccggcgaaatggccgccccggccacgggggcggggtccgaggcaggagccaatcggtgccgagcggagtcaggttgctggtccaggattccctccaggttctgagctcgcgctggatgttcagaggagaacgaggatggtagccgaggtgtgtgctgctttggacgctctgcttttagcaaccgcagctttcgcgtagcagaataaatccgagaataacgctcccaacttacactcttttctatagctgtactccgcgcgatcttttagaaaccagaggcgaagcaagccttctctcagctaccaagcacggagcccggacagtgaaatgagctgtgcctttaagtaaagtgtgttttacttttttgttgttagaacctccgcgggctgggtaactttgttttttgcctttttgaaaagtttctacttctctttttctgttactccaagagccgtcagttttaggtaccacccaccacaatccctgaaagaataaagtaaccaagtgtattatgtttaaacaatgtttccaagagtttgcaacaagctctggcaaaagaaacagaggaaaagggagtgggaaaggaagtcttttgttttaagcgccccttctcctccgccctgtcttttcaccatagtttgttgagcgaagtgagacattaggagagaaccttctgatggttgcgtatcgtttttttacgcgtttatcattttctaaggttttccttggattgcctccactttgatagttttccatttcgctgcataaattacactgaattttaaagaatgccactacgtattaaattcataaagcaagacctttctcttcgcaagtatttaccattttcaggaattattcaatgcttatctttcaaagagaaactaagaataaaaaaagtcataaccaatatctccagttgaattcattcaacccgaacggcaaggaaggctgcgtagagaaatctgttttccattaggcagtttcggacactttgtattcaagaggtaggtaataagaggaagaactttaaaattttaattgccaaatcttcaatttcaaaggtcacacagagtaacttgatcacatgtttaagatgaatttctttttttgtcctataatttcttcctttaaaaatatttctcagtcatttatgatttccttttatttccgatagatccaaagtttgatctcacataaggctccaaactttttccaacctttctatctggaaatataaagtaaattgagttgtttctgctttttatagtagggagttctctaagatgacaacccccagatatttatttgtattttatgttaaattgtctcctgtagtttttatttgcctaataaaataacatggaagagagatatgaaatttattctttaaacctctttgattctgtagtttctgaaacatttcttcaatgttacatattcctagccattatgcctatttaatattttagaaagtgtatcaaaaagcatcttcagtgtcccttaaaggatgcatagaaaatgtaaatgcgtaatagattaaccttagaaagagacaaaaaaaaatatggggagaacacacttgttatagaggagatgaagctttatttacacaaatagatgatttaaggatgaaacttgtaaactaaaacataagagttaaaaacataaatccctgcacttagtctttagaactcacagaactacaaacttacaaatattaaaccacttctaatagttaaaacgaattctccaggatttcaacactttccccagggtctcatccccacttcttaaaatgacaccaaggtggcctttaaagtttaaaatattcctttcatctattgaatgactaatactcaatgatgtgaatacaaatacttt

SEQ ID NO: 585080 - DNA, 4001 bp, Homo sapiens
ccattttttttttcatataaacttctaaagagacattcatttcattgacttcaactattgagtcacacccactccagtctacaaccttgcacatttcctttaaagaaaggagctgtctcaattcagacactgttggcgggagccgacattagataatcacccttttagggcataatttagcagtctttaatgaagtgttaaaaaaaatgactgcattttgacctaataatttcacttctttgaatccactctgcagaaacactcccgaatgttcaaagatatctgtaaaaggaatttcaattaagccactactgtttacgacagaggaaaactgaaaagaacctaaatgcacattggtagatgcagaataatttgttgccatttaaaatatacatctacatgtaaaatacatatctacgtgtagtgacagtgaaagatgtccctaacatattgttaggcaagaaaagcaaaaattcagaattactatacaatttttgtaaaaaaaaaaagtatatgcatatatcacatacataaatgtgtacaagcagtgtgcttaagatgtgtggaggaaacactgtaagttttcactatgtacatttctttattattattttacaaccagcatgtattgttttagtattttaagaaatcaggtcatgtctcaattgtcatatatctgggattaaaaaagaaaaaaaaatccaaaaagggaaatattcaacgtttttccattagttcattctcaatatctatgaaaaaaatctaagtagcacattgctgtctaggattagcgaaaacgctagtttcgttggttggatcgttttgggttttttttagtgaattagagcaggaaaatgaggacacaaaacccaaccaaggcggagttgggctgttgaagccatcagcggcgcgcggccgggcagccaagggacccgcgaagggggggactcggaggtcgaggggcactcggagggcgaagggagccccgggcgggagacgaagggcactggcccgtgacgcaggcgcggttggaaagaagctgaggactggatgtgcggaaaccaggtcagaggggcaggcaacagagtgggcgggaaggcggccgggagcgctatacgggtctagggaatcagtaggaagccggaggcgcggctggcggcgacagcgtggccggcagagcagggtcagcccaggtcgcccggggagtgcgcagggacgcgggcaaaaagcccgggacgcgcgccgccggggcctgcggggcctgcccgaggccgaggccccggttgggggtgcgggccggagctcccgctctgcgccgggggcaggcgtctgctggcaataccttcccaggagagctctcctcccggctcccgcttcaggaacttgtaccagaacgtgtccacgcggcccggctccgccccgtcctgcgccgcctcctcggccgccagctccacctccccgagccacaggcccggctcctgcagggccagggccccgtcgcccgccgcggtgccggccggcctcaggcggacggcaccgcgcggctcccaacgccccagctcgggccgcgaccccaccaccagcagctccggccgggcgccggccacggcgggtggcaccaccaccccaaagcggaagcgcatggcgggcggcggcggcgcgaatacccgggcccggagtccccgcggccggcaggcgcggcccgagcactaggcggccgcagcgattgggcggtggtgtgggagccccgggcaccggggagaacacgtgctgttctgcgccttctttgggatgcatcacgcggctcccgagcccagacttcgtccaggccggcgggaaggggtcagcggagccgctagctgcctctttgtgccccgcaaccccgcgggcggttgatttccacctgtgggcgctggggacacgcgaccggaagaaatggaagagaaaacggggttcggggagggaggaaaacttctaagccaggcgatcgtccagttctctctccaagagactggaaattaactttatgaggatcataaggaagggaatgacctctagacagccgccttctaattgtgaaacgggggaagatcttggacctggtctctggagcgctccctatcttaaccaagtcacttactctagcaggtctcaggttctttgtctgtaaaatgagggtgtaaaataatgatctttctagaccctacgagctctgaaggatctctgattggtggagatcacccaagacccggagctgatgcaaaacattacctaccattcccttgtctgaaaagccacatcaactttcttttttcaaaaactatatttttagtatgtgtaaagtaagtttggagtaaatactttcaagtccttttcaaggtcaaaacaaaaactaattctgtgactacaaatgtatgcttttttttttttttttgagacagagtctcgctctgtccaaatgtatgcatttttaatggagtaaattaaaaaaaaaaacctttgtttaaaatttactttcagcaaaagtcagcattattttttcaacttaaaacctttttgggttttaagttgaaacaggttttttagctgtctggcccaaatccaaaatacgtatatcttggtggggaacttcaatttgtctctgccataagacaaacgaatgtcctgatactttttgattctttaacaaaattatccttgtattcttaggtttatatattcactaacatttaacataacacaaatctgttacgtgaattaaagacacacaaaggcatttttaccagtgtttggaagtttgtgaatagtaaaggggaacaggccaaaatttcatgcgttgaggatataagtaaaacagaaagtgcaaaaatgtaaactacacaaactcaatctcttgtggaacaattagaaaactaataatacattttactcttgaatgttgatattccactcgaagtttggttggttgctaagcttaaggataaacactatgaaaaatgtgaagacagaagggctggccaaacacagctgattcggcagcaaatcacacattaaatcacagtggcatgtgagtcggtttattcaaattgctgttaaaagatattcttagagtaagtttaggaaaataagagtcatttggcgatgcagagaggattttgtctacagtggaatccagactccggtgaaagttctcattccttcaggacctgggagctaacagctccggactttcttgtgctccactgtgctgcctatgttgtgtgcttcccaaatggcattattcccaccagctcttccagagtgagttctgcccattctgtagaagaaacagtagcggaaaaattaaacaatatctttgctcaacggacattgtttcctttactcttctttcatcataaagaggttgaaataattttaaccattggaagaagtaaccctcttaagcccctaaacaaaatttgtaatagcttattttatggcaaggatttaaataaggtataaattggatagctgcactgtgtagtaagtaaaatgcaactggaaaggagaacaagaccaaaatagggcttaagggacatatatcaaggccttgatcatattttgacggtcagtcatttggatgtataagtattaaccatgataatatccattgagcctatattatgggccaggcacatggttttcgtactcatattatcttatttaagtctctcaccaatcctataaggtaactacaattgttacccccatttttagatgtgaggatacttcagcacaaaagggtccaatgaacagcccacagcaaggaaggggcagagccaggggctaaaaggggtgcattcagcttatagatatagatacagatataaattctgataaggaaaatctgtttcagaatgcatataaattctagcatatttaaatgttattctctgtcagctcttaatttaaaaaaaataaattcctatcattatttcttgtaactaacttcatccttagga

SEQ ID NO: 585081 - DNA, 4001 bp, Homo sapiens
caaactgctctgtctatggggtagccattgtttattcctttactttcttaataaacttgcctttcacttaaaaaaaaaaaagaaaaaatacaagttcacggaagctgaatgtgttttacgaccagagcattattgctctcagcattccttcactatcccagagttatcaaaataagcaatttttttaaatggggaatgggagagcagaaaccaagtataacgaacaagaaggaaaaagaaccccacgtacctctgactacctaaacggtgttgaagaaaaccacaatgtcatcccaaaacatgcctcttcgatataaaaacaacaacaaatttgagctgaagacaagaggcagcaaatgaaggaaaagctctctctatcctccccctcttccgcccaaagacaggatataaattctttactggggataactttagacttaccagaccagttaaggtaccaggggaatctgcaaacaattcttactccattagtttccgaatatgtatctaccttcccaatttcctgccctttgaagcctaaaactgctctcctgtgtcctgtcacttctctgcaaatctacagttctttgttgaagatggtatacaaatgtagttctaagccaccatttcaagttacttctcattaaggtttatcccttgtgatgtgtactctgtccaagaataaacttttttcttgttatcctttcatttgttaaaggggtcactccgaactaagatgggcagaggtaaagtttagccttccctgccatgtaaaaagtagcaaaccgtactggttttccatggagaattaaatacaatcgaaatcctcacaattaccccacatgacactaagaccatcgtataaacctgcaaagaagtcaaattcaggatctaaagcggaaccgaagctctttattttggtgtgttgagttaagggggggctgtgttgtgacagtcataattagctctgggcagcttcctaatgtggaaactgctatcagttgccctgtttgctcctcctgcacccagaagttgcactttccactctcagccctggttttcgaacaatcccagcaggccctaacaattaagtcatcactaaagaaatctacatcaactatttgttgattggcgattgtcactcgcatcctccatgtggctctatggggctggaactctgcagactacactgggccggtgctttggagctggacttaaatttgaatcattcctcagcctctgactacctcttgccttggaaaagttactttatcggaatctcagttctaagtgaaataaaacggtgccaggctgcacctggtagggctacagtaatcagataacacatgaaaagcatctagcacatagtactcaaaaatggtagttatcgttatcatcattttggagacggggtctcgccgtcgcccagacaggggtgcagtggcgcgatctcggctcactgcagcctccacctcctgggctaaagcgatccttccacctcagcctacggagtagatgggaccacaggccccaccacgcccggcgatgaacacaaatttactgtccgagtgtggaccctacaggcagcgactaggaaactgcgcttctaggaacgagccacggtcaggtgagagcccgacctgcggctttccgcccccgcgccaccgcgcacagccctccctgaccgtccgccgcgttccagctcagggccaggaggcgacggagaaaccgagcctggcccagggaggccggcagggcccgccaggcgtcttgcagggccgagcgtccgataccgccacagaggccagggccgcgacgtcgccagcgccctccagcgcgggaccgccggccaccgcaggcgcgtgctcgctcgcccactccgcgtagccgagcaccacccagcctggcgccgactccctgcctagctcgggatcgaaccgggccctacacccgccctacctccataacttccggtgccccgctgcggcgcgcgtgaatgacgcaggcgcctgcgcgcccctcctccaggcgctttggagccctggcgggcacttcctaccgtacgaggcgcaggtgggagacttccgccctcgcgggactggctagggcgtttgaccgccggcggtgaaggggaggcggtgggcgtcttggagaacagagcgagatggagaagcgaggccgaggcgtgaagtcgagccccatccagaccccgaaccagacccctcagcaggctccggtgacgcctaggaaagaaaggaggcctagcatgttcgagaaggaggcagtgagtgcggagactgctaggggcccgagacggctatgtccgaccgtttaagtgaaatcgctccccagtgggccccgctcccgtcaccacccccagagccaaggaggcagcatctcccttttgtgtttcttttttccccagatgcgaaattgaagcctgagactgagttgggcagtcccctttggacttgagtgctaaagttttcttgttttttaattagggccatagaaccctacataagtcgattggaagggtggttacaagatcttcttttcaaatttactcagcttgcggatttcctgagagtactctgagtattattgctttgtactaaaacacagtatgttagtgtatttagtgccattataagcagttttgctagcgaaaaatgagtgtgttgtattaaaaaaataatttgataaaccaggcagaatagtgccatgttttgggtttttaaaacatcagcagtctggatatttgaagaatgtacaggagaaaaaaacttaagttgaaaataccctgtccaaaacttactgatattgatggaaagggtcattattcagttttattggtggtataacaggtatttctatatgattaggctttgaaaaccgttaatgtattaaagactctatattttattgatactttaacagaaaattagtttgcccaaggatacaaagctgtaatgatagagctgggaccagaacctgtatgctagtactcggtccaattggcctatactggtttctcttcgtacttacttcgtggacctataataggatgaagatagagatgacaggcaaaacaattttttgaagaccctaaaacattttaagattactcttaaaaagagaattctcaaaataatggcgaaatttcaggttcttgtttccctggtgtctacattttacagaggaaagaacgaactaaataaaggaggaaaagcaaacaggccaagtttacacagctaagaaaaagagcagagcagggctagaaacctaaatcagttggacttaaaacttcacactcccaaacactatgctgtatttcttggcaatgagtctgagtaacaggtcaccaacagtaaagaaaaatttctatatattgaggcagacaagggtggcttttataaacttactgcctatctgaggtctgaagtggtctttaaaattcaatgagcctgaactcaaaatgaggagacacataggtgcacctggtatataggttaaaatctgggagtgaggggacatggaccaaagtaattattagtatttgatatggatgtgatcaattatagctatctttaaagttgattcttttagaggtgagaaatttgaatagaacaataattgggaagaaattgagaaaggactctacaaatgctcactaaatgtacctgaggaaactgttcacttagttatttctaatttaaggtagctgttaatttccctattttggagcataggaaaatttaagacatactgtttcatcaatatgaccatctcttgattttatctgtcttgcctccatttctttttttctagtggtagcacctcagttaacttttagagaattaactcatctgcaattgtatagagctttggtgagattgtcagctacttcccttaactttttaataaggatgagacccaaactaagctaattagatgaattctttgaaataatgcaaagaaaatgattgaggtttattcac

SEQ ID NO: 585082 - DNA, 4001 bp, Homo sapiens
gtccacagagagaacagaggagagaagagaaaaagaaggcaacccctccaatttccctactgtctttttcctgaacttacagcagaccagagtgggtagggcattaccccattcatccatttttcctttgcgtatggcagtgtcccccattcattctaggggttccagaatgaaccagtgcttaccaggtacccctaaccttggtcccatcttgttttattgaggcacaattacccgtttgtaaagaaagaacagaggcgagaagagggcatctccccttgttctcttaatcctgtgcctatggcagactacagtgaacagggtgccctcccactcatccaaggggttctggaatgaacccagtgtttactgggtacccctaccctgatcccatcccatttctggaccagccttcatctgtgttgcagtggtaatctgttttgtgtttgtagcctggaactagtcttcatctctgttctatgggtactttggtctcttgcatctgcctccttgggctgtcctatatccttgtctccatgaccttatagtgacccttgttcagagcattctagcaacagaatgattatctcttctcagattctcatttcccatgttctttaagaagacgagaagcctgtttttctgccaattgctgcaagggggctggacttctctcccttcaaatataactttgaaggtcctgatacatattgagaagggcctggaggtgattagaggaatggaggaaaatttgtatttgggattcttcatcctcccagggtaacatgcagaacaaatgcttaacgaggtagaacaatccctctgctacaggagaaagcgggaggaagcaagaggaatactcatggaaagccttcatatgtttgcagaaacagcagcccttggatttgagagggcaacgtttatttgccctcttgatataaaggaggaacctctggaggacttggtgtttgggataagaccctgcaaacggcagagaattttccttccccacaaaggggtgctaactcagaaaaaaagcgagtgggtggggtccttaagggctacagagtgaggtcctatgcaagcaagcaaaccattcaaaagccagggagaaacatggccctggagcataacagggatgaaaagcatatggtaagtcataaggagctgacagagctaaggttctgattagtgtctatcccggcagtgagccaacagacagggaaagggttggaggtcatccgagctggtagggtaacaagtataaatatcaagggacatccgtaagggagtccatctcttggttgccaggctaacacagcaagagctgcgggtgcatgaataacaaatagggaatgtgtgtttaaggcagagaagaaagttgcagggcatgcaaagtaagaacagagaaaagacagacttacccccaaggcagttggtccaatgggtgtgcgaggtcattttggaatacatacagagaaaggaaaataggtggtggtgggtttttgggaaagagctgattttagttgaaaaagcagaggaaaccccagatactacatggttgtaggttttagccctaccgctctcatcagcctcctgtctgggggggccattagtgtctcaggtctacttagtgcagactccaaggtccttcccacccctgcaagccatccttcggggtgagcagagagagcagccagggggagcagagccactgtggttgagaggaatcgttccaggggtaggttagtaagcaggagagtgaaagaggagaacgaaaccacgtacgagggttgaacgcctccagccgaagaaggcaaggcgtagaggtgtcttaccactagggaaggtatccgagtcactgcaccatttgagagatccaagtgccctgttcagcccttgacttggggttttatacatcggcatggttccggggtttccatttctcctccttggatttttttccttggggtgggctgtctgctgtgcagtggcctgtcagcacttgggaggagccacatgtgcatttgtttactgaagttgtgcgcatgctttcttgagacatttttcccttatcagtcaggtgttcctagaggaaggtcacatactggttaaactgtcattttgcttcttagtgcgcatgcttgagcccacttgcccagcttcggagatcttatcaggaagttgctgatcaccagcttccggtgtttcctgtcttttgggagactgtctttccctggtactggctgcaacccattattattattttagagaaacagtgtaacaaccgcctgatcatcacctgatggtcgcctgacattcctgagctgggggccctctcctgccctgctcatgtctgcctgactacctactctaacagaaccagcttaacctaatggcctcctgatagaactgcttgcttttttttttttggagacagcctcgctctgtctcccaggctggagtgcagtgatgcaatcttggctcactgcaacctccacctcccgggttcaagtgattcttgtgcctcagactcctgaatagctggaattaacaggtgtgcaccaccatgcccagctaatttttgtatttttagtagagacaagatttcaccatggtggccaggctgatcttgaactcctgacctcaagtgatctgctgtccttggcctcccaaagtgctgggattacaggcatgaaccaccacacctggcccaaactgctttccataaacataaatttacctttctaatgtaaatcaaatcacacaacatgctttttgtgtttgacttctttctgctagcataatgcttttgaaatctatttgtgttgtgtatatcagtaatacattcttttgtattgctgaaagagtattccattgtatagatataccacaatttgtttatccatttactcattgatggacatgagagtggtttccagcttttggctgttagtattattattgttttatttatttatttttttgagatggggtcttgctctgtcgcccaagctggagtgcagtggtatgatcttggctcactgcaacctttgcctcctgggttcaagcaattctcctgcctcagcctcccaagtagctgggattataggcacctgccaccatgcctggctaatttattttattttattatatatttttttgtatttttagtagagacggggtttcaccatgttggccaggctggtttcgaactcctgacctcaagtaatccacccgcctgggcctcccaaagtgttgggattacaggcgtgagcctgtagtagtagtattagtagttagtagtattattaacattcagttgcaaatcttggtgtagacatatgttttcatttctcttgagtaacttcatttctcttgagaaactgccaaacatttgcattgccagcagtcatgagtgagaatttgttactccgcatccatcaccaacatttgatggtattgtctgtttttaatttagccattctagaggatgggtattatgcttttgatttttgtttcattaatgactaattattttcagcatcttttatgtgttatttgccattctttctaccttctgtgtaaatcatctttacaagttttttctactcatttaaaaaattgtgttacttttatcaagttgtaaacaattctttattctggatacaagttttttttgtttgtttttatcagatatgttttgcaagtattttcttctattctgtagcttgcctttttatttttatttttttgagatggagtcttgctttgttgcccaggctggagtacagtggcacaatcttggctcactgcagcccccgcctcctgggttcaaaaggttgccctgtttcagtctccccagtagctgggaattacaggcatgtgccaccatacctagctaatttttgtatttttagtagaggcagggtttcaccatgttggccaggctggtttcgaactcctgatctcaggtggtccacccatctcggcctcccaaa

SEQ ID NO: 585083 - DNA, 4001 bp, Homo sapiens
agaatctgcccttcagtatcctctggggccaaactgcactttagtccccttccttctgctataaatatccctggaaacagaatactgaacaaaaactggtccacggcttacaaggcagaaagatatagggacaccagtccggataccagtgtacagttgggaaatgcctaattcaggacccagccatgtggcgccctgaagcttccaaacccagtccggggtacacctgtcctgtggccacctaggaaggtgttcaccagaagcgcccacctaatccctctgcaggcccatcaggaaaacaaaaaacaaaaaacaaaaggagaaactgggcaagagaaaatgggagggagaggagagggagaaagaacaattcttgtagggaaaaaaattaaaatgaggacacacaaccttcgccattgaagtcacaaagtggtctcctgtgtcctggaccggccgcgctccttccacagtggctgcgaggcgcagaccctggctgacccgcacgccactccggggcattctccccgggtgggacaggcttgtcactgggctggcaggagattatttttaagcacttgtgcttccatatggcttgttttaaactcgcgggacacctacaaatttccggctgtcagaagtcacatgccagcaatccgctccagcgcggactcagccagctaactccgaaatcagacccattcaactcccaatcgctctctaaagccccaggacgtggggtggggaggaggggaaagcgggtgacaggaatcgcttcccagaaagtcatcatcatagctgacatatttccaatcaaatagtctagatgaaaggaaatttggggagcacattaaacaaaaacattaaaaggataaataaaactctgctgagctctgctaactccaaacacccccaactttaaatgccaagagcgagaccttcccaagtgactcaaagcgccccgtgtttatttgcctggaggtgttttcccccacaaataactgctgctttgtctggttttccaacgtgtgttttgttaggaagcccgggctttcgggtctgcctctcgcacggacggtaagtgggtggagagtacgtttttttcagctgcccggcgagagaacttgactctgaacgcagcgcgggctgcacgcagaacccccgggctgggccgcgcgccccgggctccctgcgcgcaccctcgggtcgcgcgtcccgcggctcccgcagctccctaggctctcccttctccctccctccctccctccctcctgccgggcgcggcggccaccccgacgggcggcgcgggcgcgggtacctgtagaatgccggcgggccggcctcgcgcaccgtgtagccgctgggctcgttctccaggtagtagggcacctgctggccgtggggctgcaggaaaggcgacagctgcggcggcgggtgcagtagcatcagcgggctcggagacacgctgttgagtggggggaaaccccccaggccgttggagccgaacgccgcagcctcagacccggggccgtaggggaggccggtctgaccgtagacctgcgcgttggcggcggccgcggcgttgaactcgtaggcggcgccctcggggtagttgtacacggcgggcttgctgctgtccaggtacacctcgcccaggggccgctccagggggatcttgagctgcggacggttcaggggctccagctcgttcccttggatctgatgcagtagggccatcccagatgctttggtgtggagggtcatggtcatggtccgtggccgcgggcagggtgcagaccgtgtccccgcagggcagaaggctcagaaaccggcgggccacctggaaaaagagcacagcccgaggttagaggcgacgcagcgcatgtcccgccgacacgcgagctctggccccggccctgccccgggagcctgcgggtccggtgaagccgggcgacccgacgggagcaagtgcagtcccaggacgaacgccctccgccagctcctgggctcccgggcctccaactttaagtactggtctcccgagctcatatgcattacaaaggtgctggaggacggccagggactgttgccttgccctgacattggcttaaacatcactccaggcacaactcgatttggagcgatcccaaagagcagcttccctgaactttactttacttgtcgtcgctgctggatagaggctgagtttcacggccagggggcgggggcgcacgaggatctgctaaaggtggcccagggaagactgggcttaaaataaacgcgaaagacggatccaggggccggctttctctaatgtgctgccttatgtgccccgtgccagactccgatatatctctgtttgtctctctttctgtttgattccccctcctcgttggctagaaatacgtagtgtgtacataggatgaccctggggaggactacactgtaaccgagatagggcagatagaatggggtgtgcggttgcatacgcagccagccacagacagctatatttagcagctgggggaactgacagggggcatctgaggggaagggggcggagattcagggtatacatataggaagagctgcattttgccatcaggagaatgcaacctgccaggacctcagtttcttcctctgcaaaatgctcccaaagtagatagacccttccacaaccttctgagattctctcagcctgacttgtgtgtttatgttggaccacagtactgtacttggtcccattaggaattctcatgtgaaggatgattcagaaaaacctttggttagggcgcacatgggtgttcatgccttccacaggttggttatgcaaccaaaacttcagaaaactgaatataaaatgtgaccttttcataccaaacataacctcaggtcacgaaccaaagctttggcaattatgttacattgtcggtctggtccagctaacagatttttaaaatgcatttctgcatgtctatcctttagtcctacaactcgatcttctcggttcacttgggctaggatatgcagaatcaaatatccagatgaaaaacaaatagaaaaaagtttttaactgaattaaaagttaaacatgcacacgcacatacacacacacatatatgtgtatatatatatatatatatatatatatacatattaaggagacaaaaaataggtgaagtatatcatgcgtctataatcttggatagtttatacttttgaataaacttcctttgctgcagcctaatagactctgatacaactatcaatactttgttttaattgctatcccaaacacccaacagagtatctgacgaagtgttcatggtctatctaaatgccaagcttactgttactaagagttacatttttgactattttatatcaagtatacattttatctaattcttacaaaaatagaccattgttggacaatatgcaaatgtagctgaagccaaaatcgagtttagcattaatgactatagattgtcagcaaataaagggttaaaaacacattaggtgcatcgcagatatttccctttatggccagcaatcattactttccaaagcaattttttacagatgatttaatttccataaatcacactttcaattttcaaatgcctttttaaaacacatgcaaaaagcacttcatagggctcttaaaaaatgtgaacctgccaaattatatgcaaatggcacaaagaatcctacaagtcctgaaagaaaaaggagacacacacatacccccatggagaacagcaatcctcatctccctgctaggatacagacactagccagaaaggtaagttgctttctcaaaatgctaaagctacagagagagaaatcaaaacaagcctaccctgctggatcaagaacgtctttccagaaatgttccatgggcttgtagaagtcaagggccgagagagtgagaaggaaggaaggaatgtgctcgcatgtgcgagtggctcagtgtgtgaactaggcagagagagtgtgtggat

SEQ ID NO: 585084 - DNA, 4001 bp, Homo sapiens
gaaagaacaattcttgtagggaaaaaaattaaaatgaggacacacaaccttcgccattgaagtcacaaagtggtctcctgtgtcctggaccggccgcgctccttccacagtggctgcgaggcgcagaccctggctgacccgcacgccactccggggcattctccccgggtgggacaggcttgtcactgggctggcaggagattatttttaagcacttgtgcttccatatggcttgttttaaactcgcgggacacctacaaatttccggctgtcagaagtcacatgccagcaatccgctccagcgcggactcagccagctaactccgaaatcagacccattcaactcccaatcgctctctaaagccccaggacgtggggtggggaggaggggaaagcgggtgacaggaatcgcttcccagaaagtcatcatcatagctgacatatttccaatcaaatagtctagatgaaaggaaatttggggagcacattaaacaaaaacattaaaaggataaataaaactctgctgagctctgctaactccaaacacccccaactttaaatgccaagagcgagaccttcccaagtgactcaaagcgccccgtgtttatttgcctggaggtgttttcccccacaaataactgctgctttgtctggttttccaacgtgtgttttgttaggaagcccgggctttcgggtctgcctctcgcacggacggtaagtgggtggagagtacgtttttttcagctgcccggcgagagaacttgactctgaacgcagcgcgggctgcacgcagaacccccgggctgggccgcgcgccccgggctccctgcgcgcaccctcgggtcgcgcgtcccgcggctcccgcagctccctaggctctcccttctccctccctccctccctccctcctgccgggcgcggcggccaccccgacgggcggcgcgggcgcgggtacctgtagaatgccggcgggccggcctcgcgcaccgtgtagccgctgggctcgttctccaggtagtagggcacctgctggccgtggggctgcaggaaaggcgacagctgcggcggcgggtgcagtagcatcagcgggctcggagacacgctgttgagtggggggaaaccccccaggccgttggagccgaacgccgcagcctcagacccggggccgtaggggaggccggtctgaccgtagacctgcgcgttggcggcggccgcggcgttgaactcgtaggcggcgccctcggggtagttgtacacggcgggcttgctgctgtccaggtacacctcgcccaggggccgctccagggggatcttgagctgcggacggttcaggggctccagctcgttcccttggatctgatgcagtagggccatcccagatgctttggtgtggagggtcatggtcatggtccgtggccgcgggcagggtgcagaccgtgtccccgcagggcagaaggctcagaaaccggcgggccacctggaaaaagagcacagcccgaggttagaggcgacgcagcgcatgtcccgccgacacgcgagctctggccccggccctgccccgggagcctgcgggtccggtgaagccgggcgacccgacgggagcaagtgcagtcccaggacgaacgccctccgccagctcctgggctcccgggcctccaactttaagtactggtctcccgagctcatatgcattacaaaggtgctggaggacggccagggactgttgccttgccctgacattggcttaaacatcactccaggcacaactcgatttggagcgatcccaaagagcagcttccctgaactttactttacttgtcgtcgctgctggatagaggctgagtttcacggccagggggcgggggcgcacgaggatctgctaaaggtggcccagggaagactgggcttaaaataaacgcgaaagacggatccaggggccggctttctctaatgtgctgccttatgtgccccgtgccagactccgatatatctctgtttgtctctctttctgtttgattccccctcctcgttggctagaaatacgtagtgtgtacataggatgaccctggggaggactacactgtaaccgagatagggcagatagaatggggtgtgcggttgcatacgcagccagccacagacagctatatttagcagctgggggaactgacagggggcatctgaggggaagggggcggagattcagggtatacatataggaagagctgcattttgccatcaggagaatgcaacctgccaggacctcagtttcttcctctgcaaaatgctcccaaagtagatagacccttccacaaccttctgagattctctcagcctgacttgtgtgtttatgttggaccacagtactgtacttggtcccattaggaattctcatgtgaaggatgattcagaaaaacctttggttagggcgcacatgggtgttcatgccttccacaggttggttatgcaaccaaaacttcagaaaactgaatataaaatgtgaccttttcataccaaacataacctcaggtcacgaaccaaagctttggcaattatgttacattgtcggtctggtccagctaacagatttttaaaatgcatttctgcatgtctatcctttagtcctacaactcgatcttctcggttcacttgggctaggatatgcagaatcaaatatccagatgaaaaacaaatagaaaaaagtttttaactgaattaaaagttaaacatgcacacgcacatacacacacacatatatgtgtatatatatatatatatatatatatatacatattaaggagacaaaaaataggtgaagtatatcatgcgtctataatcttggatagtttatacttttgaataaacttcctttgctgcagcctaatagactctgatacaactatcaatactttgttttaattgctatcccaaacacccaacagagtatctgacgaagtgttcatggtctatctaaatgccaagcttactgttactaagagttacatttttgactattttatatcaagtatacattttatctaattcttacaaaaatagaccattgttggacaatatgcaaatgtagctgaagccaaaatcgagtttagcattaatgactatagattgtcagcaaataaagggttaaaaacacattaggtgcatcgcagatatttccctttatggccagcaatcattactttccaaagcaattttttacagatgatttaatttccataaatcacactttcaattttcaaatgcctttttaaaacacatgcaaaaagcacttcatagggctcttaaaaaatgtgaacctgccaaattatatgcaaatggcacaaagaatcctacaagtcctgaaagaaaaaggagacacacacatacccccatggagaacagcaatcctcatctccctgctaggatacagacactagccagaaaggtaagttgctttctcaaaatgctaaagctacagagagagaaatcaaaacaagcctaccctgctggatcaagaacgtctttccagaaatgttccatgggcttgtagaagtcaagggccgagagagtgagaaggaaggaaggaatgtgctcgcatgtgcgagtggctcagtgtgtgaactaggcagagagagtgtgtggatgtgtttgtgcgtggaatggcagggattcgggaagcagccagtaggcagggcacttggcagcccctcccggcagacacgcagctgggctactgcacagcgctggatgaatggcagtggggagtgaggggagacttgctgtctgctcacagggagcagtgtggcacagccagagaaagctgtactggggaggagaaaccccagcccctttgcccctacccttggaggctggaaagtaccctatgctttctgctgccaccccaagcaagaggaaaaacaggcttgctgtgaatcatagtcttacggctaaaatagaatgccagtcaaaagtgtatggatatcaagtttacaaaataggacatg

SEQ ID NO: 585085 - DNA, 4001 bp, Homo sapiens
cccgggcctccaactttaagtactggtctcccgagctcatatgcattacaaaggtgctggaggacggccagggactgttgccttgccctgacattggcttaaacatcactccaggcacaactcgatttggagcgatcccaaagagcagcttccctgaactttactttacttgtcgtcgctgctggatagaggctgagtttcacggccagggggcgggggcgcacgaggatctgctaaaggtggcccagggaagactgggcttaaaataaacgcgaaagacggatccaggggccggctttctctaatgtgctgccttatgtgccccgtgccagactccgatatatctctgtttgtctctctttctgtttgattccccctcctcgttggctagaaatacgtagtgtgtacataggatgaccctggggaggactacactgtaaccgagatagggcagatagaatggggtgtgcggttgcatacgcagccagccacagacagctatatttagcagctgggggaactgacagggggcatctgaggggaagggggcggagattcagggtatacatataggaagagctgcattttgccatcaggagaatgcaacctgccaggacctcagtttcttcctctgcaaaatgctcccaaagtagatagacccttccacaaccttctgagattctctcagcctgacttgtgtgtttatgttggaccacagtactgtacttggtcccattaggaattctcatgtgaaggatgattcagaaaaacctttggttagggcgcacatgggtgttcatgccttccacaggttggttatgcaaccaaaacttcagaaaactgaatataaaatgtgaccttttcataccaaacataacctcaggtcacgaaccaaagctttggcaattatgttacattgtcggtctggtccagctaacagatttttaaaatgcatttctgcatgtctatcctttagtcctacaactcgatcttctcggttcacttgggctaggatatgcagaatcaaatatccagatgaaaaacaaatagaaaaaagtttttaactgaattaaaagttaaacatgcacacgcacatacacacacacatatatgtgtatatatatatatatatatatatatatacatattaaggagacaaaaaataggtgaagtatatcatgcgtctataatcttggatagtttatacttttgaataaacttcctttgctgcagcctaatagactctgatacaactatcaatactttgttttaattgctatcccaaacacccaacagagtatctgacgaagtgttcatggtctatctaaatgccaagcttactgttactaagagttacatttttgactattttatatcaagtatacattttatctaattcttacaaaaatagaccattgttggacaatatgcaaatgtagctgaagccaaaatcgagtttagcattaatgactatagattgtcagcaaataaagggttaaaaacacattaggtgcatcgcagatatttccctttatggccagcaatcattactttccaaagcaattttttacagatgatttaatttccataaatcacactttcaattttcaaatgcctttttaaaacacatgcaaaaagcacttcatagggctcttaaaaaatgtgaacctgccaaattatatgcaaatggcacaaagaatcctacaagtcctgaaagaaaaaggagacacacacatacccccatggagaacagcaatcctcatctccctgctaggatacagacactagccagaaaggtaagttgctttctcaaaatgctaaagctacagagagagaaatcaaaacaagcctaccctgctggatcaagaacgtctttccagaaatgttccatgggcttgtagaagtcaagggccgagagagtgagaaggaaggaaggaatgtgctcgcatgtgcgagtggctcagtgtgtgaactaggcagagagagtgtgtggatgtgtttgtgcgtggaatggcagggattcgggaagcagccagtaggcagggcacttggcagcccctcccggcagacacgcagctgggctactgcacagcgctggatgaatggcagtggggagtgaggggagacttgctgtctgctcacagggagcagtgtggcacagccagagaaagctgtactggggaggagaaaccccagcccctttgcccctacccttggaggctggaaagtaccctatgctttctgctgccaccccaagcaagaggaaaaacaggcttgctgtgaatcatagtcttacggctaaaatagaatgccagtcaaaagtgtatggatatcaagtttacaaaataggacatgggtggtttttccgaaagaatataatttaacaataaaagccttctgggatacatgtggatcaaatgccttactggccctagcccccagtctctgaacagaggcattgccatgcctccgattgcaccaggaaaccagactttggaataaatgttttggcattctagggatgtgtttccagctgaaatgtaatactcctccacttcgttaaccaaacccacaaacctttccatgaatagctcagttgactgctttctgtaaacatgtgaaaaatacgtattattaaaagcctaggatatgaacataagataaaggtagatacctttgttttaaactgattttaggctttcgagttgcactgaccgtgattgggaacgaggtctctcatttcccagtggcgttcacatggatccacctcttgaccactttctcaactattctctcggccatagtactaacacgcaatactgaggtgctcctagagtgcccacgctcagggtcccaggacacatgacacccaatggaggctttgttgccagacattagtcaccaccttggatattaaatgactctaatcacaatgccaggagtggccggtctctggccctgggacactatgcagttactgagagatttatgagtggctcttgagaccagtacaaaaaagaaatagaaagccataaaaatgttaatgatgccatcatgcaaatatatgtttttgtgctttgaaagacccccagtattgcagtgtttgagcacaggagagctctctccatagtcagtattgaaaataaatactggatataaataaatattgaaaagaaagactgttaccctttgttggtgacagtggtgcctcctgtaggtcaacaatggccacccatgctctagaccagtcccagaaaaaagcaagagtattcagggagggaggagagaggaacaggggaaaggagaaggaaaggaaaggggatctgcaattgttcactattgacataggaagaataagaaggttagctgtctcctcacaggctttgattgttcagagacttacaatcaaagttagcccaagaagttcagtaaaggcagttttcttaaccactttctctccagcattctcttccaaactcatcttggtgagccttgtccctgggcttggtgagcatgggtgggaaagtatactgtgctacgccgactttcctcttctgcctttggcaaaaacttcactcgggctcccagctctcttggcttccctccctaccctctcctgctggacacacacgttccagccgtgacttactggctctctcaggtgaagaagggtaaagattgatctggctcctccgttgaatgtgtctccagccccacttttccagcggtctgctgggcattgcaggcttgttcaaatatgagtcaccattctcaaacatggtgttcctctcaacttccccgtgtctgtgcccagcatcactgtctctccagccacccagattaaaatctcactgtcttcttcgagggctgattttcccttgccttccacacctaatcaagaggcaattcctaagccttctagctttacaatctctctttttccattgcatttcggccactccctttgagacccattaccttacctgtcctaacggcctcct

SEQ ID NO: 585086 - DNA, 4001 bp, Homo sapiens
agagctgggtcactctcttccttgcccttttttccgaatagccaatctgcagtcctggagcacagctgttccctattcaaagcaaagtaaactcaaccaccaggccgtcagcccaagcgattgttctgagcaactaggataaatgaatgcagacagactcagagaagacctgcagataaccatgtgaaaatgtttagcagatgcctgatgtaaatacttacactgtgtggaggtttagagtgagtgtttgaagggaaggtagatggtagctagctctaaacccaatattgaacaaaaagacacagagttatcagaaacgaaagatagttggactttgttcttgctgcaagtttaagacacaagagctttattcctttccttgactgtcacaagcaataaaatgaaacacgtatctccaaatgtccaagaaaaatcttctactcgtaaatacgacgcttgtattcttaaggaaaattttgcttttttcctacatgtcgtatcttttacctacattgtttttatttgtaatttccttgaaaatctgacattctagagtattttatccaactgctacagcattatctgcatgcattccaaggcctagtgggcagtcatcacaggatattaacaaaatcaaagaaaatatttgcttttgagaaataggaagggattttatggtatacaaatggaccctgaaccatccatggttctcaaacattctcatccaatttaagttctctgtacgtttcagaattcagttcaaatacttctacctggtcttcctgtttactctcaatattaaaatatgtatataccacattcaaaaccagatgagtttcccagcaacctcatatacatggagttgctctgtaagcctattagatctggcacataaaggcattaaaaatctggcacctttaagcaggaaccattgccatgatcacaagtcctgattaagcccaacccttctatcgagtaaattgctttaaaatcttttaatcatgttggctcctacggacttgtttgagagaatactggttatcttcttgacaaagtatgaaacttacagttcagcgagcatttcctaagacatgtggcattcctctaaccaaaatgaaagtattctgccctgtcttgtgactgccacatcattacccgagtagcccactgctatatgtggtggagtcattatgtatgtgccattgtgaggcaaaaaggaactgagaaaatgggacaccaggactcaaaagagcttgcttaaaatcagaggcccatttcaagacagaggggctcgttcttttgctgctaaatgtgtagcttttcagaaaacttgactgcctttaggaaacaaataatggcttattcacatcgcttagttcaaactcacgtaagttatggctccaaagattcagaaaacaggtagtgtgttcatgctactctgagatttgtccaattaagagcttataaaattctaacacagttcaacaatacagtgtctcctagctagtgctagatccaatacatttatgttatctggaacagacaggcagcctgtgtgtgctgtactaagaaaagggtagtcggattgccctctgcctcagctaaatattattctagaagtgaatttccactgtaccaagtttagatttcacattttatcatcccaggaatacttgccagtaactttgcaaaatatccttggagcagaaagacaaaaaaatgaacattttttaaagatgagaggtaagctctgaagttacaatatgcttgtaaacagtagcacattatatcaaaaaggaaaaaataaattgagaagaaataggagtacctacttgaagagaagattatcactcagagactgtcttcttatgctatagaatgggcaggagaaaggagcatggacctttcgagcctgttaaagagcttctgagcatggagcctgcattttcagttttggtaaaatccgttctgagtcggtagacaggaggctgttatgaccatgaaattaggaaatgcagtaactcaaaaataaagaactagcaccaccatttgactaggattggaaaatctcattgaaaaaatagaggagggggtggccttgcttttgccaagccaggcccgaatctaactttcttagcacttccattaagatggatgttcaagaagaggtaaatcatgtgttaatctgcctgaaatattttttatgccatccagccgattttctctttattcgtaataaagcttgaagtctagacaggcatgtggagttggaaaaaaaaataaaacatcattcagcacataaattttgttaatccaaagttagctacagctaaactaaaagcaggggcaaggaaatatcttctgtgagtgttttttgggactttcttactcaggcatggactcaaaagcccgctctgcacttcttgttaccgattaatgaggttcttgacttcggtaacctgcagaggtctagcttctcacactcttcagcccttccttctgtcatatgatccttccataaactgtccggtatttcctgcagcaatttttaagtttatgaggttattgattgtttgtttaacactaagataaacattttaaagtagcaaaggggctgtaaaatcatattaaaaatttttaataatattgacattttaatatctcatcatgtctggtgtggtttatgcagtaggtactttaaatgaatttttaaaaatattttctctttttcttctctacaagccttgaaaaaaggctggctttctggcagtgagaatggtagaatggggcggaggcaggatctccctcttgctactgtatttctctctgtcccagtacccagtacagaggaacacctgccaagtaagaggtgcatctcaaaactggcatgggaaagaaagaaaaccaaaataaataatcaacactttaaaacattttgaaatcaatgatcttaactgtcttcagtcttctctatacttatcagttagcccataaaataatttaaatatgtaaatttgtctgagagtaacttctccagaatacatagagcaggacacattttagttaatatgtaaagtatttaattgcaattgactgaacataaaatctcaacaagattcacttacacaaggaataatcatgtatactaacgcattgtgggggttctgtaagcatttttattgtgtttattatgatttctggtgaaaggtagattattgaataacatgctctgaacagttcaagtgttttgaaagcgaaatattttttctaaattaattaaatctttcaattattttagttgccagaatgggtgaagtatgcttttcaaacagcatttagctacctgttaaaaccagttttacacatcaatacagagatgaaaattacatagagcaacagttctcaaaataggacagctaatgaattctgaactgaaggttatagattatttccttttcattagaaaatataaatgtacaatgtatattgtatgtaaattataaattaacttaattatcctttaaaaaactattattgatattcgtttgcattccaatatgtgctttcttgagtgcaagagaataaaaatgacaacaaatgtcttctgagcatatatagtcatcccttagtattagggttgggatattggttccaggacaagtccctgatataaaatcacatagtatttacatatatcctatgcacatcctcctgtatactttaaataatccatagattacttataatacctaaaacaatgtaaatgtgaagtaaatatgtgttatactatattgtttagagaatgaaaagagcaaagtcatgttcagtactggcacaatttttttcctggatatttttttcttttttttttcccctagtatgcagctattttcctagatattttttatccaaccagaggttgattgaatcctcagatgtggaacccacagatatggagggctggctgtactagatgtcagatactagtttaagtatctttg

SEQ ID NO: 585087 - DNA, 4001 bp, Homo sapiens
aggtaggaaccatgtatatcttcaactcagtaccatcaacattttgtacccagtggacacaataaatgacatccttccaattcaagctttccatgcatgtgcctaactccaagagggatcccctgccaagacttgtatgattgaaatctgaaagcctaggaatcctcactggatccctggtgaggacaacacaggaaacctgaggggccaggatcaaaagaccttaaatcagaaataaacaaatagaccaggtgcggtggctcacacctataatctcaacactttgggagtctggggcgggtggattacttgaggtcaggagtttgagaccagcctgaccaacatagtgaaacattatctctacgaaaaatacaaaaattagccgtgcgtggtgaccggcgcctgtaatcccagctactcaggaggctgaggcaggagaatcacttgaacccgggaagcggaagttggagtgagccaagatcacgccactgcactccagcctgggcaagagagcaagactccgtctcagaacaaacaaacactattttcaaaagagaaaaagaaaggataaggatacatttctgaatcctaaggtctcaccacgggaagcctgtatctttacaattcaacaatcagcatggcccccagagatgacggggttcatccattcagatgagaaaatgaagaaagtggcaggattttgtaggaataggaagctccttcgggctcatgcccagccacaggctgccacagcacggaaaggaaaagtgaaaccagctccatcaagtcatttttcactctaggattgtcaaaagctttacattcatctcttgggatccgaggagagatatctgccgagagagaatttggatcggagccagcaaagcaaactccagaagccttggctgctgcgaaaggggattcaacacctttccgggtcgttctcacttcatttccagccggtccccctttggtgctgtttcccaagtaatcagacctcaggggttgcctcctggtggggaaagggaagcttgccttgctggagaaggggctcaaggcacaggacttgcctcggacttgccaaggaggcttgcaggaggctctttgtctactcctctgtcctcatccaagtaagaggagcggggaattccgaggctgtaactgcctgggaaacgccagccacggagctgctgaggatcagactcctgggtttcagcatggaggccagggaagggtctgataatgggtatgggtcctggcgagaggggagtggagaaaggccttggagtgggacggggcgccagctctgggggcagtctcgaggcacctagaaaaccggcgagtggggagaggctgctaaagaggggctccctgcgagaatgcgttcaccagctgtgaggacctggctggcgcacgaacttccaaagacctcacatctggttggtgtaggggcgaccagtggtaagggggctgcggaaagggcccgcaggggctgtgcgtgatgccttcagagctgtgtatgacaccgagagagtcaggggcggtgacccgcgtctggaggtggaaggggaagtgagtgagggatggatgtgaggtttaggaatgtgttggaaagagagattcccgccaggtaaaaggtctgataaaataggtttggaaatctaggtggtgaggaaaggatgcgggagcaggtggctctgcgtgcgcgctgcgtgttcagccgccaggctcttacctgcattacaggtggaggtgaggaagccaccggctttctgtcttgagcgctcccctggctgtggctgctggggccctaggcccgcgccccgcagtcctcctccgccaaacccctaacctggctccgagaactggaaggtcgcgtgggaggaaatctctttcgagaagcgccaaggcgtgtgcgcccgggtcctccgcaggcgggcaggcgcgcgaggcgctccggtaatcgctatccttccgggaaacgaaaacgaaagagcgggatgcggttccacttgcgccgctgcgggctaggagcagggcagggcagggcaggggccggccccgtgggagcgcagcaccggggcgctgcccgctcgctagcctgggaggcgtgggtcctgcacacagcctccagccggcggacagtccctctggcgacctggccttggctcccactggggcagagccgggattctgcaggatctgaggatctaaggggacccctagtcctgaactcggaaccaactgcgtctctcacggtcccgagcccaggaccaggaaggaccctgtgagtctccgcacataggataggaaggggcctcgcatggtgcctctccctttaggggtgagtgaccttcccggccccgatactgtctcggcctgccgtttggccccgctgaggccccacaggtccggaaccgtcgcaccaccatcagagcggctgtgctctcctgagcagggccagactactcggagatcccgactgacaccttttcctgggcctctgggtgctccggggttggtgcctgcccacccatcaccctttccatctgtctcagctccccctgtctcaagagaggttgtgcgcataaaaacaaaccagaagacaccgaagaaaaggaaagaaaagcattaacaaccttctgctgaaaatctgagggtgtagacgctgttacaaagtaggcttagcactggtatatcatcacaagctctaggccagcaataagaaaccagtaagaacaaggccagaaacccagtaggaaaaaaaaatgagcaaaggatatgaataaacagtccacataaaaggaaatgccaaatggctcctgaatatacaaaaagatgcccagggtgcagtggctcatgcctgtaatcccagcactttgggatgccaaggtgggaggatcgcttgagcccaggagttggacaccagtctgaacaacatggtgagatcctgtctttactgaaaatttaaaaaattagccgggcatggtggggctacacctgtagccccagctattcaggaggctgaggatggaagatcgcttgagcctgagagttggaggctgcagtgagccgtgactgtgccactgcactccagcctgggcagcagagaaagaaaaagatgctcagacaaactcactattttaaatgtgcaaattaaagttattctgagatagaaatttttacccataaatttggcaaaaatttaaaagtttactaacataatctgctggaaaagctgaggtaaagtggtgcaaccccacagcggggtctggcaaatttacaaatgcattttcctttcacccagcaatctgcctaccagaaatttattcaacaaatatccaaagtatacatagttacttatttaatcatggtttataatagcaaagtatgagaaataactcaggtgtccacaaaaggaggcttgataaactaatgcacattcatttcttttaattttaattttctattttttttttttttttagagacagggtctcactctgtcgcccaggctggagtgcagtggtgccatcaaagcccaccttaacctccaactcctgggctccagtgatctcccacctcagctcccaaatcactgggattacagatgtgagccaccacacccagccaaattatgtacattcatttaactgaatacaatacaacactttatggagttctctgtggatcatggcaagctctccaagaggcagtatggcatagtggataataatctagacttaggaacacctgcctggtttggaatcccagccatgtcatttactggctgtgtgcccttgagcaagtttgtgttaaccactctactgcctccctctactaactactgcctcaattttttaacagtaaaaaagagcaaataataatacctatcccataaggttgttatgaataagtaagttaacttttataaaacacccagaacagtgcctgaacacccacgctaagtaaaaaaatcaaggtacaaaacagtgtgtatta

SEQ ID NO: 585088 - DNA, 4001 bp, Homo sapiens
caaccttaaaggtaggaaccatgtatatcttcaactcagtaccatcaacattttgtacccagtggacacaataaatgacatccttccaattcaagctttccatgcatgtgcctaactccaagagggatcccctgccaagacttgtatgattgaaatctgaaagcctaggaatcctcactggatccctggtgaggacaacacaggaaacctgaggggccaggatcaaaagaccttaaatcagaaataaacaaatagaccaggtgcggtggctcacacctataatctcaacactttgggagtctggggcgggtggattacttgaggtcaggagtttgagaccagcctgaccaacatagtgaaacattatctctacgaaaaatacaaaaattagccgtgcgtggtgaccggcgcctgtaatcccagctactcaggaggctgaggcaggagaatcacttgaacccgggaagcggaagttggagtgagccaagatcacgccactgcactccagcctgggcaagagagcaagactccgtctcagaacaaacaaacactattttcaaaagagaaaaagaaaggataaggatacatttctgaatcctaaggtctcaccacgggaagcctgtatctttacaattcaacaatcagcatggcccccagagatgacggggttcatccattcagatgagaaaatgaagaaagtggcaggattttgtaggaataggaagctccttcgggctcatgcccagccacaggctgccacagcacggaaaggaaaagtgaaaccagctccatcaagtcatttttcactctaggattgtcaaaagctttacattcatctcttgggatccgaggagagatatctgccgagagagaatttggatcggagccagcaaagcaaactccagaagccttggctgctgcgaaaggggattcaacacctttccgggtcgttctcacttcatttccagccggtccccctttggtgctgtttcccaagtaatcagacctcaggggttgcctcctggtggggaaagggaagcttgccttgctggagaaggggctcaaggcacaggacttgcctcggacttgccaaggaggcttgcaggaggctctttgtctactcctctgtcctcatccaagtaagaggagcggggaattccgaggctgtaactgcctgggaaacgccagccacggagctgctgaggatcagactcctgggtttcagcatggaggccagggaagggtctgataatgggtatgggtcctggcgagaggggagtggagaaaggccttggagtgggacggggcgccagctctgggggcagtctcgaggcacctagaaaaccggcgagtggggagaggctgctaaagaggggctccctgcgagaatgcgttcaccagctgtgaggacctggctggcgcacgaacttccaaagacctcacatctggttggtgtaggggcgaccagtggtaagggggctgcggaaagggcccgcaggggctgtgcgtgatgccttcagagctgtgtatgacaccgagagagtcaggggcggtgacccgcgtctggaggtggaaggggaagtgagtgagggatggatgtgaggtttaggaatgtgttggaaagagagattcccgccaggtaaaaggtctgataaaataggtttggaaatctaggtggtgaggaaaggatgcgggagcaggtggctctgcgtgcgcgctgcgtgttcagccgccaggctcttacctgcattacaggtggaggtgaggaagccaccggctttctgtcttgagcgctcccctggctgtggctgctggggccctaggcccgcgccccgcagtcctcctccgccaaacccctaacctggctccgagaactggaaggtcgcgtgggaggaaatctctttcgagaagcgccaaggcgtgtgcgcccgggtcctccgcaggcgggcaggcgcgcgaggcgctccggtaatcgctatccttccgggaaacgaaaacgaaagagcgggatgcggttccacttgcgccgctgcgggctaggagcagggcagggcagggcaggggccggccccgtgggagcgcagcaccggggcgctgcccgctcgctagcctgggaggcgtgggtcctgcacacagcctccagccggcggacagtccctctggcgacctggccttggctcccactggggcagagccgggattctgcaggatctgaggatctaaggggacccctagtcctgaactcggaaccaactgcgtctctcacggtcccgagcccaggaccaggaaggaccctgtgagtctccgcacataggataggaaggggcctcgcatggtgcctctccctttaggggtgagtgaccttcccggccccgatactgtctcggcctgccgtttggccccgctgaggccccacaggtccggaaccgtcgcaccaccatcagagcggctgtgctctcctgagcagggccagactactcggagatcccgactgacaccttttcctgggcctctgggtgctccggggttggtgcctgcccacccatcaccctttccatctgtctcagctccccctgtctcaagagaggttgtgcgcataaaaacaaaccagaagacaccgaagaaaaggaaagaaaagcattaacaaccttctgctgaaaatctgagggtgtagacgctgttacaaagtaggcttagcactggtatatcatcacaagctctaggccagcaataagaaaccagtaagaacaaggccagaaacccagtaggaaaaaaaaatgagcaaaggatatgaataaacagtccacataaaaggaaatgccaaatggctcctgaatatacaaaaagatgcccagggtgcagtggctcatgcctgtaatcccagcactttgggatgccaaggtgggaggatcgcttgagcccaggagttggacaccagtctgaacaacatggtgagatcctgtctttactgaaaatttaaaaaattagccgggcatggtggggctacacctgtagccccagctattcaggaggctgaggatggaagatcgcttgagcctgagagttggaggctgcagtgagccgtgactgtgccactgcactccagcctgggcagcagagaaagaaaaagatgctcagacaaactcactattttaaatgtgcaaattaaagttattctgagatagaaatttttacccataaatttggcaaaaatttaaaagtttactaacataatctgctggaaaagctgaggtaaagtggtgcaaccccacagcggggtctggcaaatttacaaatgcattttcctttcacccagcaatctgcctaccagaaatttattcaacaaatatccaaagtatacatagttacttatttaatcatggtttataatagcaaagtatgagaaataactcaggtgtccacaaaaggaggcttgataaactaatgcacattcatttcttttaattttaattttctattttttttttttttttagagacagggtctcactctgtcgcccaggctggagtgcagtggtgccatcaaagcccaccttaacctccaactcctgggctccagtgatctcccacctcagctcccaaatcactgggattacagatgtgagccaccacacccagccaaattatgtacattcatttaactgaatacaatacaacactttatggagttctctgtggatcatggcaagctctccaagaggcagtatggcatagtggataataatctagacttaggaacacctgcctggtttggaatcccagccatgtcatttactggctgtgtgcccttgagcaagtttgtgttaaccactctactgcctccctctactaactactgcctcaattttttaacagtaaaaaagagcaaataataatacctatcccataaggttgttatgaataagtaagttaacttttataaaacacccagaacagtgcctgaacacccacgctaagtaaaaaaatcaaggtacaaaacag

SEQ ID NO: 585089 - DNA, 4001 bp, Homo sapiens
agaaatattaaaagttctttgctagaagactattttttcagtaccaacttcatttcccatatgattcttacataatgggctcccaagaacttagcaagttaataaccatcttttagaaaagtaatacagttgacccttaagcaacatgggtttgaatgagacagatccacttatacacggattttttcaacaaaagttgcactgagtgtgcctgcatctcccactcccctttcacttcctccatctcttccatctctgccattcctgagaaaatccctcctcttcttcctcctccacaatctactcatgcagactatggggataataaccttcatgattctccactttcatttaaagaagagtaaatacatttgttgtgattttaacattttcctctctcagcttactttaagaatacagtatataatacgtataacatacaaaatacatgtaagtcaactgtttatgtatcagtaaggcttctggtcaacagtaggctattagtaaagtcctgggaaagtcaaaagttacatggaaatttttgactgcgtgggcacccctaaccccagtgttgttcaagggtcaactgtagttcaaaatggcattcaatacaggaaattaaatacttgacaagaaaaaaagatcactttctaaaacttccaagagttggtccaagtcacactgggggaactctgcttctctgctttaatttattaagtttctacttagacaaacaagtgaacatgtaagtactaagcacacatcaccctctttctattactactctgggaatcgccaacttttagcacaaaaaaatcatctttgagaagattctggctttcagttgatttgtcattaaaggagtcagttacacaaagcatgggccagtacatactaacattcataaacaaaacattattatgcattagaagacagatccacataagctcagaagtaacttttcaatattgcatagtgcacacaaaaagatttaattaaagtgtggctaacttagaaaaaatattttttaagtgttccttgtaagtttactcacagattcataaaggcatcagacttaaaatttctcagacttattagtatgttgacctttggcagattaaaaataacttacttccattcaaagacgagttctttcaagaactatttctcggaattactaaagtgttttcttaacaatcttgggatacagggttacgcatcaccaggcttccaggctgctggtgtgcggacctggagccggcgcgcaaggtctcaatggcagctacaacaggacctcaggctctttgctcaagcactctgagccgccgctcccctatccgtaaaatgggtcacacggcagcgtacatacacccgcgcgaggatcaagtacgtgcacgcaaacgctgacaacagcggcaggcgccttttaagcgctcaggacagccagagcgggatgcacgcctaggcagacaggtaacacccgcctcgcgttcacttttccggagaaattctcaaatctcacggagtggcaactgcgcaagggcgaagcggcgcagtctggggccagctccagcgggcggggcctggagtcagccctctgcagcccacgcccctcaccggcgcaggtggggaccgcgggggtgcgaactggcgggggtgggcgcggagcccagcaggcggctgacggcggggatgggggctgcggggctgggaaccgcggggggtcgcggggccccgcaggtgaccgacggcgccagtgggcgcggctgtcccttcaccgctgaggcctggacggacgccgcaggcggccacctccgtgcagctgacgtccatgtcccgctggccttcggccaggccctccagcctcccacacatacctccagccgtcctgccgcagctcacggccggcacagacagggcccggtaggtctcgccgaagactccgcggccgccagccgccggcacctcacttccgcccgccgcgagcgccgagcgtgtagatccgcctggcagtcgagcgccgagtcctcgatgggcggagccttcaggggagggtagaggaggggaggagaccggcgcgggtgctggaggtcagcaggggccgtgggcggtggacgctggaatgccttgggttccgagggacccagctgcctgaatggacacgagtaggaggtttttgctgggcgtctttgcggtggcgggaagcggtgagggagggaaagaaggatacaagctcaaggggcaggccgggtgcaccatccatccccgtgccctcgggtcatctcagggagactgtgggatgatagtgcgtttgtgggccacagttcacaacgatgggccctgcatcgggtcagaggacccctccggaacagggggatgcacaaggtcaagagaatgcatggaatcagagggctgcaccaggtcaggggggctgcaccgagaccagaggaagcatcaggtcaggaggatgcactggagtgtgcatccccagggggccacactgggtaaggaggatgcaccaggttaggaggcagcactgggtcagaaggatgcactggaatcaggggactgtaccaggttggggggcgtgcctcaggtcaggaggaggcactggggtccgggggcaacattgagtcaggggcagccctaggtcaggaggatgcatggggtcagggggctgcaggggtttgagggctgcactgggtcagggcgccataccaggtcaggggatgcgcaggatcgggggagatgcccggggtcgtgggatgctgggggttggggggatgctcggggtcggggagttctcgaggtcgggggatactcggggtcagggggttctcagggttggggggatacttagggtcaggggatgctctaggttgggggaagctcgggttcaggggctatggccagggaggaaggacaatcaggaaagtgggggtagcggattctggaagctaaatagtttcaggaaggaggaattgatagccaatgttcagaagtactgtgaggccaagactccagagacaattgagtttggcatatgccagtcattggcatccttgacaaaagcagtttcaaaggagtgtggggaagctacatctcgtcagagtggactgtgaaaagaatattaagtgaagtggaaaaaagtaagtttcaacaacctaggttggcagatttagcaataaaaatacaaatacccagtaaagtttaatttcagataaacaacaagtaatttgtagtatagatatatttatcactaaactaatgttgcatgggatatacttctactaaaacattgttttgagaggtgacagcgtgctggcagccctcacagccctcgctcgctctgggcacctcctcggccttggcacccactctggctgtgcttgaggagcccttcagcccaccgctgcactgtgggagcccctttctaggctggccaaggccggagccggctccctcagcttgtggggaggtgtggagggagaggcgctggtgggaacccgggctgcgtgcggcacttgcgggccagcgcgagttctgggtgggcgtgggctcagcgggccggcactcggagcggccagccaacccgccggccctgggcagtgaggggcttagcacctgggccagcagctgctgtgctcaatttctccccgggccttagctgccttcccgcggggcagggctggggacctgcagcctgcagtgcctgagccaaccccccccgccatgggcttccgtgcgcccgagcctccccgacgagcgctgccccctgcttcacggcccccagtcccatcgaccacccaagggctgaggagtgtgggcgcatggctcgggactggcaggcggctccacctgcggccccggtcgggatccactgggtgaagccagctgggttcctgagtctggtggggacttggagaacctttatgtctagcccagggattataaatacaccaatcggcacactgtatctagctcaaggtttgtaaacacac

SEQ ID NO: 585090 - DNA, 4001 bp, Homo sapiens
aagctgctgatggggagcccgcggttgttaaacgctcctaagactcccacctaaatcccgcaggagcccgcactgaaactgacaaacacccgagggttcacaaagtggccacagatgagaagaggaacaaaatgccatattccaggaggtgtatttcgctccaacaattacgttgatcccagggtgccaagccaaaaggggtaagggagaaagaaaactgttaagtatgagcccttaatgtgaaacctaacctgttggttctcttaggtatcagattttggaagtgtctgtaatgacagccaggaaagcaaactaatggccaacggcccactgggtttgaacaccagagtcctgttacctcctcacagatcaagtacacaacacacacacacacacacacacacacacacgaagttgctccacgtggaactgctctggaaccaaaacacacgcccgggcgctattctgcaccttggcagaaagggcagagggacctgcaccttcctcccctgccctcaggttaagattcatgaatgactctctaggcccgctcgggatggcggggagaggcgcaggagacgcggtgagagaggacagtctccacaccactctcccgcacacactctcaccccaggcgcaaatccgttgtcttcataggaaggagaaagaggggtggtggtgaagggaaacactatcctcccaagcagggaagagatgacaaaaattaaattgcgctctctgctttcgccccagctctgccaccggactcggtccgcaaattccctaatcgctccgagctgttcagaatctcgcaaacaaagggagaaaactctttcaagtgctaccaaacgaaagttcgggttgctgtgcggcgcagaataaaacaagcacacacacgtctacttccaaacctcgcttcaccacgctaaaaatccgagccatttcaagttccactgcctccccagacccagcaggcttggaaggagagaaaaacctgctctacccagccaggtcccttcctttggagaagttataagccttccatggcacccgctactcgagccaatgaacgcgactgctctgacaaggcgcctctaatttcaccgaccctggcaaactgcaggagacattcagtccacgccacataaaaactattaaagtgggatcgccgcagttgaaaagcccgatcagtgcctggagattagaacgcgagcctttaaagtacacacgcacccggcaccgggaaagcccaggcgcctgtgaccctccgaaggactctgggtcagcatcctcgcgcctggaccatctagggggtcatcagaaagtaatacacgtcataagaaagatgtgggggagaccccgatgctcgcgcctctgccaggtggaggcggggtgcaggtagaagccgcgcgctggactgctggatgaactccgttacgcgcaggctccgcgccgaccccggaagggacaggcaggctcggaagggacccttggggcttggggacgtcttctagggcagagagcaccgctgcggtccgagcggcccgggccctcaggcgtggggcacccggcctccaagcgccccccggggacgcaggcgcccacgcaccgtccagctgcgcgtcctcagtacccagcgctcggcgtccccggcggagcctcgcgcactttcccggaaagtttgggggttctctcaactcaggctcccccgggagccctggggcgggggttggaagaaggggtcactcacctcgtcgcccggtccgcctcgggttcccgaagtgtctgtcccagccgcggttcagtgcgtccgtaattaagtatttattctcgttccttccagtgtcgaagtttccccttcgcgctgtgcctctggtgaaaacaggacatccccttcggccaccccacaacaaatagcgtacacaagcgggggagaagcggggcggagggagaagccggctccgagggggaggaggaaaggagaggagccaaaactccggactgcgacaggggggaaaggagaagaaaagaaaatgagagagcgcgcccagccgccgcagtcgtcactccccggcttttcccgcagctctttccccctctctaaggcagcgacaacttcacgtggacaggatggaagttttgcgcggaagccgggaacggccggagcgtgcgccgcgctgccggcagcctcgcacttgcgcagggaggtggggcgggggcgacgtcgccaccggctactgcgggctcgtgaggccgccgggggcctcgggggaggccgccagggacgcggggggcggcggcgcgcgggggacccactccgtttttatttgacctcgggtgactgcctattgtcatggtttgcgatctcgcgtggggaccgcccagggcctcggggccctggatgtcccgggtggcgccgccgtaatctccgtgccctccgcgccgcccccaccccgcccccacccgggccgactcgagcggctgcagcctccaggctgaggggagggacccgcgaccgcgctctcctccctgggccggagagccactgtcgatccccacctgcttctgtggggcagcccccggaattgcctggaactctctcgctacccagttcccctgtgcaggccactgcgggccccctgccggactcctttccacttaccccaagggaggagacagaagggacttcgcctacttgcaacaacgtgaaataaaaaccaacccagaccagactggggcgctttttctgacgggaggaaatacccttttccgtggagatatatgttatgaaggactaagcggtctggggataggctgtgctgcgaagggcctgggccccttccagtgctgctgggtgcaggtataggcatccgtcccagacgcccaaaggtcaggcagcaacgacttacttccaaggcggcgtcagagcttctctaggcacattgctgaaatgacatttcgtgtctaagccttctgcgcatgcactacgcgactacataggatttacgattttatacccacacgtgtgtatgccacaaccaggggacacagcaaaggtagacggaataaacaatccataaattttgcatccatttaatcacctcttccaaaaacctattgtctattttagcggcaccttctctgtcatattgataataaatgttttaatttattgataaatcactgagtgtcaatcattgtattggtcacttatggtacatgagttcatttaacttccatgacaactctacggtggtcattattaagccggtataaaagatgaggaaaccaaagcccaaagaatcatgagtgacttttccaaagacaaatccagtggtctctaatcacaaagcctatgatacaacaacctctacattaccttaggtgtggtctaagagattacagattaatccgtagaaattactcccattcaaagaaagtttagttttaatatattcactaagttacgttctgaaaaaggttcagaaaaaagatttcatcctctactttaggttggtcttatgcaactgatatgagcactgtctaattcaaaagcagtatcaaccctgaatacttatggttacaatttattttttaatgagtggggaattatctacaatgcttaagaggctctagaaaaggtggtgttgtaaatttaaaatgataaaggcagtcgttgctgctctcatcacttactgggtgttctttcctgcagatttattttggagggtgtaggcattgccaggcataatgtttccttttctggttctcaaggtagaaagggttctggcagtggggttggcacaaagcggatttggagcatggttgagagcacattctggcctaacgaggaatgccagttaatatacactggagagaaaaatatgaatggacagatttaattaattttgcagatttattttctccatttcacatgtgagaaaactaagggctcagaatttttagaagcttgctaataaatggcagacctgagtttcaag

SEQ ID NO: 585091 - DNA, 4001 bp, Homo sapiens
caggaggtgtatttcgctccaacaattacgttgatcccagggtgccaagccaaaaggggtaagggagaaagaaaactgttaagtatgagcccttaatgtgaaacctaacctgttggttctcttaggtatcagattttggaagtgtctgtaatgacagccaggaaagcaaactaatggccaacggcccactgggtttgaacaccagagtcctgttacctcctcacagatcaagtacacaacacacacacacacacacacacacacacacgaagttgctccacgtggaactgctctggaaccaaaacacacgcccgggcgctattctgcaccttggcagaaagggcagagggacctgcaccttcctcccctgccctcaggttaagattcatgaatgactctctaggcccgctcgggatggcggggagaggcgcaggagacgcggtgagagaggacagtctccacaccactctcccgcacacactctcaccccaggcgcaaatccgttgtcttcataggaaggagaaagaggggtggtggtgaagggaaacactatcctcccaagcagggaagagatgacaaaaattaaattgcgctctctgctttcgccccagctctgccaccggactcggtccgcaaattccctaatcgctccgagctgttcagaatctcgcaaacaaagggagaaaactctttcaagtgctaccaaacgaaagttcgggttgctgtgcggcgcagaataaaacaagcacacacacgtctacttccaaacctcgcttcaccacgctaaaaatccgagccatttcaagttccactgcctccccagacccagcaggcttggaaggagagaaaaacctgctctacccagccaggtcccttcctttggagaagttataagccttccatggcacccgctactcgagccaatgaacgcgactgctctgacaaggcgcctctaatttcaccgaccctggcaaactgcaggagacattcagtccacgccacataaaaactattaaagtgggatcgccgcagttgaaaagcccgatcagtgcctggagattagaacgcgagcctttaaagtacacacgcacccggcaccgggaaagcccaggcgcctgtgaccctccgaaggactctgggtcagcatcctcgcgcctggaccatctagggggtcatcagaaagtaatacacgtcataagaaagatgtgggggagaccccgatgctcgcgcctctgccaggtggaggcggggtgcaggtagaagccgcgcgctggactgctggatgaactccgttacgcgcaggctccgcgccgaccccggaagggacaggcaggctcggaagggacccttggggcttggggacgtcttctagggcagagagcaccgctgcggtccgagcggcccgggccctcaggcgtggggcacccggcctccaagcgccccccggggacgcaggcgcccacgcaccgtccagctgcgcgtcctcagtacccagcgctcggcgtccccggcggagcctcgcgcactttcccggaaagtttgggggttctctcaactcaggctcccccgggagccctggggcgggggttggaagaaggggtcactcacctcgtcgcccggtccgcctcgggttcccgaagtgtctgtcccagccgcggttcagtgcgtccgtaattaagtatttattctcgttccttccagtgtcgaagtttccccttcgcgctgtgcctctggtgaaaacaggacatccccttcggccaccccacaacaaatagcgtacacaagcgggggagaagcggggcggagggagaagccggctccgagggggaggaggaaaggagaggagccaaaactccggactgcgacaggggggaaaggagaagaaaagaaaatgagagagcgcgcccagccgccgcagtcgtcactccccggcttttcccgcagctctttccccctctctaaggcagcgacaacttcacgtggacaggatggaagttttgcgcggaagccgggaacggccggagcgtgcgccgcgctgccggcagcctcgcacttgcgcagggaggtggggcgggggcgacgtcgccaccggctactgcgggctcgtgaggccgccgggggcctcgggggaggccgccagggacgcggggggcggcggcgcgcgggggacccactccgtttttatttgacctcgggtgactgcctattgtcatggtttgcgatctcgcgtggggaccgcccagggcctcggggccctggatgtcccgggtggcgccgccgtaatctccgtgccctccgcgccgcccccaccccgcccccacccgggccgactcgagcggctgcagcctccaggctgaggggagggacccgcgaccgcgctctcctccctgggccggagagccactgtcgatccccacctgcttctgtggggcagcccccggaattgcctggaactctctcgctacccagttcccctgtgcaggccactgcgggccccctgccggactcctttccacttaccccaagggaggagacagaagggacttcgcctacttgcaacaacgtgaaataaaaaccaacccagaccagactggggcgctttttctgacgggaggaaatacccttttccgtggagatatatgttatgaaggactaagcggtctggggataggctgtgctgcgaagggcctgggccccttccagtgctgctgggtgcaggtataggcatccgtcccagacgcccaaaggtcaggcagcaacgacttacttccaaggcggcgtcagagcttctctaggcacattgctgaaatgacatttcgtgtctaagccttctgcgcatgcactacgcgactacataggatttacgattttatacccacacgtgtgtatgccacaaccaggggacacagcaaaggtagacggaataaacaatccataaattttgcatccatttaatcacctcttccaaaaacctattgtctattttagcggcaccttctctgtcatattgataataaatgttttaatttattgataaatcactgagtgtcaatcattgtattggtcacttatggtacatgagttcatttaacttccatgacaactctacggtggtcattattaagccggtataaaagatgaggaaaccaaagcccaaagaatcatgagtgacttttccaaagacaaatccagtggtctctaatcacaaagcctatgatacaacaacctctacattaccttaggtgtggtctaagagattacagattaatccgtagaaattactcccattcaaagaaagtttagttttaatatattcactaagttacgttctgaaaaaggttcagaaaaaagatttcatcctctactttaggttggtcttatgcaactgatatgagcactgtctaattcaaaagcagtatcaaccctgaatacttatggttacaatttattttttaatgagtggggaattatctacaatgcttaagaggctctagaaaaggtggtgttgtaaatttaaaatgataaaggcagtcgttgctgctctcatcacttactgggtgttctttcctgcagatttattttggagggtgtaggcattgccaggcataatgtttccttttctggttctcaaggtagaaagggttctggcagtggggttggcacaaagcggatttggagcatggttgagagcacattctggcctaacgaggaatgccagttaatatacactggagagaaaaatatgaatggacagatttaattaattttgcagatttattttctccatttcacatgtgagaaaactaagggctcagaatttttagaagcttgctaataaatggcagacctgagtttcaagccagcctttatttaagtccactcttagtcactgtgatgctattattagtattaatggtattcagaaaaatagtaattcttttaaatatgtaatatattacaagccaaatatgcaatttaaatgttttgtgaatcatagtgtc

SEQ ID NO: 585092 - DNA, 4001 bp, Homo sapiens
aattaactctttggctactgccatttagggcaggagcttggccagagtcaaagaatctgggctgcatagaggaaaatttattcatggagcagctaagcatagcttaacgtactcagggcttgttggccacccttccccagaaatgttttatttcttttggtcctttcctcttttttgttttccctaagttttttgttattgttttaaagatgctacagaaggggaaagtggaaccaagtaagtcaatacagttttgttttgttttttaacgcattaactcaatatttgttgaatgcctccaaatcaaggcttggtattaggttttagtaattccatggaaaaaggggcattgtgcttattccctatgctcacaagttattctctagttggttaaaatgcagaaaattatacaaattttgtctgtcatttatttatggcaactgcaaacatggaagtttcttcatggtttggcatttgagttcttgaatattgagtatagtcaggattaaatcaatatcaatgcccttttcctttctaaatagtaaaatgttgcaaacatttttgtttaaaagggccatttttaggccaattaaaactattaagttaaaaactgagaattatttttaaaaaatctgaattattaacaattgcaatttttgttgataataaaaacacactttatccactagtaatattgtatttccttaatcctgctaataatataaactgaatcattattacctaaatattaagttttaaataaaaacttgttagaattgataatataaatatagtatgaaaattaactgcaaagtaatatatatcaaaattaatggcaaaataatatatatcaatatgttgcatgcttcaatattcatttcatatgtattttagaaatcacatttaataattttaggcagaatgattgatagacatatactcatatgatatagatgatatgagtatatatatgagcatatatacacatgagtatatatatcaatagtttctaatattatgcaattaactttgaaaataacattaacctttaaggtaagcaatggtcccttattttaatattgtatactaagtaattacaaatagttcaacatacctgatttctgaaatatttaaataataaagatttttaagctcattaaagtcataagaattaaacagaactaataaatcttattgaaccataaatctcctaaataataagactggtagtgtattaataaggtaagagtgttggacctgtgaaacacctttacgttttctttttaaaaataaataatcacactacagctgttaaaaaatcatcatatctgatcagttgtaagaaaacttaaacaaccacgtacaaaggaaacactatcctcacagtgccattgaagaggaaaaaaatgttgatcattaacatgagaataaacatcacctccaacaaaactagtatgagtatctctagatttatggccaaaatcttttctaaacaaactgaaaaatcatacaatttcatttgcaattgacatttcatggccctatgtatatgctagcagacaatgggggaaaacctcaaaaatcgaaagcaatcataagtacttcatgactaaataaagattctctagcaatcccccaaatcctgtatctcaaaggaggtgaaaattatattatttgtatatccaaggaatataaagcacatgttgtttttgattcaaacagaatgaatatccttaagcaaatgacagagaaaatttagtgaaaatgttttatatataataagtaaaaataactggttaaagaaatgcttatgattataattagagatctttgtagttgtgttcagctaggcagtgtttttatctagtaatagaaaaataatttctaggtggaatcaagtataacttaccccaaccattagccaaggaggcttgcaaccctaggaggcttctgattacggttaatgtctggacatgcctagcgtgtatcactttgtttctcagaagcctaatccaataaagcttcttttatatgtgtcttctgaaacatagcactaaaagccttaaccttttgcagtacaaaggtaaagtcattaaagccatgtgcaggctgacataaggcctggcctttatttagctaatctggagatgaatatagcaaatcaccatctggagctttgtgtaaatccataagcaaaatacttctctacaatttaattattccttattttatttgtaactcaccattttcattgctaacttcataggtctcagtctgaatgctttcttgtgtttttagagattattacaattttttttttgtttttgtaaaaaactcatatacagacagtgggagaaagaaaaaagctttctgttgctagggaaacctgatgctgaaggtttagtaacaacctcagatggtgttgtatagcaaaggctgtcagcataagagaacagaaagagggcctgctgatgcgaagaacgattttagtatgttacttattgattctatgatgatctttataaaagaagtaatacagaatctaccttttcctaaagaagaattatgggactataataaagaaagcctcaagaaatttataccactgaaaggtagaataaatgaaatctcacctctatctgtgagattatagaaagaacagttactgagtgcattagaattttgtcaaattaagattctattagtatatcctgaacccacagtcccagttggacactggctttaatactatccttatattttcaaattactaaattaaacataaatcatttgtattacacttgatcctgcagtaagtgtgtgaaacatatatttaatcactctcctaatgaaagaaaagtaatattttaaaatattaaaatcacactgtagaaaaaaatttctatttgtagcaataaataaaattatacatgtgtatatgttttatgatttattctttatataatttatataatatttacacatttttcatgaatcaatgtgctactaacattttgttatctaaagggaagaacttttatatgttgactcatggaaatgagttattcataattatacactgtggcctcccaagacaatttacgctgaacataacatagtatcatgatgcacatatccatttatatctggaaaacagttcatctactatatcttgcttcttgtaagacttagaagtttcctccctttctccctctcttcctttctctcccttctttatctttctccctctgttactttctcttccttcttccttcctttcttcacttttctttctcttgcatctccccctattatttctttcatcctttcttatatctttcccctaccttccccctcccttcctcctcctccttcccttcccttccccctccctgtgtccctcctcttcccctcctcttcccttcccctccctcccttttcccctcctcctcctctcccctcccccctcctctccttgccctctgctcccccttctccactccccccattcccttcccttccctctttgctccctctcccccttcccttcctcctccttttccccattcccttcccttccctctctgctcccctccccttccctcctccctcccctccactcctctccactcccctctcccttccatcccccttcccttacatctctcctcctcccttccatcaccctcccgtcccctctcccattcccctccccctcccctccctctcccttccacccctccccttctgtcctctcccccccctccctttctcatccctttaattcttgctttctttttctttttttttttttttggaagccaagtctcactctgtcatccaggctggagtgcaatggcactccagggatcgtagctcactgcaacctttgccttccgggttcaagtgattttcctgcctcagcacccccagtagctgggattacaggcaccccctccaccatgcccagccaatttttgtatttttagtagagatgagtt

SEQ ID NO: 585093 - DNA, 4001 bp, Homo sapiens
tacaaatggctagttggtatgtgaaaaaaatgctcaaattactaatcatcagagaaatgtaaatcaatccacaatgagatctcacctcatgcctgttagaatagttattataaaaagaggaaagataactgctggagaggatgttaagaaaagggaacaactgtacacctgttggaatataaattagtaaagaccttatgaaaaacagtgtggaggtttctcaaaaaattgaaaataggagcactaaatgatccaggaatctaaccaatagggatatatccaaagagtatgaaatcagtatgtcaaagagatatgtctacactgcactttttgcagcactagtcacaatagtcaaggtatggattaaacaggagtgtagatctacagatgaacagataatgaaaatatatatatatacacacaatagaatactacttagcctttaaaaagaaggaagtcctatcatttgtgacaacgtggatgaacctagagtacattatgttaaatgaaataagccaggcacagaaagacaaatactgcatgatcctacttacatgtgaaaactaaaaaagtcaaattcgtagaaaactagaaaagtcaaattcatagaaacagagtaaaattgttgttacgagaggctttggggtggaattcttgggaggatgttggtcaaaggacacaaaatttcagttagagaaataaatataatagatctattatacatcatggtgaccacagtaaataacaatatattgtatacttaaaaattgcaaagcaatagattttgaagtgttctcagtattaaaaaaaatgataagtgtgtgaggtaatgcataggtaaaatagcttggttcagttatttcacaatttatacacataccaatacatgttgtataccacaaatatatacataatttttacttaactaaaaattaaatttacaaaaacagaaaagaaattggactcatctttcacatatttaatttaatcttgcaacaaaataacctcataaaaaattgaggactataactaatttattaatccttttataaaatgttcttgcatattgactgaggcattaaagaagcacaaagattacaacgtaccccattctcttatggtcacacagtatttaattagataattaaaactgtttagtatgtttctagtttaaattattttccaaagctgtgtaagaataaatccagcacacaaaagaaaacacattttgtccagttacttttgctctgactggattaagttttcttcaaatatggcagtgacctaatggccaactcaactttgactaatgagaaacttttgacgattattcgtttgcctgtatacatgtgtttttttgttcctttcttagggaacttaagcatacttgaaaatagcaagtacttaaaaaacataagccagttacaagaatcaagaagatacaacatatattagatttagaaacttgaatatgaggcagctttatagacattgaaatacaaggatttccaaagtataattttagtgaagaaaagggggaatataaacagtatgctgatatttgtacagaaaatacatatatttacaatatatttctggaaatatatatcagagacggcaaaggtctttgtgtattagccagctcggctgccaaaagaaaatatcatagactgggtggtttaaacaacagaaatacattttctcacagttctggaagctgaaactttgagatcagggtgccagcacggtgaggttctggtgaggcctctctttcttccttgcagatgaccatcttctccatgaggccccacgtggccttacctatgtatgtgctatggaggcagagacacagaaatctgtctctttctttttataaggtcacccattctatcgagttagaaacccacagttataatctcacataaagttaattacctcctaaaagccctatctccaaatatagtcacactaagggtaaatgttgcaacatatgaattttgagagggcaaaattcagtctgtagaaccttgtctccagggagataatttgcattgccaggagacaaaaaagggaaggagacgtttctcactctactcttttgtaatttccatcttttaaatgtgaatgtgaaatttactcagaaaggtaagttacataaaatttaaataatagggttattgtatctacatggtcatgtaaatattaagtatctccattaccatggcattttactaaataatatatcagaatataattaattcaataattttgttttacagacctaagacacatgcatcagtactttgttaggttttgaaaaatgtcacagaaaaatatctgtatcctcaggaaggaacagcccattaaaatattattcaaaatcaacaagtatattccaagattaattcagcaaaagtggagtgtatttagtaaaattgcaaatgttctatttggagaaaagattgctttgaaataaaagttaattcaactcagagagaaaacaactataaatattaaggatacgatcaataaagttactaaaaatatggctgtgcttattcaagatttagaatccaaacagaactcattgggtctagtaactactagcctgaaattaggaagatttgtagacaacaaattacaaaagtaattgagagactaagaagatttaggacaataaatgtaagaattctcttttaattgaaaacctaattttgtagaatgcttaaaatataactaatcagtcatagataaaatagcatttgtaagtactctacacattgcattctttgaagcaattattaatgattaatactttactctgtgctgttatttgaatgtcatagatctgtataaaaattaaaatgaaatgagacagagtccattcaaaatggcataatgcataattggatacaattttaaccttgattccattgttctatataaagctactatttcaatttaatatagctaatgttctaaccagaaatttataatgttaaatacttcatcctaaaacttcaagtgtcatgtctcccccagacagggatattaaaggccattttttatctcaaggtaagcctgaaatatagataatatattaatattccagtatttcaaattgtaagcattaaaatgtcatctaatgaattttgtggttaaatataatttgacatattttaatctattcaattgcaatgagtaattttggcactttgtttcaacttttaaaaaagtgaatttctcataatggatctcttaaggaattatctattaacataattagaaattaatacatgttattaatggcttaatcaaagaaactgtaaattgatgtgggacttctttgcaactttgctgtgggtctaatcagtaatatttcatgtactcgtcttcacccaccccatcctttattaaatatagaggggaaaaaagtggctcatgtagactaggactggttcaagaattttacaaatatatgatttataaagtgatatggaggagagacatgaaagaaaaactgacttattgtacagcaaacgttttaaaagccacttaacaaaaattaatgctatatttgctctatttctatacaatcagaaactattaataaatatatatctttcatctataatggccagaattattcttagtaggcctcaggaatggtcaaagtaaaatttttgccagggaaacacaataattgccaatgttcaatacttggtgtgccagtcaatgagggaaacaaaaatgttgctttacaacaatccctcctaatgtttaatgttactgttaattgctttatgtaaactctatgatcttagttccttagtgatgctcttattaaccaaaatccttgtaatacttaaataagtacctatattcacctaaccaaaaatgtgtatatacatcatgcttttattagtcccattagtaaataatgaaaatcatttataaaaatgacaaataaatatctgtaaaaataaaaaaattagtagcaa

SEQ ID NO: 585094 - DNA, 4001 bp, Homo sapiens
agtgctcggcccggcctgccaggaacctcttatcaaactccaccggctgcctgcatctacaattcaagtccatggctaaccttctgttagagacagaaattctgctgcagccagcaagtttgctggtgtacagggcaccgcttcatgggcctagtaggaagcgaagctgaaaggcaacttccgaaagccagtctcctctcccaaacgccctttaatatctccccagttggatctggggcgcctgtggtttcggacccttaggagctctgagaactggtgtgtgtggtcggaagccatctgagtctccctgtgatttggactttttaagaaacttctaagttgtattactataccctttaaaaacagacggaagcagtgtaaaaaggcctctagtttttagaaaagaccgtaactactggggagggggctcacaaagaaaaagactgcagagaaaagcatcaaaatggtgttttcctaacgctccacaaaagggtcaacaagtaacaaagagcggcgaaaacctcctcctattcctatcgtcttctgcgtgtgagaagaaccctgttccccaggaactgccccaacacctcgagcaggtgcctcccctctccaatgaagcctctcccgtccgcccggcccagaaactgggcaacttactggtttcggcattttcggtttctggtgagtatcctcgatccccgaaaacacgactatccagcagcagcgaagacgctgtcccaacctggagtcagagcagaacccttagagcgcccgcccgccctgcctcgtcctcctgccgcgcccgacactcggcgcccgcagcgcgctgccgcttaagaaccggccagcccgggcccgggtgagtcagcgccccgcccagcactgcgggcatggggagggggcacgggcggggcggggccgggccgggcccccggcgaggaggcgcccgagagcgggggcgcgcgcccaaggggcagccggcgggcactggaggtgccccccagttgggggtgggtccgaggagagggggtgcgcacccaggggacccccagcatgaaggggctggtggggggcgcaggcccgggagagagagggcagggggaacactcagtggggaggatcggggggagggggcgcgggccccggggaacactcggccaggagggtcaggggagagagcgccggccgggcggggaggggtctgggggacactcgaggtgcacccagcggagagaggcggagaagagggggcgcgggcccagggatacccggcggggaaaggcccggggagagggagcgcgcgcctgggagagagagggcgaggggcaggaggaacacctaggaggaaggagtcccgggacagccagcgcgagcccgcggggcacccgacagggaggggtcaggggagagggggcacagggcgggcgggggggcactcgctggggagggatccgtggagagggggcgcgggctcggggtccgccgaggaacttcccggggctgccaggaagcccgtgagaagccgagcactcggcaagtttcactttgtgtagcaaccgttgccccgcggctgcagtcacaaccgtcaagcctttgagaaactctttcaaaaactgcaaccgctcgggagccgccgagggacggcgcccaggcacccaggctccgcgtttccttcgggagagacctgaggggacccggcgccgaggggaaggtcgcggggccgcgggccggctcagctccacctgccccgggggtgccgggcgagaaccccgcgccgcgccccctaggctgcccgccgcacctgccgccgaaccccgccgcccgcccgggccctccaccaggaaccccccgcccagaacccccgtcccgaccccggccgccgcacgcctcacccggcgcctgcagtgctccgtgtgctccccgccgcccttgcgtccgccgagtgcgctcgctgcccgcgctcccaaaagccccggcggggcgggtcccgggaccacgccccttcccgcccagctcccgacctgtgaggtgcgccccccgcaagatggcggcagccgggcctcgggctgggtgggggcggaacttggcggaagtgcgcgctactcccctcgcagatgcaagtggggaggctgtttgtcccacagcgggcagggggaagtcaggaaaacgtaaataaatctggaggggcggacggcttgggggaatcgctggaccgcttggggccgggaccgggggccagttccgaggcctcggccctggggcggctgcacctggccccgagtctcggtgcacgtggccggcccagccgccgcctttccgaagctctggttaagtggcacgtttgtggcctcttttgacgtgactggcaaaaagctccatgggatttctctgaaattctaggaattaagtttttttgtttgtttttttgctaatggttctcaacaaatttttaagacacacaaaacacatactttgggggccagtagaatttgctgcgggagagctcactctagaaggggttctcaacgtctggcttccagacgagcagcaacagcattcactgggaacttgcataagtggaaattaggtgttgctcagccttaggattcagaaactctagggctgagcccagcaatcagtgtgttacaagcccttcgggtgattgtgatgttggctaaaggttgagaccagagcttctcctgaattcctctcctgggtttactcctccctttctgcttttagttttcttgtttgtaaagcggcataattatggcacctgtatcagagggttctaatgaggataatgagttagtacatgtacgatgcctggaacagtacctgacacttagtaagcacttaaatctatcctggtagaaagagaaaccaatgactttgggcgaagttccaaactctgtttcccaatttgttgagtgaacatactagtagccccacctacatagacttgtaaggattaaatgagatcgtgcatgtggaatgcttaactcgtgctagcctcatagtaattgatgcttaacctgtcttcctagggacacactgctgtttgggcaaccctttgtcagggcctgttatctcccacttgcagatccagggcatttcagaggtcagagagaggagggaggcctcttctgagattttgacctctattcaggtaagtgtattccctctgaaagactgaacttttctttcccttttttttttagacggagttttgctcttcttgcccaggctggagtgcattggcgcaatctcagctcattgcaacctccatctcccaggttcaagcaattctcctgcctcagcctcttgagtagctgggattacagacacccgccaccaagcccagctaaatttttgtatttttagtagagacggggtttcaccatgttggccaggctggttttgaactcctgacctcaggtgatctgctcacctcggcctcccaaagtgctaggattacaggcgtgagccatcactcctggcctgaatttcttttttattaaaatgaagttataggccgggcgctgtggctcatgcctgtaatcccagcactttgggaggccgaggcaggtggaacacctgaggtcaggagttcaagaccagcctgaccaacatggagaaaccccgtctctactaaaaatacagaattagctgggtgtggtggcgcacgcctgtagtcccagctactcgggaagctgaggcaggagaatggtgtgaacccgggaggcagagcttgcagtgagctaagatcgcaccattgcactccagcctgggcaacaagagtgaaactccgtctcaaaaataaataaataaataaataaaatgaagatataatggtaactgcagtagaaagaaaactatgaaagatatttaaattacctgcactgataatgtttccaactggacatcaatacctccactgccttatcactgcctggagcctggttagccagtttgggttcccaactctcataataggatat

SEQ ID NO: 585095 - DNA, 4001 bp, Homo sapiens
ggataaactgtatattttaccaaaatacaaaaaagaaaccataaaaataaattaccattcattatgagaaatgagaaagaaaagtagtgacggagaacaggttaactttttcctgagtgctatcttagctgagctctgcacctcttcttttagtgaaataaagaaaaccacacccagaagggtaatcttcttgaccactcctccgcataccgttgcactcagctctgcctgagtaaggggttgtacttaggtcagtttcataccacatgcactgtcaagcctcgatgtcacgtgtcacttttaagtttgaattaaaaagaaaaattttgtatagaaaatactctgcatcacaaatgaatcatcttgatgtaacttaggcaaaaattatattggcttctgaatctactggcatattaattctttatcctaacagcaaaattaatacctctaacaaagatcttagagaacataaaatgtaacagaagaagcacacaaggccgggtgtggtggctcacgcctgtaatcctagcattttgggaggtcgaggtaggcagatcacctgaggtcaggagttttagaccagcctggccaacatggtgaaaccccctctctataaaaatacaaaaaccagctgggcatggtggcacatgcctgtaatcccaactactcgggaggctgaggcaggagattcgcttgaacctgagaggcagaggttgcagtgagccgagatcatgccactgcactccagcctgggccacagagagagactccgctcccccatcccccacaaaaggcacacaagcattgattacagaaccaacttgtttgaaaaaccaaaaaaaaattccagatgtatctgtaatcccaatttgtaatgaatcctgatattttgtccattgtgattcaaaactcaaaaaatgttaaaccttccccctaatgtctagtcaccagttccccagtgttaaaagcaggtagaatacatacaactttctaagaagcgtcagtcccagagaacctgccttgtgcctacaacccccaggtctcgccagcaatctcaacacaatcagattcaaggagacagaggcgcaggcacagccctttcatcagctgaccaggagtgctcggcccggcctgccaggaacctcttatcaaactccaccggctgcctgcatctacaattcaagtccatggctaaccttctgttagagacagaaattctgctgcagccagcaagtttgctggtgtacagggcaccgcttcatgggcctagtaggaagcgaagctgaaaggcaacttccgaaagccagtctcctctcccaaacgccctttaatatctccccagttggatctggggcgcctgtggtttcggacccttaggagctctgagaactggtgtgtgtggtcggaagccatctgagtctccctgtgatttggactttttaagaaacttctaagttgtattactataccctttaaaaacagacggaagcagtgtaaaaaggcctctagtttttagaaaagaccgtaactactggggagggggctcacaaagaaaaagactgcagagaaaagcatcaaaatggtgttttcctaacgctccacaaaagggtcaacaagtaacaaagagcggcgaaaacctcctcctattcctatcgtcttctgcgtgtgagaagaaccctgttccccaggaactgccccaacacctcgagcaggtgcctcccctctccaatgaagcctctcccgtccgcccggcccagaaactgggcaacttactggtttcggcattttcggtttctggtgagtatcctcgatccccgaaaacacgactatccagcagcagcgaagacgctgtcccaacctggagtcagagcagaacccttagagcgcccgcccgccctgcctcgtcctcctgccgcgcccgacactcggcgcccgcagcgcgctgccgcttaagaaccggccagcccgggcccgggtgagtcagcgccccgcccagcactgcgggcatggggagggggcacgggcggggcggggccgggccgggcccccggcgaggaggcgcccgagagcgggggcgcgcgcccaaggggcagccggcgggcactggaggtgccccccagttgggggtgggtccgaggagagggggtgcgcacccaggggacccccagcatgaaggggctggtggggggcgcaggcccgggagagagagggcagggggaacactcagtggggaggatcggggggagggggcgcgggccccggggaacactcggccaggagggtcaggggagagagcgccggccgggcggggaggggtctgggggacactcgaggtgcacccagcggagagaggcggagaagagggggcgcgggcccagggatacccggcggggaaaggcccggggagagggagcgcgcgcctgggagagagagggcgaggggcaggaggaacacctaggaggaaggagtcccgggacagccagcgcgagcccgcggggcacccgacagggaggggtcaggggagagggggcacagggcgggcgggggggcactcgctggggagggatccgtggagagggggcgcgggctcggggtccgccgaggaacttcccggggctgccaggaagcccgtgagaagccgagcactcggcaagtttcactttgtgtagcaaccgttgccccgcggctgcagtcacaaccgtcaagcctttgagaaactctttcaaaaactgcaaccgctcgggagccgccgagggacggcgcccaggcacccaggctccgcgtttccttcgggagagacctgaggggacccggcgccgaggggaaggtcgcggggccgcgggccggctcagctccacctgccccgggggtgccgggcgagaaccccgcgccgcgccccctaggctgcccgccgcacctgccgccgaaccccgccgcccgcccgggccctccaccaggaaccccccgcccagaacccccgtcccgaccccggccgccgcacgcctcacccggcgcctgcagtgctccgtgtgctccccgccgcccttgcgtccgccgagtgcgctcgctgcccgcgctcccaaaagccccggcggggcgggtcccgggaccacgccccttcccgcccagctcccgacctgtgaggtgcgccccccgcaagatggcggcagccgggcctcgggctgggtgggggcggaacttggcggaagtgcgcgctactcccctcgcagatgcaagtggggaggctgtttgtcccacagcgggcagggggaagtcaggaaaacgtaaataaatctggaggggcggacggcttgggggaatcgctggaccgcttggggccgggaccgggggccagttccgaggcctcggccctggggcggctgcacctggccccgagtctcggtgcacgtggccggcccagccgccgcctttccgaagctctggttaagtggcacgtttgtggcctcttttgacgtgactggcaaaaagctccatgggatttctctgaaattctaggaattaagtttttttgtttgtttttttgctaatggttctcaacaaatttttaagacacacaaaacacatactttgggggccagtagaatttgctgcgggagagctcactctagaaggggttctcaacgtctggcttccagacgagcagcaacagcattcactgggaacttgcataagtggaaattaggtgttgctcagccttaggattcagaaactctagggctgagcccagcaatcagtgtgttacaagcccttcgggtgattgtgatgttggctaaaggttgagaccagagcttctcctgaattcctctcctgggtttactcctccctttctgcttttagttttcttgtttgtaaagcggcataattatggcacctgtatcagagggttctaatgaggataatgagttagtacatgtacgatgcctggaacagtacctgacacttagtaagcacttaaatctatcctggtagaaagagaaacc

SEQ ID NO: 585096 - DNA, 4001 bp, Homo sapiens
aaaaaaaaaaagaagacaacagaaaaggcatgtaaagtgagtaacatttgagacaaggattccaaaatagagaaacagatatatctgtgtgtgatagcacttgagcaacacattttgccgtttgcataaataaaaactgagaagtggcagcaaggattagtctaatgatggaatacagttccccaaggatcttggggagatttttgtatgtgtcaaaacatatggaaagcagaagaaaaggggcttattcaaagaaatttaaaaattaaaagatttttggagacccagattcccccaccctccataatcctacagcagcatcttcgcaagaaatgtttcctgttatatgcatgtgctgtatctatgttcatttcatacagatttatgagattataagtcacttttaagaataaacgcacacaaccatgtccagacaaatgttgtcttctaaagcgtttacatttgcaatttaattcaaccaatatttattgagggcctatgacatgccaggctgtgatctaggtacatgggatacatcagagaacaaaacagaatgtttgctctgatagattatagtctgatagggttagggtggagcccaagaagagccataagtaaatccacttaggggtgaggaggtaggaactgctttggaaattgagccacatggaggaggataaggaggtggagaggttgggcatgcaattttcaatagggctatcaataggcttaagaagtcagggttgccaacatttcccattccccaagcctgcttccccttcccttggagcttgtgcaggcactgagccagtttaaacaacacacacctgacggtcagtgcccagtaagtacttgttgaccaaatgaccaaatgaagggggactttgtttctgggcccagtgaaggttcccccttgatcccctggattacccagtcatgactcctggagacttggctattttcaaaaaccaggcacacccccaagaggtgaagagtccccattatagaggccaccagagtagagagatggttccagagacatgtggagcactaacaacatgctggagaaaagacaaccacgcctaaggtgtctggtctgagaaggagacaggagtgtttggatgcataaggtgtgaatgggtatccataagtatagataaatatatttacagtcattggtgagctgacgggggaagggagggagaagagcgaaaaagggttaatgatagggagaaggctgcgagagccatcctctagtgagaaataccgaaggtaggctgcggcattgccaggggtgcagaacagtgtggcgcgctgtcgggagacacagtgctaagggggagaaggggggagccccaggtgcacgcctggctgggtgagtgcggcgggcaggagccctcgcttctgggcgggtctaaggaggagaagtggctcgagttcagctccaaattgggacggaggcaggcgatgcgcaggagtggggaggcgcgcaggagtggggagccaagccggcggggttccagtctagcaggctgttctcacttggccccactccctccaccttttgtgttccagctccataatctgctccctgaggaaagggggctcgtcccttggggaagcacctccaactcccccatccccatttggtggcattctaagcaagcaacggcttcgggagagctgcctcgagagcctgagagaagtcccgcttagaagctgggctgggcaggtgcggagttgggggcgggaagccaggattgggcaagtggagctgcctgtgaccggcgccacagggcccagagcaagccgcttgctggttcaaccaggaaaccgaggtgcagaaggtggacgcagcgggccctggctcatagggtgcagggtcggtggcttacctgcaggcgctcccctccagaggtgccctcgcgtgggcttgctctgtgcgcctcggggacttcctcaaacggactcgggaaagacaagacagttggctcttaaataacttcctaagaggagccctcaccctcctcccctgtcccacagggttttctcctcccccttctccacagctggagccagtaggggagctcagaggattttctatttacttcatctggcctgttatcccggcaggtgcgcccttctctcccacttgcccctctgactcccaatttcccattcccacttctcctccccatccccatccctagatctgccctccccaccgcaaccagttgctgggagtaccaggcaaggggccctgcagtgccaggaagtccccacccgtcccctttggtcagagggtctgggagggtttcctttacaaaggaatgcttttgcctggcaggtcagctgctactgtggcttggcaggaggggggtctgccctcccacagacaggtcacacagacagttgtgaccatgcatgcagtgagagcaacgtgtccctcctgtgcaaataaggcatggtctgcattcctgaatcatcccagagccacagccaccgcctaaccacaagacttcctgcaggaatgggatgcctagccccaaggaagatgagtaaacatctttaataatgccatgcagattagaaaataacacttggttttctctgaaaatcattttagtgcatgttcaaaaattagaaaattttccccctaaaattttaatttttttcttttactctttctttctttctttctttcatctttctatctttcagatgaagtcttgctctgttgcaaaggctggagtgcaacctccacctcccgggttcaagtgattcttctgcctcagcctcccaagtagctggaactacaggtgcatgccaccatgcccgcctaatttttgtatttttagtagagatggggctttaccatgttggccaggctggtctcgaacttctgacctcaggtgatccaccctccttggcttcccaaagtgttgggattacaggcgtgagccaccgcacccagtcaaacatggctatttctaaccttctttactgtcttcaaatttctgaccctgccactcaatctcccaatgttataaagaagaaaaaaaaagatgccattggttagaaattctctcaattttctgctaccaatctatgaacctgcctgcaaccttatctatcttttcctctttcttcttgttactgaagttggaaaggtccctcctccctctgcatctccaaaccaggcttctgcgttgccttgttctccggggctttgctgtgactcttacgtactcttcctcttgcagcttcaagctcctgcttgctaatagtgggtcttctcagcattcatgcaatttcaggtctcttcagtatttttttaaaaacctcccccaacctatgtccccactcctgctgttactcctcctctcctccccttcatcactaagtatctgccatctggcttccgcctcatcattctactgaaagtggaggtcacggtctccaaggcctgtgctcaggccaaaagacaggattcagttcttatttacctgaccttttggaagcattgaactctgtctttgaaggtatttttcctaggcctccttgacattgaacactctgtggtttcctccagtgcagcgcaatattccttgattgtctgaggaactcccatagttttcaaattccatctatatcctgacacctcccaaatctgggtctttagccaagatcttttccagaattgcagattcccgtatctaagtgcctactggctatcctcatttgtcacatcccagtgacaacacacgctcatcatgtctaacatgagatgtatcactttcctggaaaacctggtgcatctcaggagttccctacctcaatgaataccatcactttgcacgcaggtggtacaccagacacatgggcatcattcttgaggcttccttgtttctctccctcaatcatcaaatccgatccttgagcaaatattttctatcctacctcttaaacagcccttgaatctacccgtgtatgtacccctt

SEQ ID NO: 585097 - DNA, 4001 bp, Homo sapiens
atagttatcctacaaaaaatcttttgacacagttttaggcaaatcaatggcaacttttatttttttaactacacatgaatttttctctttttctacaatcaaagaagttgagctgaagaagaaaattaactgggatctttttgtttcccctgttttacatatagttaaagaaccttgccagtgatgtattattaaagaaggaaggaaggaggaagaatggaaggaggagggaagaagaaggaaggaggtgagaggtgtgcggagaggagaaaaaaacaaggaagaatggagaattgtcattacttaccataaccattttgccatccttaatttctcttacaaaatttgtttctttgccatcccatttctgtatgtgaacaagtttgtctccatccaggctaacaacagactgagaccaacaacaaaatgcagaacatagcaataaatacaattcagatttctgatacggaagacgatgtgatttttgaaagagttgtataattgaataaatcatgatcagttaattatcctattgttatttctattacttctagattttctattatgtaaatttgaattcataatttgattaaaaagtatacatctaaatacaaaaatttaatatattaaaaacaaaaatcctaaaccagtgctttgcagctagtcgtccctctaaagaaagccttagaatgaggcaaactgtctatttagtcaatctgaggcaacctggggaattaaacaaaatgcaatctctctttcaaacaaaccttattaaatattttctgaaatacaagtttgatataaaatgtgaacagtatatggtaagagacaaatacaactgagatttatgctatagcaagtacccattgttcaaaatataacatatgcacattaaactaactttggtgtatttctccttggattgaaatactgaaaatattctacactttccaacatcttaaaaaaaacatgcattggaaatctttatctttattcccctctccccatccccactctgaagaagaagcagtttctcaccttacagtttctatcatctgcagtggtttcatcaaactcttctcccagctggaaactaatctccgtgttcttgaatgtgctgagagtcctgatgaccactttgtctccttcttgactgataattaccgttggtttggtcacatttcccacctgcctagtggcaaagcccacgcctaaaatagcaaagggaacagtacagtctgcagcgacttccaaaataactcacaaagcaagaatctgctttctgattctggaatccacgttctaaagtgtaagtttcattagaacatgattagcccattaatcatgtaaaacactactgtgataataagtggatgcagaagaaaaccaaaaaagtcagagaagcttcatattctccacggaatagcaaatgttctgtttttattggccctgggtaagaaggcaagcaagtgccacattaaaaatccattcagtggaaaatgcatagcctagcatctgatcagggcaatgtgatctgtctttgcctcttgctgacctgatgagtgaaaaatggaatctgcaaatatctaaagctgcacgttgagaagagaacagccggtcttattgttacctacctagagccttcatgtactcatcaaagttctgactgttggtcagcttccaggtagcacagaaagcctccaccatccttgccctttcccctctttagagacaggagcggggatcttctggtctaattgccactgcagctcagaagaccctttacacctcagcaagcagctcctgccttcttatttggaaagagggtgggcaaaaatccagtgatttaaattgcaaacacacccctccagtgtccctctttccaagaggctgtcacagagagaggagaagggaaggagcgctcgagtgaggctccaatcctctttgtgattggctcaggccactgggttagcggagtaggtcgagttcctcccaatcctcacactacagcccttatgcctgagaaagctcggcagggattcaatggggctggaggcagggaacgggaaaatgagagaagggctttcaggttcggtgagaaaaaacttggcaaaggcaatctcagactgcaaggaaagaaaaaagatgcacaatggggcattcagattgatttccgttaatgacaaagctggtcacaaatgaggaccccccttaaagaaaaccactgaaatgccagactttgcagacaaaggagagtgaatagtgtgtgttattttctctcatagttacagggagagcgaaatgcaggctagagtaggccaaactgaaaaagagggcggggaggaggtgtaaatgccttccctggatatactgcttgaaggctactctgactgtcaatgaggaagcacactaatttgggtcctttcccaacacaaaccgagagaatttaaagatcccgttgtcctttctaaaaatgtgagaacgagactgagttggaaaagggacctaaggaagagtatggttaggacttactaatgaggtacaaaaataaataaaagaatgcttttccccccgatctccttgaatagattatagaacccatgtggaaaaactggacagaagattatttagtaagactttaaattacctgcattctaggaccttttgatttcctgaggccacatctacacaaatacaatctgtgtacatttgttgggagttagtgatggggaagggcaggaactggaggagcggtaggaatcagaagggctttggtttcagtttgccctggctcagggttccccaagaatggcaaataccttgagggttctaagtagagtatttaaaggaagtctctgaaattccccttcacccaaagagattccttcctgacttactagtgctgaccagcaatgaaagcagcttacctgcctctcctggggacagagcaggagaatccgacttgatattccctgcccttctctctcccctcccaattaaactgcagcccagcacatttctacccaatccacaccagatccaacagagaaggctcagaaggcctcctacgctaggtggcggctacatgattcttcttcggtgtctcaagtgcgcttgtttaacaaaaactgtagtcttccttcacaactgcttttcttccaattttcactttatttgtgactgataccaccatgcacccaactgtacaagccagaaacctctgaatcatttctaatactttaccactaaaatcaaacttaatgtcaaggcctatctcttttgctttgctaacagaaaaaccaaactctgtaaaatgttttacagaagtttactctgaaccaatatgagcaactgaggcccagggaaaacacaaacccaagaagccttgggaaagtggtcccaaggtggtcagattacagtttggttttatacattttagggagccaagaagtacagtcaaaaacgtaaatcaatacatggaaggcatacattggttcagctcaaaaagctgggatatcttgaagctgagggcttacagcttatagatgaattcagagattctttaatttgcacttggttaaaggaataaggctctgtctaaaacttggagtgcacataaaaaaattatatttatttatttatttatttatttatttttggagaaagggtcttgctctctcacccaggctggagtgcagtggcgcgatctcagcccactgcaacctccacgactcaagtgatcctcccacatcagccctctgagtagttgggacaacagacatgtaccattatgcctggctatttttttgtacttttagtagagtcaaggtcttgccatgttgcccaggctggacataaatgttttatattaacaaaaggatgctctgtggcaagatgaatggcctaattcttgccttgcattaccttagatcttgtttatagtttggtgtcttattgacacaaagagtctgttttgtcagttttataatctctattttaac

SEQ ID NO: 585098 - DNA, 4001 bp, Homo sapiens
ctgccctggacgacttcaccacgtgaccttcagatttctggctgcagtggttgtccttggtgtttgaagactttccctctgcttagacactttgatcaagacatttgccgggatgaaagtctcgttctaccttgacggtgccctgttctcaccaataaggcagctctaacacacctacagtgaggacactgtggccaggctgcttccttggggctgagctacaatcaaagggggcactccaacactcacctggaaccctaatgaagctacggaggtgttgggggtgggcagggatccacgggcgggatggtaaagagagggagaagtgcaaagctaggtgccagagtaggagtctctgccccaacttacttctccatcgtgcctaggagggcaatttagataattcattgtgtcatacgtgtgttctcggccctcccaataaactcatttccctttaaaaaatgaaaacaaaagttctagtgtctgatggacgtgtaaaaacctaataaggtgacggttgtgtaaaggttgtgggttgggggccggggctggaggggctttagaacatgcgccggacattgttgcagaggccgcggcgcgcgcggaggggagctctttctctccgcattgtgcggggagcaggtgctgtctgcattaccatacagctgagcgcacaaagagccactgattcagcctcgcacaataacaggctgccttaatgacagccacgcgaacgacacacaccaaactcacttcttaccaggcggagggaggccgagggggatacccgggagagaggggccgagacccggggaaggtggcggcggccgaggatcctgtgggggagggcgcgtgtctgtggggggagttgaaggccaggttctcctggctccggggatatgctgtccggcccccgggcccctactcccagtggccgcggaccacgagaggacaccgaaggcgcggggatgcgggtgtcccagggggcgtcccggccccgcccgcgcgtcggctctgcactccccgaggctcagtcgccgtcctgggccaggaggtgtccccgcctcggacctccccaaacttcccgaaactgccgcttcgctctggcagccctcggcccaccgctccgcccgcccctttcctacgatgctccccgaatcgccacccccgcctccgcccccaagagactcctccttaggaagcgcctgccccgaagaaggggcggccccgccaagagctcgggcctcgaacttcgtcctcctgctcgcagccgccctccccaagcccccgggacgctgtcggcgcaaggagacccctcggctgccgccgcggcccggagtttcggaggccgcgtcccgccgctcaagtggggcccgcagcgccgccccccgcgtgtggccgagggtctctgggcgtctgtggcccgggagggcgtgcggaggggacggggcggcggcaccagctccagaagcagggggattcttgcggtgaacattttgcaggaatgtaaatgagtgcgttttgtgtggtgagggaggaagggggggctgggggcgggggcaggggaggactgggggggcggggaagggtgggggcggggaggagggttgcacattttacagctcactgaccatttggcgatccattgagaggagggtttggaaaagtggctcctttgtgacagctctcgccagattggggggctgctgatttgcatctcattagccatgcgggcggccggctgaatataagggcggcaggcgccggcgagagccagatcctctgcgcgcacccgcggagacccgacccggccgagggcagagcgcaggggaacccgggcagccgcggcgcagagcctcctcccacggcccggcccctccggtcctgcgcgtgtgtactggatggcattggctggattcatcggaaagacgcggatctttgctgtgacaccggagatcggagcccggagtgctcccggaacgaccgccgccgccgagtgacaccgggccgcgatccgcaggggccgccgcgcacacccgccgccgccgaccgtcccctcagcgcgcgccgctggccccggattatcgccttgcccgtgggatttccagaccgcggctttctaatcggctcgggaggaagctctgcagctctcttgggaattaagctcaatctctggactctctctctttctctttctccccctccctctcctgcgaagaagctcaagacaaaaccaggaagccggcgaccctcacctcctcgggggctgggaggaaggaggaaaacgaaagtcgccgccgccgcgctgtcccccgagagctgcctttcctcgggcatccctggggctgccgcgggacctcgcagggcggatataaagaaccgcggccttgggaagaggcggagaccggcttttaaagaaagaagtcctgggtcctgcggtctggggcgaggcaagggcgcttttctgcccacgctccccgtggcccatcgatcccccgcgcgtccgccgctgttctaaggagagaagtgggggccccccaggctcgcgcgtggagcgaagcagcatgggcagtcggtgcgcgctggccctggcggtgctctcggccttgctgtgtcaggtaggcgggcaggtgggggcgccgcggccccgcggggtctcacgggtagccggggcgcggggcaggagcgcgcggggaggggcggacagcggcacgggccgcgccagccacggcccggaagatgaatcccgggggcgacgaccccagcgccggccgtgcagcgagcgcgctcggcccctgagcccttccaggctctccgcacaccccccacccaggcctcacgccccctagctcgggcgggacccgcgtcctcacgcccccgccctcccccgtgcaggtctggagctctggggtgttcgaactgaagctgcaggagttcgtcaacaagaaggggctgctggggaaccgcaactgctgccgcgggggcgcggggccaccgccgtgcgcctgccggaccttcttccgcgtgtgcctcaagcactaccaggccagcgtgtcccccgagccgccctgcacctacggcagcgccgtcacccccgtgctgggcgtcgactccttcagtctgcccgacggcgggggcgccgactccgcgttcagcaaccccatccgcttccccttcggcttcacctggccggtgagtgccgcacctgcgcgcgccgggccggccctgaagctgggcgggctgcaggacgcgctgggatcccgccttgggcgctcggtggcgggacctcggggaccccgcgaggcgcaggtgggcgctgcgatctgcctagcggcggccccaggactccagcccagcagcgcggacacctcgccccggggccccgcggcctgcaggaggggaccgcgctggggcgaggaggagaggccgagcgcgcccgggagatttccgtatccggcctctgtgccaggtctccagtcagaggcgccccttcacgtgggaaggttctggtttcccgactcctagacgcgttggtggcgcgattacccgcgcagcgcgaccgctaccacccggagcgtgcccatcccccaagaaaaatgacaagggccctcgggcctcttccaccccatcctgcctgcattctctctctctctctaattaaaaaaacaacgtaatatcctgtagtacaggctgaaaaaacacgtcaggaaaccactctttaaaaagttcttccatttccttagggaaggtgagagcaggcaggaggtgcgtggagaccctctccagacacgctgccccagacctgcagccttcaggcctctgttgctgacctggctgttaggaatgactgctttttgccgttttcttttcgttacctttctgggttgtctaacgtcttctcccctctctcccagggcaccttctctctgattattgaagctctccacacagattctcctgatgacctcgcaacaggtaaaaacaaaacccaaaccccaaaa

SEQ ID NO: 585099 - DNA, 4001 bp, Homo sapiens
gggcggcggggaagcacggcgcgttcgaaagcttccacggccgcgctctccgggactcctctggagcagcctggggggacgcggggtcccgtggggacattcgtgaaagggcgtggaggaaaccctgagccgcacacgcccacggccaaccaaccctgcagccagacaggcccaggggccactccagaggctgtgtcaggccctgcgggtgcgcgccacgtttctgagtttattgtttgcgagcctctgagctctgggccttgaagccccccgcgtgcccccgctcccggcaagctgagcccagcgtgggtgattgacaggccgccctgggaaccaggagcgacaggtgccgcgacctccctgtggtgggcacggcccgtccgcccatcgcccctctcagcgccttttcttccccattcacttttttacaaagtcacaggctgcgatttccaggtgcgacgcctcgaccccccggatgcagccggaaaggagccgccgcgcggaggcggagggtggcggccgcagggggcccgtaccgaggggcctgggccggagacccccaccccgcgcgggctcctgcagcacctcctggcgtcgggatccggggtctcggcgggccgcgctcctctgggaacgcgcggtttccgctaagagcgcacaaagggcgcgccccggccccgcccgccgaccccggcccccagggctccgaggtgtgcgccgtcgcctcgcacagcccggggccgggccggctgcacccggtgaggtgggaatgcgggcacgagtcccgcacgaggcggcggccgggcgcgaggctgcgtggggccgtcacgacggcgactggggtccaccgggagggccctggcgccgccctccgccctcgcagtggcccagggatgacccgccgcacggccgcgccgcctgtgccctcgcgctttgggccttgcactggtgcccctcgtaatgctgcctggcgccgccaccacctccaggaagccctcaggtgcgctcactccccgtcgcggatctcagcgtccggcaatcatcgcactgaaaacagcccctccctgggacacgcggcctccttctaaccccccaacacccggccccccagccccgggtcccggcgcgttcagtcggcacaaagttcggaggggcagctccggggttcgcacggggcgggcccgcagcagctgctgcggtaatctgatcccgggacaaaggcgtgcccgccggtgctccggccgcaggtaaacacgcgctttgtcatggagatggggcgcgggacagccccagcagatgatccgcgggttccaggggaaggagccgcggcgcagaggagggggcgggggcccgctgccgagccgtcatctgcgccggggccgccagctgagccacgcgacccgcccgttctcatgcaaatcagcacatgcctccgctgctcgcagcgggcctggcctcggccccgggctccacgcacgcgagaggtgggcgtctcgcgggcccgtggcgcggttcggactccccccaccgcaaaacgaccccccgacacgaaccaggtggggttggagcccgtcttcctgttctctgcacggccgcggatcctgagaaaggaaaagggcgtgtggcgccgggacccggccgcaccggggaagtcactcgccgggtctccagcggcgcagccgcggccagcggggaggcttaggagccgctgcggggctgattccttcgcccccggctgctgttcttgtgcccccaccgtcgcccaccttcgcgcagagctgcccgcgccgggggtcgcgctcctgcccgctgtggaagcgcggctgcctgggggccgcgcgccttgtgtgcacgcgggcggcgctcacctccttcctgcctgcgccagcgctggtggagcctcgaggtccaaacataaaccagatcgatgccccctcccttttccaggctgtgacgaacgatggcttcgtgggcttgtaagtccacgcgcggcaaccgagtgtgaacacatctgtgcacccacttgggtgggcgtggctgggcaggggacatggcccagtgagtgtgtgtgttggggggtaaggtctatgttcacgtgtccaaagacagctttaagaagtaagcagcaaggaagtaaccatgatagctccaggacacagaggcttcgccacggacgcctctgagaacttcccgtgtggcagccagcaggtccattcctctgctacgttaactgctttcagattccaaaactgacggaaggagaatgggcagagggtggttggtgcagatgtgataccaatactaattaataagcatggtctacgtccccttcttcttcttctttatttcaagtaagctggcatgtttgatcaacaccagatttgctgcctggaagttttttatcttgttattctgaacaaggaccctaattcttcttacgaataagagaacctctctgttgggtatacagtattcagttggtctgagaaaacacaaaccccactcaagtctccagacttgtttacacagaaaactgaacctgtggctggcctagagtctgagcctattctgggcattgtttattgcaatctgcccaggccctcctgcccccaccacagtcaccaccacacacgaacctggagaatagaacctttctttggaaaggggggttggaataggattgagtgaccatggtattaggtcatgcacacactgctgaggatggccgcactggaatttgataagatgatggccataagcttttattcccaggtggcctcataaaatggtggggagatactcagtgtctccagcaaacagagaactccacatgtggttgctgtggctgcagctctgatcattatacagcctgagcttaccctagacactggggttactcagcctgtggggttgtgctgcccagaaaacaaaacaaaacaaaaaacaccaccaccaggcagcaaattcctccttccacttctgtgtctgatgtattgggtgccttctaagccctaatgagcctcactttgtacagtaaatttcctgagacataaaaaagtatttaaaagaaagtttcctgttttttcctaatgagcaaggtgaggatttatagtgtggggaggagggactccggcagccggggccaacactgaggcaagcctatttaacataccctggcttaagctccctcctgcgtttgtggggttcagagtgcttagttgtgggagtatagagacatgcagttagggagtgaaaaaacgccatttggttcggagcagatggctggctagggggctgatggcgtctaaaggcgtgtcgtcccctccagctcgaatccctaagggctccccttgtcttcccaatcaatgaaaattaaagtgcaaagaaaggatgaatagttggacctcgagtctctcctttgttcatcccagctactggtgcgcaggagttaaactacaacaggctcctatagaaacgctgaagttaaacagtctccccgttagcacagctttttaaagagagagggagagaggaaccaacttgggggtggggggagagaaatgggggagaggaagaaggagaagaaggaggagaaggaagaagaggaaggaggtggagtaggagaaagaggaggaggaggaggaaaagaaaaaggagaacaggaggaggaggaaggagagggagaagaagaaaagggctttctgcttgatttccccaatacagaatcgcgtggcataaattaagttggaaaagaatgaacgctttgggcaggattctgatggattttacgatgcctttcagttccgctttgccgccgtaatcgagaaatctgtgccatgtcaatttaacaaatacttgatactgaggggggtttgttagagatttggggcaagtctttttccccccaaggtttaagcccttgcgcgtggaactttttatttccagttttctaaacaggcattcaaatgagcctgttttccacttccattttctaattaaaa

SEQ ID NO: 585100 - DNA, 4001 bp, Homo sapiens
agccagttttgcagggatctaagctgtgaaagacttgaaacataccatttggaaaccctcttttcaaaaaagaatacaaattataaacacaagatctctgaggtcccagagcctaggtaagggcccatgcaagtgacagacctagaaacctgaacttcattagctttacagtaaatctgccccataaatggtatccagattcaggttccaggatggggtaaaatctcagaatgctaaaaactacgttaccccagatgtcacctactgtagttttctcagtgggccacaggtgatcagagatttcagtatgtctggaagattaggtggttagaaaccaaacaaaaaaactggaaggtcaaggtagtcacaaaatggggtgtgtgtgggggtgtgcgtgtgtatgaagatgagcagtgaagaccccgacccagctatggtgttggtgcttttcaagaatacaactggtaagaaggctcaattagagttccaaaacaaaaggaatggcaaagtcaggggaaacactcactaatgatggagctgggagatggcagaaatgggatgaagaaggtatcagaacacagagtgtgaaggctgtagtggtggcagagggtggctcctaacagcaaagtccaaagatgggcaggtcaaagagcctatgtgaaggggaggccagagaaaggtcaaaaacaaaagcatgacactagacacggaggaacttgggagtacagctgcggataagatgctctcacatactcaggagatggtggttaggaccctgctgctccagatatggtccccattctgggcttttccctctcggcacttctctattcaagggctcaagccatcagaaagactaccctctcacttctttacctccaggttctctccactaccatttcggggtttccagtccctgaacgacgacaaaagcctttttgtctgtctgcagtcaccctcatccccacccctatatctgccagactgaatctctttaacgctaagatctgatcacatcacttccttgccccacattctctttagcttccttcctgccattccccatccctaaccaacatttcttgtctcacaaatgctcaactcctagttccccaaatatgtcaagactctgaaaccttcatgtcttaaacatttatgttcttactgccaggaataggctctcaactctcgttcatctcccaactcctacttaaaactctgctcaaatccaacctttatggaaatttcctggaccctcctgggcaaatcaccctcgagggacccttttctttctacattgtgggatctgcttgacgctcagtgttatcccacgggtctgcaaactccttgctggcagggaaccctgtctttctgtctgtctttcccccaagagctggggccctgattcagggatagcccacagatgatgggagaaaagtgaagagatcagaggatgcctctctcttctagagacgaccagaaaagtcgtgcagctacgaaggataacagctctgacccaaaaatgacatataggagccaaacacacatcttaagggagggagtaggggtcagaggtgacctcaagatggggcaggcaaggcgacggtcgcgaggtcggggagcacgcaatgacgcggaccagggctcggcaggagggttctgcgcagggacagggatgacgacgggctcggcagcggggacgcgaggatcccatgatgtcgcagccgcggtgacaaggacagaggcacggccaggaaggcatcgggaccgggcagaagccgaggggctgacgcgcgcgagggtcggacgcgggtaacggacggtcacgcaggccgggagcggcccggaagacccgcgggtgccctcgggcccggccctacctagagatgcgccaacaccagccgcagacgcgcccgctgcaccctaggcccagccgcctcagccaccgccacagccgcctcgttcacttccgcttccgctcaaggcgcttccgctcgggacttggccgggttcgcagaggcggggtctgcgtgaccgttgcgagagtgaggagcgcccgcgtcgtgggttgggcggggagagaggcgcgcaggcgcggacagcggacgcggcgcgcaggcgccggcggcgtgggacgccgcggcctgttgccacagcaactgctctggtgctggcggacctcgggtcgcgcagtcaggtagctgcccgctggcgtcgggcgggtgccgcccttgaacctctttgttcatacactgtcctgcggcccggacggtgtcttgacgctgcatgccggtctttgtcctgccggaggcactgaggactggcggctcccggggcctcaggccgaagttgtgcgagcgcggcccaggcgggtggccctgaggccgggagcctcgcctgggccggaaacggggacagcggggggctcctgcacaggggacccgccgcgcgcttccccgccacgtttggggagggagcggggacgtcctggcgttcgaccctcgcctccgtatcgggacggcgcggccccagtcagcgctgagcacttctcggccgggtgttctgaccgtcaccattgttgctctggactactcttcagctgaaagttgtttcaggcaggtttgctagtccggaattgggtgggagagaattccaaggagagagaggaaaggcagaggcaatggcagtgagggagcaggatgcttcagaggaattccagtggctgctgtggatacatggtggcggggacaggggaacaggtgccacctgatcgtgcaggtccctgtcgtcatattcaggagtttggactctgcagtccacaatctcagtcttatttctgcagctgctctaagatggcgaaactcaccttcaggacatgctcccttgggctaggagatcaggtgggctccgggtgatgcgcaagtccacccctctagctgcagttccgcctttttctctacaaccaagcaaacattttggcaggcacgtgtgagtgacgaccttgaaaccaatctgatttatttttctgaaaagtaagttattgacaaatgtcaatttttaatatcaacttatttaggatgtatctccaaacctatccttacacacagtatgtctcagcaaggcagctataagccctggtgagctaatgagtcttccatcaggaaagtaaaatggtcaaatattgttctaggaaaaacattctattgattttcttcagaatctctagcaaagcacttgatcaggtactcagaaaacattaccaaattgaagtggcaccacgtatgcattaaaggatttgggaaggaatctcgattcagcatacaaggcttacgtttcctgatgggcttttctttaagtaaaatcaacaaatggtgttcagcacctattgctgattagtgctgtggggtgacaccaagcagtatgtgaaatgacctctagtcttaaggagtgctcatcgtggttggggacataaactaacatactttaaatactaggcaacaagtgaaacatattgtaaggagtaagggttgtaatgtttctgtcccccgccccccccaagttcataggttgaaattaatcccagcgtgatggtctttggaggtggggcctttgggaagtgaataaatcatgagggtggagcctcatgaatgggaatagtgccataacgaggccagagagctctcttgcccactttccaccgtgtgaggatacagtgagaagatggcctgcaacccagaagagaggcctcaccagaacctaaccatgctggtgcctgatctgagacctcagcgcctccagagctatgagaaatgaatttctaaacccagtctatggtactttgctgtagcagtctgaacagtctaagacagggatgaaaaagcttcaaggagcaagtttgtgaactgagcctggaaggaggagtaggatctgacaaagggttagaagaggaaggactccaagcagaaggagcaaacctaggaaagagactgagggaaaaattc

SEQ ID NO: 585101 - DNA, 4001 bp, Homo sapiens
aaacagaaacagaaaacttaattcctacctgacacagacaacataaggaagaatttgtttgtggactgctttgagattccagaaccaaatacataatccagttgatcttcaaccctacaataaagacaaacttcactaaacataattgcttcagcagatgccttcaaaataagatactataccattatttatggaaagagaagttttatttaagccaaatcttgatcacaatgcaatggaggaaaaaaattacaaaaccgtttagaaagttcttctgctcaattaaaaaatttaatacttctcacgtatgtctcctataagcacactaattctaaaggtagcagaaattgtatgcatttattagagaacagagactctcaggaaaattatgcaatcaattgcaatagcaaatgtataaaacaaattaataatacattttaaaaaagaaattctgttaaatttcatttaagattagttcttggacagctacacctaatggaggacaagaaaatttccaaattttaagtgtatgtttgtaggtcaacctttaacaagtcttaacccattatagtttcatttagtctgtactcaagttgctttcccaggcatgccaggtaaacataattcttaaaaattaaagctttaatcagtaagtgtaaccgatttgttgctactgtcactcttttgatgatacttccaccaaccggtaaagaaagaagaaatgttattaaactggaagatgaactagaaacattgagtggatacctagcttaggcagaaagcagcaaggactagaagggtatgtcacaaagaagtcttcagagatttaataaaaagtaaaacaaatggaatgaagttaagaggcttgacttatacaaatgggggggggagggtggaagagttttggaggggaaaaaattaagattagagactcactgggtgcagaatggaaaaggacgtgaggataggggccattagacagaaagcgatgaagcagggtaccagaggaaagagaaggcagtgagggtttccgaagctaagatggggcatggaatgaactccaatgcaaagcgatgctaaagcaaaacacaatcggcaactaacaaaaagggaaccaggaggaagtaccgaaaggaggtggatgagaggaaaataaaaccaaggaagaaattatggaggtaacaagagtgagaaacctggtcggccagggtaaggagctccggacagggaagagccaggcaagggatggaagcacagagatacgctgcttcccaaggagggaccacccgggcaaaaagacacgtgggaggcgcgggatgaaaaagcagaaccacgaaagcgggtaaaggagggacagagcgacgaagatggagcaggggtgaagggcaaacacgctaggcgcgaggttcaggaagaacgggtcgagggacgcgcgcaggggcaggggcggccgcgggcaccgggagagcagcgcgccgcggcccctcgcctccctcagagcgctccgcaccgccgtccccaccgaccttcaacggggccggggccaggctccgaccgccagcagtcgggtgaggggccgcggcgggcgaacggcggacgaagaggaggccgcttccttcctggcccctgggcaagagggacggagggaggggtcgtgggtgtcgggagccgggggagccagaggggacagtaagggggttacctctcgcccggctcggcctcttcccccgcctgtcgaacggaggagctcgttgtccagctgcaagaagacggcccgacccgggtcagcaccatcccgccccgggccccctcacatcgccatcacagcaaccgcaaacaccgcaaccgcggagccggttcgtcaccgcggctcggctactggcccagcgcggccagcgagcatgcgcagtcgccccagtcccgagggagcccgggccagccggctatacctgcgatcaacaggtccccggccgcacggccccgcccccggcctctctcacctcctcctcccgcctcttccctcccctctctgaggctaggccccgccccttcaagctccgtgccccgcccttcaggagcttcaactgcccctccagctccagcgccaactgagatttcgagagatttgtcctccctaccaggctcccgttcccaagttcccgcgagaacgggaggtttgcgtcaataaaaggcgcgcgtcaagaaaaggggctcgcttgtgggtttaagggatggaacttggaggtggttgaagagtagtgaacaagaagagggcaaaaacacggagttcgagaactttagccgtttttctcacaatgttgtttctccttttctctctttagctcctccgtgcagtcccgggtagagagcccggtccctgcgctagtcgatttgtgcagtaggaaaggaggctgcaggggatctgcgccggggcaggacagatgcctttcgggacccagtgtttgcatcttgggagatgtgggtgctgatctggttgtttcttggtttatgacgccaaaaagggcgggagggggctgatgaagtgaagcctttcgctaatacattccgttaacagaagcccacgaaggatcattgatttatttcactcttccctgtttctgaaccttatctggcaaaaacttttgtggtgcataaagttcagtatgttgctaaagctgagttaatgaaaggaaaatttcagctgcgactcttgttttaaaaatgaatctaggatggatagtggtgttggttgcacaacaatgaatggacataatgctactgaactgtgcacttaaaaatggttaaaatggtaaattttctgttatgtatattttaccacaataagaatgaattagaagggaaaagctttgtgcattcatttgaaagtaatggtgaggtcttgtaacgtaggccatttaggggacaggttttgaatatatctttgtaccagtttttttttttttcgagtgtgtgtgtgagacagagcattgctccgtcgcccaggcgggagtgcagtaatgtgatctcggctcactgcaacctctgcctccggagttcaagcaattctcctgtctcagcctccctagtagctgggactacaggcgcacaccaccacgcctgactactttttgtattgttagtagagacgtggtctcaccatattggtcaggctggtttcgaactcctgaccttaggtgatccacccgccttggccttccaaagtgctgggattacaggcctaagacaccgtgcctggcttgtaccagtttttacatgattgggtgtcctcttatcctgtgaaccaatttatttgcatttgtatgaatggcctgctttcctgatttctaatttgtcccttcttttatagccctataccattttactatccttgctaaacaggcttttattgcttgttttgtgacttgaactttagcctcaaaattggaaaggctttttctgttttttttttagttccagccatgtcttaggaaaatatagtaaacaaccaattatttgcatttccacgtccgtgcatccctaaaacacacagtgtgccaagattctttccctgttccacgttctttttattcaaatcacattgttaactcatctgctgtgtgccaggcagtgtgctaatcttggaagataccaacatgaatgaaaaagaacttgggtggagtgtttgcattattaccctatgatgtaatgtgtatagtgcagagataaatgcacagagagctattgaagctcagaagaagcattaatccaactttgggaagaggtcatgggtcaggaaaaacttccaggagaaaatgattccagagagttgaagtgggatgtcttgtggtggcggttgggaggagtaaagggaaaaggattgcttgaacagaagctgtacagtaagaaactggtctttgtgctgaactaaaactaagacttctatgccactgtttagggatgtgaggctggagaagttgacaaggatcatggtgagccttcaa

SEQ ID NO: 585102 - DNA, 4001 bp, Homo sapiens
tttcacaataaaatacataccctctctgaaacaaatccacattgtagaacttgtttagctccacagagaattctaccattgcttgaacttcagtcatttttaatttatacccagaagactattctgataacagcacctttgttaaggaaagggaaaaaatcatgagaagcgtaacaaaaatgccaacttataaaaatgctattatttatacatattttagaatatgacacataggcagaaaataaaaacaaattatttcagtgtacttaacaacctaacccaactaaataggaccagaatgtatacttactaagctgcactactctctataatttaagattgtcctgtcagaaagctttttctaagatttgttacccttgatgacatttatgtgataataaataatacaacatattgctaaaagaaactcaactttatctcttatagataggaacttttttaatagtgaagatatctaatattctcttcttgtgctacattgcacatgtaagtaactccagagtcaaaaaaaaattaacactcttcaatccccagttaagctgatgaaaggtttttctttaagtgaagaaaaaaattcttaaatcacttttcacttttaaatttaaagagaaagagattttttcctttattacaaattctaaagtattcaattgcaaagaagttgaagaaaagaaaatagacaagcacaaatagaaaacattcacaattccatccactgaaatacatactttggtacgttcttcatgtgtgtgcatttgtaaaattttttaatagtgggatcaaaccacatgtacattttatcatctgcttatttcacttaattattcagtgaacatatatgtcaataatgtagttttacaatattaattttttttttttttttttgtgagacagagtctcgctctgtcacccaggctggagtgcagtggcgcgctctcggctcactgcaatccccgcctccggggtttaagccattctcctgcctcagccttctgagtagctgggactataggcatgcgccgtcatgctcagctaatttttgtatttttagtagagatggggttttgccatgttggccaggctggtcttgaactcctggcctcaagtgatctgctcacctcagcctcccaaagtgctgggattacaggcatgaaccaccgcccccggccattaattgttaactatgacactgggaacatgttataattaaacaatcccctattgttgggtgacttcagtagtttccattttttcactatttaaaaaaaattataacaatcatccttatcaacagtacatatttaaagaataacttcttggactgttaagtaagctaagtgtagaaagcaatttagagtaagaaagtgttggaagacaattcttcacaaatctctcatgtttctacacgtctcacaagcagagacatagacagcctttgttccagactatcttttcacggatgtttgtataatgaacaatcttagaagtcagagatagtgtcttatactagaacaaagggcagatttgtctactgttctgtataatacagataaagcctccctccaggaaaaaagtcaggcaggtttactgtccattctaaaagactcaggttcccctaattcagggttcttctcctgtaacacaaactactcacatacaggtgtcacctggtactcttgctagtgctatgagcataaacaatcctcgaccttgatccatgactctcatgtcctgccaacatccatggcaccgtggcagactaacttgtcagcttgcaagtggggtaaaatctcagacccttcccaattcttgaagcagttcttcatagaaatttggcaaatactcgaatctattaagaattaagtgcaaaaaagttatattcttacctctgcttttcaaagcctcatttttaacattattaaataaccaatcttgtacttccagttactgattcccgttgttaaaaatacaccgttccccctatgagaaaaaaaagtaacatctcaaaccaaatagtagacataaaaaagtctgtcttaaggaaacctatgttttgttagttacttactattttcaatttatataaaagatatatgtccttcgaaggcttatgaataagttttagagacttttttcattcacaatttcaatatcaatattaactattatatctctattaaggattcacttacatataattcaaagtacaataacaaatagagtactttcttagttcagtaggaaccctcatgaatacacaaaacattataagctcattaattttttttttgttgttgttttttttttttgagacggagtctcgctctgtcgcccaggccagactgcggactgcagtggcgcaatctcggctcactgcaagctccgcttcccgggttcacgccattctcctgcctcagcctcccgagtagctgggactacaggcgcccgccaccgcgcccggctaattttttgtatttttagtagaaacagggtttcaccttgttagccaggatggtctcgatctcctgacctcatgatccacccgcctcggcctcccaaagtgctgggattacaggcgtgagccaccgcgcccggccctaagctcattaatttttaagaggtggaactcaccattttaaagtaactccctgagtacgtatatatgtatgtgtgtgcatgtatgcatatatgtatgtatgtgtgtataaagaactatttaaaatactttgacacaatgattgcttcaatgtgctatggatagttttcctcacatttcaaatactgcttaaattttaaaaaaatctatcttttgtccttggtataattattttaggtactaaaaatgttggaataaagaccacgttcactctttgatacagagtttttcttctctccattataaagatgtagactttaccagctcccataactgctattttaaactttaatagtcacatcaaaagattttctggtaactatttctaagatcaaacaatgctatctttatataagatattccccattttgtggaaatgatgtcgaagatagcttctcctgtacatatattcttgtgtgcagggtttagattatgttctggttttgattctaagtaaagtttggccaagtctctatgccttaacttactcaggtataaaatgggtatttgttcattcaaacatttattgaacacctactataggctaggaattgtagtaagtatgaggtatagctaagttcttgatctcaaaagttaactagccatcagaaagaggtatactctgtgtgtgtgtgtaatatgtattttatatatataaatatatattagatatatagaatatatatatgaatagcataatgcttaaaatataggtttgggatttgggtccagatagcacccataccacctaactcagtaagctggccttttccttaatatagaaattaatatcagaattaagatactgctataacaaaatcctaaaacgtggtactagcttagtaattaggtagcaggcaaaaggagaacatactactacgatactaataaccactgttatgtggaaataaaacaattgattaaactgttgcctacaataatctgcaaaactagtgcccataaaaagcccatagtcccagaaaaagtacatgaaaaatgccacaataccgggtgttggtggttcttcgccatgtttactcaagcaagaattggctagtttgtaagcaaagatggaaagaaataaggccgcttaaatgtggggccttgcagccaataccccatgtcaggtttagtgccttggtcaaaggaattcttgacaaaacaaagggatccagctctgcagttaagattagattaaggatgctgctatcccaccaatacttgttgtttcaaatagttttaagacagtgaccattaaaatgagggatgaggatgtgcttcattaaaatgaggccatcaaaagatgttgggtgcatagacagaa

SEQ ID NO: 585103 - DNA, 4001 bp, Homo sapiens
ccactagaaataaaaattcaaaccaattgagggtggtggcttacttattttaatttttttttttttttttacttctttggcatttatagtattaaattttcaggcatcaattaaaatttgataaccagagcttatgatgataaagacttttctgaggctaacttttgctttcagctaagtctgtagtttggagtctatagatctcgaggaaaaataatcttagaaagtgcctctgtagttgaataaatactgaaaacggattcaaatgcagtgttatttcaaattccatgtccatttctcatttggtgacttgctccaataaaagaacgaaaatgcttcagaattcattactgagtgtacatttcctgccatgttctcccaccccaccccctagctatctgagatgctttggtaactgataaactgcaattgtttataaacaataacatggcaggcaccatgtgaaaaacagaaatataggcccagtttccattatccattctaataggcattcattacattgtacaaatatacagaatatctaaaatccttctttcacgttatggttttagtcttttatttttaaaagataaacttaaaaagtagtagattgattttatttttagtttccgtccctctcttttttacccaatcccttgtaaaaatgctgcgaaggtttttgggcttggcagaaacagaaactttggaaagatttttttacaggttacatttacttattattagcatttattttacaggttacattaccttagagggggagttattagtttgagttttatcatctgtcttggtgggtttagcatgctgaagaggcccacagtgctgacactcccgcgcgtcccaccctgagtaaacccggagcctagagggctgcagaaacacgtccgccaggcgtctcctgccccagaagaggaggccgcatggatgcgtcttttttccagagacccccccgccacagccgccccgcaagccaagatcagagaaccccttccttgggtggggtagggggacgcccccggccaaagcctggattgcggtctggcgtcccggcagccatccggatgctcgcgaggaccgtggcctgtttggcacaagagccccactgcctcccagttcggagcttgctggggaccggcaatctgggcggtgctggaagtgtcccctgaacctctcagttttcacccaccttctgcaatctccctgtaagcttaattgactcttgacacaccgcactggaggcggggtgtgtgtgtgggtaaactccgtgtgtggtgggtgatattgcgaagtgttggcactgcggccgctttcgctcctaggtggccgcggtcggaaggtgggtcaccccgcacccttgcggccggggaccgactctccttcgcgcggcggtcgccacacttacgggatccgaggcgggatctcctccatcgatttgaaacgccctgtccacagcaggattttcttgtcgaactgcgaaggcctgcgctgcgtggggactcggtgaatctcccctgcagcgaaagcaacccagatggacgcgggaactgacgcaccggcacagaggatcagcgcgccctcaagccgactcccgggccggcccctcgctgccctcccgcaacctcctccctcccaggacctccccgtcggagccctggctcaccgtgaccttggggcccagaattgctgggggccccgccgctggagtagcaggggagaccccggggcggaagagccggtgcgggccgtcgcgtggcctcgagaggcgccccggggccgcagcggactgttagcccgcggccaaggcgcagtaggctcccgaccgccctgagcatgctgcccgcttgtcccgcgccgcacccgcacctccggacccagccacaggcgttgtccccgcagctctcctcgtcccgccccggcctgccgcgcgctggagagcctgggacgtgcagctggaacccctggcgctcgcacactcagctcgctatccccgtctccgcccccggccagcgacccgggatcagggcgtcaagccccgaggggctggttcctcaggaagcagcctgcctctgtttgaaacaggctcaccaccgcctgaggcagtgcgtgtagctccttttaaattctttgtattgagtagaaatgtattcccgccaggcttttagcctttgattccatcgtttgttccccaggagaataaatctaaatcctctcttccaggaagagacaacaatccttcaagtgcaggaaactgaagacatttcccaattaagtgttaagggcactccactaacttctggatgagatttcttgaagttagctcctcacctcatcgtctcccacccccataccttttctctttcctacggaaaacaatctcaattcctccaagtgcctttctctatcttttcttcttcttttcagagacagtctctggctctgtcactcaggctaaagtgcagtggcatgctgatagctcattgtaacgtcgaactcctggactcaagtagtcctcccaccttagcctccagagtagctagggctttggtcgtgcgccagcacgctccgctattttttttttttttaagagatgggatctcactatgttgtccagactggtctccaactcctggcctcaagctatcagctgggctctgcctcccaaagcactgggattacacgtatgagccgccatgccagcttcctacctcttcatctcttagcccacaaactctccacactcccttcaaaatgtgcctttcttctgtcaccttccaccatctcctctatgctaaaaggtaaaagaatctactattttcaggcattaaatggtaacagggattcagattcaatgattggagagaagggttgtacaagcaatttacttatcttgttccacagacaacagacctcctgccaagtcaaagtgctcatcagcccagcaccaggccgagctcaccctcctctgctattactgcctgtgagtttccctccttatctagacactgctttgcacttgttggatttctagatattttgcttcctaactagactgtcaggctcttgaaagctataacttttctgtaactgccagctcagtttttttttctttttacataaccgtgttaaacaaaaaaagaggggttaatagctctgtgaagacatacatttagaggagcgcttgcagaaggaacatgggctttgccttcacacctaggtttaaatcccggatttgtgacttaaaagttgcacaatcatgagcagtaaatcatttaagttataagtcttggtctcttttgtaaaaccagaattcctatcttttaggtttattcatgcaatgactaccagtaaccagctacgtgccagctacctctcagagctggggatggagcagtgatgacatcaggtgaagatgaagaaaaataaaacaaggtgaaaaagaataagcaggagtagagtgagaagatatttagaaaccatggttagcaatgtccttctaaatgtgcctggtgtgtaataatacttcagaagataatgatttctttccccgtcacattctttagtcccaaaacacaagggcattttaatttatgaaatctcctgtggggaactaggagctccctgaccttcaggagttgtgattatattcccaagatatagctgaaaaattggcacttagtagatatttaataagtatttgttaaataaatgaatagatgaatacaagtcttcgaaaacagaatagtctgcacctaggctagtttacgaaaagactgagatgcttgaggacattctatgtccttttaaacttcatactttcagtgtctatcatgttgcttaccacatagcggtctccaaataagtgtttataaaactcaactgaatgaattcctgcctgagaaagtatgttgccatagctaatattgctccagcattatggtacttgaagattcttgcattatttaaatgtggttttttctatt

SEQ ID NO: 585104 - DNA, 4001 bp, Homo sapiens
ccagtcatgactaaggcagcaaataatcaagttgcttcagctacatagtagtggctggaagagggtttagcgtgggtgcatcctagctgtgggtctgatcgatgatacaacctggtattaaccgctgggcttccaactggtcctgtccccttgaagacttgattctgactggggatagggtggggtgggtggggccttttgccaattccaactcctcattgtttgctgacataagatgagggctcccaacccccaccacctcttgccaggctgatccttgcttgagtcatagcagggatgactcagagatgatagactgaatctagaaacagaccagaccacatgtaaaaatagatctttgacccactctctgtaccagagaaggaaaccaacccccttatgtacaataaataacccaggaagtcagcctgctcgaactcagacttgtaggaagccaggctgctgtctctggtgacaatccaggaagctgaacaataacttctgtaacaatcagccagaaatggccaggacctgattaataacggacagcttccctaacttttgtcaccattttaaatttaggaacaaccagagaaagccaaatctgtacctacccctaaccaatcacacagtgtgccctgcttccagttagcccacctgcagcttccccaggccaacagcctcccatcagggcacacctcaagacttccctttttttccactctaaagctttcccagtgctttgcctgtgatggggtctctgacaaaatgcaagtgatggtggccaacttcattgctatagcaagctcagaataaatagcctttgctttttctcatttggttggtctttgtctatttccatggaacctataacctgcttactgtcaacccacccaccctagttccctgcctagcaatgaaactccatacctcaacttctcctatatggacaagatttcttcctctgctgggaagaagatcgtggccaggagagtgtcagcagaagcactttcctgggaaggagcccaggcagggcttggctggacttctggtgatctcctgagtgaggtgcatggaatgcctgtcttcttctaagagccagtgaccagggaagactgtaactgggttttagctccagttgctattttatttcccagtcccacctaccccacgagagttggagcctagccacattcttctcagtgatgaaagtgttgcgtatgaacccaagcccactagtatggccctaacccccactgggtaaatgtcctctctgccagctgcctgtccccacggccaagtccaactgtctggattctctttgtcccgcccctgctctgcctgcagggagcctctcagctctttctttcttaaccccttccccagcacactattgctgccagcatcagatgtgtgactagccagcactgttctataagcctcccaacaccatgaaactggaatcattcagtcatcctgccaggcttagatccagcagaatttttgaacagattgagaagtggccacatgatggcactataaatctagcaatgccctcagaaagttggcaaactgcaaagctccagggaatcaggatctgtatttttttttttttaatgaatgtcagaaaagtgaaaactggtaatggtcaatagcccccagaaaatcttgatcttattttgctcaggattcttcctgatcaatggccatttgtttttgacacttgccaaacattagctatccctcttcagcacgcatcccaccgcccaatgctgtcttcgctttgtactcaacgcatgcacatttctgttctaaatagtctgccggttgctatgaacacaaaaatagacacacaaagatttaagaaagatggaaatgtcttacctaagcatgagtgaaatgatttcttcttttgttttggtccatcattatgctaaataaacggaagccttttccctcttcacacgcagagctgagccaatcacaggcacaaatgaaaattgcctatctctagaaacaaatcccttggccgtcctggttgattagtcattacacatttacatagcacagaaaaggttgcccaggtaatcatacaaacatttgatattttcccatgccttctcttggctgatccaaattctttggaattgagatttttttgtgtacccttttaaaaatgagcactgtgagatttactcagacctctgattttttcatgtgagtgaatcatagcctggtatgccctgagctttgcatgaaaggcagcacagcacagtggagaaaatacatcttcaggctcaagtggtgatgggtagtggccgggggcaacctgaatcctggctcaactctttcttgctttcttggccagctgctctctacttctttgactttcaatatgcttatctgtgaactgggataaagagtactgaacttctaagtttttttaggggactaaatgagataatgtaatgtatgtaataggtgttcaaccaagggtagctagtattcttctgagtagagtggatgactccagtgtgtaacctatggccaagcaactgaaaggtggagaaagttcctcatgctcttttggaaatctcatgtggtgattaagagcatggttttttgcatcaaactgtctgcatccataccatagttctactatctttgtagtagatgcaatagaaaagcgtaagcaaagctttctaagtctcaccgtcttggtttgtaatgtcagtaatcatagcccctgcctcatgatgctggtgtgagcctgaatgagacaatgcatgtgttaggggttggtttgtgtcccagaaaacgtgttgaagtccaaacacccagtacctgtagggtgaccttatttagaaatagagtctttgcagatgatcaagttaacatgaagtcattagagtgagccctagtcgagtgcaactaatgtgcttatagaaacaggaaatttggacacagaggtacccacacaaggagaacactgtgaagatgaaggcacagatcaggatgaggcatctgtaagctaacaaatgcccaaaattgccaacaaacgataagatgctaggagagaggtatggaacaggttctccccgacagccctcagaaggaaccagcactactgacacattgatcttggacttctagcctccagaaccgtgagacaatacatttctgttgtttaagctcccagttggtggtgctttgttatggcagccctagcaaactaatacagcatggatgtatgtgacccagggcatgcctcctagtaagcagccagtaaatgttcgacactattgctgttgatgtggctagtgagatctccactttatcttttttatttatgtatttatttttgagatggagtcttgctctgtcaccatgctgaagtacagtggcatgatcttggctcactgcaacctctgcctcccaggttcaagcgattctcctgcctcagcctccagagtagctgggaatataggcgcacaccaccatgcccagctaatttttgtatttttagtagagacggggtttcaccatttggccaggatggtctcaatctcttgaccttgtgatacatccacctcaggctcccaaagtgctgggattacaggcgtgagccactgcacccggccaccactttttctaatcagtagctttgcacaggaatattcccagctggtttctcctacctgttactagaacccacttttcactgtgatgcttaaacatgtgcagaaaagaaaagaatatccaaaagcagatttcgatcaagctgttgtttagatttttggaccatttaaataccttgagcagagattattaaatagaaaggccagtgtataaagaatggttttatacaaggtgagggtagaaccagacaacacccgtgattacattgcgaggtgttttggcagatgtcagatccatggctaacacaagacaaaccagcagtaccgagtgtggggacgtggattcctgatttgctgttcacg

SEQ ID NO: 585105 - DNA, 4001 bp, Homo sapiens
agagggttacatctaaaatgagaacagtggatgttatggacacatcataagagaaaatcagaataaatattcacgtgcttcattcaggacatcaatattcggaagatcaaacactactgcaggaagcctggcttttagactccaaatgtgtaaatgttctgatgatacactactatcattccttcttagattttcctttctctgaatgcaatactctgacaaaaaaggaaacaaaacaccgcacacctaacaatttctgagacagtgctgagatcaaacaaaagacaaaaaagaaaacttcacaagacgttggttgagttttactgttatgtacctgtaacttttcttttgctcttccatttgtgctctcattttgtagtccttttatgttatcttttctatcctcaatcacatttcttcactaaaatctttttattctcttttcaaccttttttcactcctatttcctcctttcctctcttccgaatctcatgtcttacttcactctctcaaaagtgccaaccagcaatgggattatgtgagaactttacagttgagtcagactcagaggctatctagcagtaacccccacgatgcccatctctcttcagcataccaactctcctaacaagctgttaggagacagcttaaacacattaaggtatatcatctttcttaactttcagacaccacaaatcacttcttaccgataggtattgctagattgctggtgagttctaagcagagcaatataacagatatgaattgctcttgcttcacagataccaattccttctcattatcaacattaaattagaaaaaaagttcactaatttaggtacagtcctaaactacacgtggccgaatgtgaaagctaactgctctttgaaaattatccttcgacagacaaacattgaactagatgcaggcacagtgtgagattcatctaataagccttgtttgacattttgtcaggataaggaatgactcattaaatgccccaaattggcactcaaggtatgttttaccctcctacattcctctgaaagttgattcttcccttaactgagtaaccagtaagatactgtttaattccgagtcatattaggtaaatacggtactgtacttcaaatggtactgtagtgtgatgcctcgtggagccctggcagatgcatggaagcaacagtaaagtgatttagtattgtgaaataaaggaactaaatcctaatttgttctgtgctggtttagccccaaagggcaaggaggtgcaagtcccttacgcgcaccgtgccgctgtgctgtctagcttaaattcatgttgccagcgttccaccaaagtttgcagggttttggaggtgtctccggctgttgcttcggcggaggagtagagttcccctcgctgcgggcgcagggcgcactgcctcccggggagacaggtgagtccggcgcggcccgcacggggtcgccacctgccccgtcgctgccccccttaccttggtgagctgggcgattttcttgctcattttcaggtgcatctcctggctgtagtccatgctgtgcccagccagctgtgcggtggccggcgagggcgcgaatttggccgccgagccgccgtaatagtgctgctgccagctcatgcccggggtcgccatcttcccaacagaccccagccggggcacctgtccccgcgggtggaggcaggcccgtggagcaacgacgcccgggaggcaagagtcgcggcggccgcttcccgacccgacacccggcgccccccagactcggccgcaggcgccgtcccacccgcgacccccgggtcacccctggaagggacggggcggtcccgccggcccgaagccgcggggacaacggcgcggggcagatgcccggggttgggcggcggcggccgggggccgggccagctcttggaggctcctcggcccgcgcctggcggaggcgtcgaggacagcgcagctccgcgggtcccgctcgcagcccgcaccgaggactcggcgaggctgcggagggaggaggagacggggcgggctgcggcggggataggcggggacatggaggaggacgcgggagccgccgttaccagggcgcgcgcggggacggcgacgtcatttccccgcagccaagccccgcccagccccgcgcagccgccgccgccgccgccagtcccgcagccccgcggccagtgcgggcgcctcgcgaggtcgatccgggatcgtgccgccagtgcttcccccgtgtggcggggatccagcagcccagccctggcggcgatccccgtgcagcgagcgtgaggcctgacgtaaaaaaaaaaagtatccccaagaagacggtgctgtaatcaccttcggttagcagaacgggtgtcgatttacagaccctttccacatgcgtcctcgtgtgtgcagggccccaagaagtggctcttccccaagaagagaggcaagcccaatccagagacatgagtagtgaagtagcgaggattccctgccctgaccttccttccaatggcacacaagtgaccgtgacactgtcttagccgccccctcccaccccgagtgcccggccactgcccccagttcagtgctgagtgtatgtgtggagggaacgctccttttcagtcagctggtggagcaccgcatagctactttcccgcggtggagcccaagacaaatagatatgaaactacttggctggaaataagtaagaataggatcggagtgaaagtaatggtaaaaaaaacagaagatggaacaagacatcagtgctttaaggatttggagctgggccaaaatgtgtcataacttgtgcattttcgccttcataaatgtgttattccctactgattttctcttaacatctctacccctgcaagtcaaatgattttttaaaaaagtttttgtatcctgcattgaagcatgtgagtcattttagggcatggataatactttaaaaacgtagaattgtacctgtttttttaaaaatcgtatctccacgcagttttgcagaaccaaattccccaactccatgtgatttctttttagcatgcaagtagccaaaatataaatctgagaatattaacaaactagagagccgaatttaacaaagattgtctggatgtgacaacatctaaacaaggtgaaggtttaatcggaccctgaaatactttaagatctgttggaattcctgaaaggaaacttgaaattggctcttttcccagatgctaggtactcagtcccccttaaatagaccttccaggaaaaatgttgtctagttccgaggttctgaatggagcatatggccagaaacaaatatcctacaaatgttgctccttaagcactaatgatcaaataaaattaaagagaattagaaactagtgctatttcatcaaattctaggcatggaagattcacagtcattttagaactcatgttctttacgttctaagcagaaatgtatgctcaaaagactctctgtttcactaaatttgtatagccaagtcttgctaggacaaagatatttttgtttttgtcactatgataaagtggaaagagaataagactggaaataaggaaatgaatgtgtagcattagttgagtcacccaacctgttcactcctcaagtgcttccactgaaaagagatggtgttaccagctgcttccagctcggacttggtaatgagaagttaggaccctggtccactggtaattcactctgaactccatcacatgagtttccatcatcactatgtagcatagcccaaaaggacccttttcttaaatactatgctcaaaagacatccactgtcacttcatgaatttaatatttttccccacgacaatgggataaaacaagacacaattaaagttatatttaattataaataatgaatagaaacataatatacaggtcgagtatcctttatccaaaatgcttgggacccaaactgttctgggtttcagactttttaggattttggaatatttgca

SEQ ID NO: 585106 - DNA, 4001 bp, Homo sapiens
ggaaaacacaggataaactgcccacgatgcaaacgcagcaagggcatcactacaagaaaactccatgggagttacgtgttagcaacaggagccgctgcccaaacactcaagttcaacagcgcctgccatacctcctgagagatgtttgacacacgtaggctgttagcacagttctcatttcttctccccattttgttgtagctgttgctctgtttccttaaaatcctacacagattgcgggataggcacatttatgggtaagggtcaacatttataaaaaagaaagtgtgagttttgatttcccatctaaaggaggtaagagaatgcttagaaagcagaagagaggggctaggagagcagggtgggggtgacagtacgaaaccaaccagaagcaaggggcaagcctgactcaaaaggagcacagacaacagcaaactggcagatctcagaacagaagattaggaaattgagatcagaggtgagaaagcaaatatcagctaagaagatgaaatacacattggaacaaactatggtgaattatctggaacttagaaaacaggggcacaaagtctccttttattcattcaaaacaattgctccatttgaaagcagggttgaacccttacaactaggccaggcaagcaccccgtgcatatttcggagacaacaaaatgcccccaggaccaaacaatattttccgcaccaatcaatcaaggtacctaaagggttttaacccactgccgtttaaggtaaaagaattagagaactctaaggtaacaagcaaaacagtcactggattaaggtatggctatctggaaagaatcacttttttttttttttttttttttgagacagagtctcgctctgttgcccagactggagtgcagtggcgcgatctcggttcactgcaacctccgcctcccgggttcaagcgattctcctgcctcagcctcccgagcagctgggattacaggcgagcaccactacgcccagctaatttttatatttttagtagagatggggtttcaccatgttggccaggctggtcttgaactcctgacctcgtgatccacctgcctcagtctcccaaagtgctgggattacaggcgtgatccactgcacccggccaagaatcacaaattaaagccaccgcagtaatcggtctatctgctaatcgtttacaattgattgtctcctacagaaaagtgtatgaagaaataggagatttagtttaggtaggttttcagccaacaccggttattggtccacgagtgtgtgcatgccagacactaggtctgaatgcaggaggaaggcggttgctgagcaggtggcgctgcctggggccaccgggtgtgtgtcaagaaggagggcatccagctcctggaaaaggccaccgcacctgaaggacggccctggggacaaaggacgccttggggactgcgagttgggggacaggagctttaggggccagagtgcttgaaggcgcgtgtctcaagggagccgcaaggcccccgtgaagaggaatccccttttcctcctgagctgtggccggactgggtggggagcccagttccaggggtagcaggagggggctgcgggattccccggggccggggctctcaacccaccgcgcgaaggcccacgtgtcctccccggcgtgctctcccggtgcgccgccccgaggcccgagcgcctccgcgtgcgtggctgacggcttggagggcgccccctctgccgcggccttcctgcagcggggggacaaagagggcggcgggcggctggcggccttgagcgcagcccggtcggcagtgcagggcctgcgaagcccgcgggccggcgcaggggtgggagtcgggcccggggcccagagagaccttccggggccggggctgcggctccgcgggcttccccaccggccgggtctcccggcaactaccagagagcgggggcgcccggggaggcccggcgttccacaaggtccacgcgtattcgcgggccgcggggtcgccgccggccgcccaggcgcggagcctctcgggggtcacccggccgccgggcccgcgggacgcacggggccgccaggggaggacaacaagcctcaggccctgtccctgcgccccgcccggcctcccccgcggggctgcgcagcccactcggccatcctggcctgaaggggccgcccccggcctcgcgggaaagcctgagcctcccgggccttctcgggccttctcggactttcccccaggcgtcctggaccttcttcggccttcctgggcctcctcgggcttccttgaccctccccaggccttccccgaggcctccaggcccttccctgggcctctccaggctgagctctccgcgacatggccagtgggcctctgggacccggggcccggcccacccgcctccaccctccattcccaccgcctgctcacatcaagccaggagcaccgcccggtacgtagtcctccagactaagctacaatatatacgcattgatacatgtgaagttatatctatgcttgtacaatatattaacatagaagaagaggcatccttgttgacaccaagctcatccggtcagtttcaggtccgtcgtcggcctttcaataggaaaaacaaaagatgattttttttcttttttcatgtagaggatacatgtaaatcacacagcccaattttgtaccccgaaatgcatatctcctattacagcttcatgaaataagtggaggggtgggggaagaatctctctctatctagttagatatatctgcatagctatcatcacccccaccttttgatatagagaaaaatttaaaacaaaattaattatatatttaggtacagcaaatgaatactaaacatttggggggatgagatcacggccatgtccctctgagaatctccccataaaaatgcacttatataccacatgttgaaaacaatgtcaggggtttctcaggttctttgatccctgactcctgactctttcctctgcatttccattttctcctcagaaagaccttccctttaaagaagctcttcccaccttccacctaccttactctatttcatgacaccccgttgttatttacttctttgtactcctcataatcttgctgtttacttgtttgtttttgtattgtctgtctctccccagtagaatatcaaactccatgtgggccggggccttgtctgtctagttcatttctgtatccccaaccctttaaaactgtgctgggcacatagtagaagcacagtggtagaagcacaatcgatgtaagtgaacgaacaagatttgtgcaggcctcattccttgcagcctccttggaggtttcccttctagggccctctcttccttcggctgttttccatactgctgctctaaaatacagacctgctcaactgcctcctaatgccggaaggaggaaaccctaattctgcagccatcccttaggtatctgctcatcaccttcccagcgcccactacatgtcaagcacatcggacattttacaattttcctaaacactctcctccagggcatacatcattgttactcttcctgtaatagtacctcctttttatctccttttcttttttaacctgcctaaattctagtcattacacttctaactcacaagtcatttttcctgattgttcaggaagtgtaattactagaaaaaatacaaaaaaaaaaaaaggagagaaaacaaaagttgctgtctcctccaagatccttgcttcgttataatgatttaattacagccccttactcagttacattgtaattattcatttacaacgtctcaatcactttcttttcaacaccttgaaggtgatatctgcccatattctatctaacagagtgcctggcatgtactgtagtaggtaaggcactcaataaatgtttcaattgatttaattattgcaaaaatagtattttctgaaatgtatggtgtggtgactatatgccaggcatagtgctgaacattttatatgg

SEQ ID NO: 585107 - DNA, 4001 bp, Homo sapiens
tcttgtctttaagttcctgttttattgcattcatattcttaagttcttcttcagcacaaagtagatatgatgaattttcttttctcccctcttaggctaggttttaccccaaggtcttgtactttatccatcttttacatcgttccttccttcctctcccccttccctccctctctcccttccatccttgtcttccttccttcaattttaggagtccataggattcccaataatttttttctttttcattttcagcatgtggaattctgttcactctatttgctctgtatgttggtcagctatcactacaataaaactgcaccccaaaatttcagtaatttcaaccaaaaacatttctcttgcttataatattctgaatagcccgctgcggttcaaccgatctcaacttggctcacccgggtttgcatatacggaagttttggagtggctggcatgtgaggctctaccttgcttggctcttaagcagaactgtctctcagtctgattctctagagactgaagttattaataagatgtgttaggacttttctttcctgtgtggggaataatgactgggactgcatgaagggtagggctctgcaaaggccagtgtatcatctcacctagcactgataacacactgatacagacctattcacatcactgcctacaaactggaccaagacttgcaaattttggaagccccagacgttgggactttagcatcaagacctaaaatgcccaactttacctctaccactgaccccatactcagtaagaagttaagaataaatccagcctacaaaaatttactgaccgaaagctgcctattaccaaaagatataaaatccattgcaactttaaacctaccggctaccagagaaatttaatagtaactactacgtgtcttggtgggacaataaagtgttctaatccattgaatattacagttcatattagcacatattcatagcacataccatataactttttattaaacaaagaagacttcttagagtttcgtagttcttcagaatttttgtggaaaatattaatttcattaaagaagtacttgagttcttaattaaaatctggtctaatttgatcaatagaagtttacatattttaatgtttgacaattttaagtagttggtaattgtcataatgcctaactttttaatcttctcctgcctatcccatctaaatacccatctaaatgcctagtgttaatctcgtgtcttctatcagacttctacatactcatctacatcctcaaccactgaatcctattgcacttatagtcaacgccacacaattctttaagtatttcgcgtgtatgtcttcaattagattgtaagcttcttggaactggatctatgccttaatttctttctaatcttcccagcgagcctacaagttaatttggggagtatacagcgttcaacaaatactggttgggtctgtgaccttagctttgccatttttgtcaaagcgtataaccatctagtttcaattgtgccctgacatgactatttctctggggtttctctttgctcaacgccattgttcattttctattagaataaagggcttgttgaacagagatgccaacgcagcgtcccgtggaatctgaataaacggactgatccaccgccccgggtgttgaggctgtgaacaaaaattaaacctctgatagcccacgaacagcttaacgacacatattttaaaataccactccaaagcctagttacctgccagttaccccggcctccggagctgccgatgctcgaagatgttgacaaggcagctaggatatacagtccagaagcccagtcgctacggtaacggtgacacgcaagtgcacttgcgcggccttctgacggaaaaccttagcctgaacctacagacgtgcttagcgacggcagaggcttgcggcagtagcgtgacttacggcagctctctagcagagcgccgttgctgggggaatgcagaagcggccgcgggctagcaagctcccggagccggcggcgcaccaccatgacccagtcggtggtcgtacagggtaagctacgccgggcgggtagagacctggtcgccgcggaatccagcggccatgtttcctgcttaatgtcctattctctttccttcctctcctccggtcgcagtcggccagtgcggaaaccagatcggctgctgcttctgggacctggcactaagggagcacgccgcggtcaaccaggtacccgcccgccgccgcgagccccctcgcctgtcagctaggtcttccagcccatacgcaggaaataatcgacttgagctttcatctgacccgtttaagatgcatgggatcttcccagtaaagaacgtactggtttttaaacatgttgcgtcagacacacactaaactaaaagaacactggccagcgaccttagtcttaacgtttttcctgattctcagggtctcctctttattggtgttcgtgtgcagaacagtgagatttgtatatgggaaagtactttgtaaaatagataacacgtgtggttattgtattccttaatttaaccagtcagcttttaaaaagattacgaagaatccagagaacgctcatttgatggacctgtcctacagtcctatgggtgaaatcctttctttagcaccccctgctgaactttttatctgtagatctggcatttactcttctaaggagattgggaagagtcaggctccgcattttgtgatacttggtttttcttatcagagtctcatcctagccattacagtattatgtaattaaaattgaaagaacttgatttgggcgagaagcaaaacctaaatgctattaacatatgtttttctttttagaaaggaatttatgatgaggcaataagcagcttctttagaaatgtggacaccaggtaagatgggattaaagtctgtcacagtgtgatactttaagtttcagtagcttgggagagaattcttcaaaggacaataaaaatagccagctgcgaagttgtgtttttttgtttcattattgaaagcatatttattctattagattattaatattcttatatcattttcccgaagaagacaacagatttccctttagtgtgacttcttttaacttaaccttgaaataagtttcattaaaagaaagctgaaattttcccagagggcatcttgttaatgcatcctgtaataactaacttttgaaagaaaaatatattgtttacatatatgctgtaagtataaaaatatacttaaaaaggtgacaagcagttgttggattgtttttgtttatttaataaagagtatatgtaagtaccatatatgttttatctggaagagtaatttaagttgccgtttaggatatctccataagcttttaatattaaatcattaagttcatgcattttcaaaatacttcataaaactaactgtcctgtgcttaaactgaaaaatacatacttcgtgtcaggctttaatccaataggaacatcagttctagtttaaaatagttggctgggtgtgtgagcagttatcttcagagaaagctgattagtccgcgcttcctgggtgaattccagagtctatctagggcactggcttgcaaactcagaagtgtcattggcatctcgagatgggttcagtgctctccagtacagccaggttaaccaaagaccaaattctcattttcataggcacattactttatcttttgtaggaaatctaactgaaaagctgtgtaataatctgaaggttgcttggtgaccatggaatcagaccaaaggaagttagttactttaatggctggtatcatttatatttattttatggagatatctgtcatatagactatagattccctcttatttgtagcccacaatatcctcacctctaaattctcttaggagactcaaatttgcttctgtcatacttcctttccggcgcttctcttgctaagttcctacacccacctctttacttcttgttaccc

SEQ ID NO: 585108 - DNA, 4001 bp, Homo sapiens
caagattttccaaaacagggcaaagtaattgacaaatatcttgttcttcttgtctaggaaattagtaacatatatatatatatatatatatatatatatatatatatatatgagtctcactttatctatgaaccttctgctcacattatttatgttactgatgctggtgtttgtttttctttgtttcagagctagaatttggggcacgtaactagtgttgcagactccatttagtatgctaactgtaaggtattgaagtagacaaaactgtctttgttatacatttgcagataataataaagaaagcaaacacttcaaaataaaatgactctgcacttggaagcagtcaagtgaaaccacattgttaatgcaaagtaaatattttagaccattagcaagagtggggcagacattattcagaacagtgagctcagaggaacgctttggtagaagggagataactaaattctccaaagaaaaatgatgttgtgctacaataggtagtattaggtttccctttgaacttcttataaaggaaccaattacaaaagtttgctctggtcatctaatcctgtggggctttttcttttgttactcttttttctaagtctttttcagtcctttctcttgacattctgtgtgttttcttttttcaaagaatgttagcagagacaatctgatttttaatgtgaataggaaaagtgcccagatgaaatgaacttaaaccagggcattcaagtcagagacagtaacatatcttaggctgttttttcctttttcttaaaaaggagggggggtggtttgttccttatgcttctgtattttacttactttgctttttttttctaattatatttggcttccttcattttctaaataacatgcatcttaaaaacaaatacttctctaaaagtcaccatatttcacaattctgggtctaagtctagatgtaatgcacccagtatgatgcacaacacttgaattttgctgccatcataatgctgtgcataaaatggggaggcattttttttcctgtcctctgaatgttctttcttttactaggatgaatatgtaaaactcagttttagagttgctttccattcctcaaccctcttccgcacacactcctcttacacacaacttactttatggtataggctcagaaatgcagcctgggggccataaaataaaagacctggaacctgtttattttcattcaatctctgcccttcacttggttaaaatctctcactgatattgtggagactgatttttgctgatggtcctctcaaaaagtgactcattcatgctgcattcacctcatgagggtggaaggcacatcattgcaactgcctacctgtcaacctcaccagatgacatgtaacttctgccttgcaggacatggagagggggttctgtgctctccacatagacactgaaggcagatacgaatggtggacaacttccactcagctccaatctactttacctcgagcagcacagtgctctgtctaccaaaagcagcctgacaggaaatccctaactgtagggtgggaagcaggagggtgcatggaggctaccccatatttcccttccattagacagccaacagttgtgactctgttagttacaaagattctaaaattttttaatatctcgccactgtcttatcttagaataacatgtaaatagatatttgagaaattagctgttattgtacatgcctcccaccccagccaaaagattgaagtaggaaacccaggtattggaacggaacagagtccccagggtctagtgagatttgcaacccaggcattccttaccacgcacagagctgaagggttgcagcaaagccaagtgaaaggctcagttattcacctgaagagtcaggacaaatgtggagaacacaggttcacaacaaaccaggtagaaacaggagacccggtcagagagagcagttctcagcacagtgtaggcaggggaggacccaagggtaaaacaccgtatatgcctcattctcaacatttttctaagattactaatccctgtaatccctcaacaactacaacaacaaaggaaacttatcagataagcctaaaaataaaatctttctttgctcgtcctgtttttcaaaggctaactcaaaacctaattgtaagagcctattgaattgcttttcttttttccactcttttcaacatactatattaaaataaaataagtgggagcccttggtaaacaggaattgaattccatggaagtcacagcccaacacaacacaacattccagagaaggctggcatcacagttagctgaatgtcagaccattttcctatttagtagcagttttgagtagagaagggagcggaaatcaattaaaaggaaagaaaaattctttgtggtaataaaattctcaatatttaaaaaatgatgaatattcacagcaaaaacaatttataaattattttaagacatcttacaatttgggccagaaatatggcagatagattattaaaaacatgaaacttgtttaaacaagcataaccacttaggcttgtttctccccactgaataggcaagaactgccttatgtaatcactcacccatttggtctattccgctttgtacctctgggaggggtgaaaaaggaaaaatgtaggaaattttcttttgtggaaaagcatatgtgtacagccacaagctttgtggattttgagactgattggatcaaacccagaaggccacatccactgtttatggcagagttccaacatgaaggcaaagcacctgcagaggaattacccttaaacttttattatgactgcatttgcataatattattttttctttcatcacagagaagaatctcttaggggttgattcttagtaaattctgcaagtcactaaataacttagcactgcctctcaccttccttatgaatgtccatcttccatttttgttcataatcaggacttacaagaaatctggctgcatgtagatgtcatttttgctctattactaaaaatactctaagggagaagtttttttaaattttactttatgttctgggatacatgtgctgaacgcgcaggcttcttacataggtatacatgtgtcatggtggtttgctgctcctatcaacctgtcatctaggttttaagccctgcatgcattaggcattggtccaaatgctctccctcctaggggagaagttttgaatcttccgggtatcccagcacatgaatatctaggctgctctgcctttgcattgaagattattggttttatttctgctgtttaagttatttggatgaaactcatgtgaaactgacttatgaaactgtagggaaggcaaaacttcacctctatcctcttaggatttttttttaaagttgtcctgagaattaaattgacatgagacagatcaacagaaaaaaagcatacacatttacttaacacatagcatgggaatcttttttttttttttttttttgttttgagacggagtctcgctctgtcgcccagacttgagtgcagtggctcgatgtcggctcactgcaagctccgcctccccggttcacgccattctcctgcctcagcctcccgagtagctgggaccaggcgcccgccaccaagcctggctaattttttgtatttttagtagagacggggtttcagcgtgttagccaggatggtctcgatctcctgacctcgtgattcgtccgtctcggccccccaaagtgctgggattacaggcgtgagccaccgcgccgggccgggaatctttaataaagaaatggagacccaaggagttgaacacttacctactgaattggacaaagaatagtaatttgtgaaaaggcaactaaattatttggggaggcaagaagacaagaattattttaataaaatctgtacagaatcctctcagcctcaattgtccctccttgatgttaagagtgttgctttctttctagtacagggaggatatccttcacat

SEQ ID NO: 585109 - DNA, 4001 bp, Homo sapiens
cccacattccttatgcatcttcccacaggaatcagccccaggtccttctcattctgatgaagaatcagcaggtcagtgtgctcagcctaagctatgacatgatgtgcaagatttccttgtacctgtgtttagagaggagaagctcacacaatgataagtgtttgggcctgccactgactgaatggagcctggtgactgaggacatacaccataaatcaatcattctgtcataagagttgtaagttatacccttcttcaataaaagacacaagacatttgggagcctgatatgttttatctaagatgtgctttatgcattaaagaaaagattttgttttggagtattttttgacttatcaatttatgaagagtatgactttactgccaaccagctttggagtgtatgattttaaaaacagattttgccttgatttgttgttaccaaggcaaatccttgtcgaaaaagtaaaataatgctatttctgtgcctttattctgaaacagatagcattcctgacaatttgtggatctgcttatcaactcttaccacttgttttgcttttgggaatgcaattcttactacctataaatgggaagttagtccttcctaaggctgtacatctggatttgtgttcatgtgcctggaggaatgacaggctacttccctgcatcaattaggtaaagatatgatttccttctgttaaataaaacaatgcccaaatcttgagcttctgaagtaattaagaacccctttagctgtacagcacaaagagtataaaacataatctccctagagagtacagtcactttttcacagaaggctatttaaaaactgctgattcctaccatacaaggaaaattcttctcaatcttgacaatatttatacacagagatagcagttgccagaaatcattcaagagaatctccacactaattatattacatgcaactttgaaaagtaataactcatttcattcagctacattttaatagatgaataatacatgtgtgtgtttgagaaaacaacttgaatgtaaataattgatagaaggcagtaatttctaattacagctctgccattaacactcaatttatgatttagtgttaggcattatttatttacagacccagagagactgttttaaagtacttaagtatttatatgtggacaatccagtggatattttcttttcagaaccggaaaagagataatccagtcagcaactttattgagccacccagcctttcaaaagcttttcctgagatagtctcaatgctgcatcatgtttcagtttccatttagtttcaaaatattctgacaggacacagacagccctggctgaaaggagcacagagagaatacttcgagctcatgctgagagaaaaaggcgagtttgtcttttcttacctgagactgggcctgaagggagagtttcagttcttcattgacggtaggtagcatgctagttttgccacaagatactttgtgaagttcttcccagcactctttgggcttacccttgcaaatcagttccaggagtcctgaacttctcgtcccgctcatggcacattcatagaaagttccattgagcagagccacagaaagccacatcactggagccaccaatgagctcagagtgatctggccgaggacgtagaagaaacggcagctgtggcctctgggaaagattttcctgggattcacacagcagcctgtgaagagtctccacgacctattgttcagaaagaatcccaggatcagtaacacccaggcaggagcaaagaggaaaaccagcccataggtcatattctcagtgctgcaggggcacttaaaagccacaacagaaaagagacgctcacttcccacggtcagcagagccatgaagctgtagccaataacagttttctgattaaggaagaattttaaaatgccctgaaaagcatccatgttggagatgcacagagggaaaatgctgtgcctttgttattggcagagcagctgtggcagtggccgagggtggagctctttcttcatcagaaacaacagtccttctcagactgaattgagccagataaggaaacaatgtcattccttaggaatgaatatttctcaacatgtttagataatgcctcctactggtggaaattgggctgtgatactgcagcctaaatgctgagaataaattcaaagtgcacgggctccattttaaccttctttccatgtggtttggattgaaaatcagaaaagaaattctcactcatacaaataatagtctaggaattttccagtgtaaggaatcaacattaacagaaagaggtttcagccgacaaatcaaatctccaaacctagaattttatgaatgtttttctcttcctatgacttgagatttggaagacagggatttgctgtcttttttcatatatataaaaacatatgaaaattatatatatatatatatatcaatagcttttggagcacaagtgggttttggttacatggatgaaatatacatataaatatacatatatatatatatacatatatatatgagattttagtgcacccatcaccggatatgtatgtgtacccaatatgtatttttttatccctcacccccttcccactctccctctttctgagtctccaaagtccattataccactccatatgcctttacgtacccatagcttaatttccacttataagtgagaactacagtttttggttttctatttccgagttacttcgcttggaataacgcctctagctccatcaagttgctgcaaaagacattatttcattcttttttatgactgagtagtattccatggtatatatacaccacagtttctttatctattcatcagttgatgggtacttagattggtttcatatctttgcaattgtgaattgtgttgcaataaatatacatgtgcaggtgtttttttttaatatataatgacttctttttctttggatagatacccagtagtgggattgctggactgaatagtagatctacttttagtacttaaagttctttctttaagaatgaaagaaaggtgccgtggttcatgtctgtaatcctagcattttgggaggtcgaggcaggtggattgcttgagccaaggagtacgagaccagcctaggcaacatggtgaatctccctctctacaaaaaaataccaaaaaaaaattagccaggctcggtggcatgcacctgtagtcccagctactcaggaggcagagatgggaggatcgcttgagcccaggaggctgaggttgtggtgagccaaatcatgccactgcattccagtctgggtgacagagcaagaccctgtctcataaataaatacatagaaggaaagaaagaaatctccatactgttttttatagaggttgtactaatttacattcctaccagcattctacaagcattctgttttcacaaaattcataccaatatctattgttattgcctttttagtaatagccattattactggaataaggtggtatctcattgtggttttagtttacatttccctaatgattagtatgttgagcattttttcatatgtttgttgtccatttgtatatcttcttttgagaaatgtctattgatgtcatttgctcactttttgatgggattatttgttttcttcttgctgatttgtttgagttccttatagatactggatattagtcctttgtcagatgcatagtttacaaatatcttctcccattttgtgggttgcctgtttactctgatgtttatttcttttgctgtgcagaagctttttagtttaattaggtcccatttatttatttttggttttgttgcatttgctttttgggtcttagtcataaattccttgcctaggccaatgtccagaagagtttttattacgttttcttctagaaattttatggtttcacatcttagatataagcgtttgatccatcttgagtttatttttgtatatggtgagtgacaggg

SEQ ID NO: 585110 - DNA, 4001 bp, Homo sapiens
gaaaactaactggagataggcatcgggtgacagatgtaaaaatcagaagaatgatgataacaactgctatcaagatccagcccaacaccttaagaaaacacaacaaaatagtaatttagttacttggttttttacaagaaatttaaaaatcctcagataaagtttcaactactcgccagttatgatgatgaacaagcaacagttttaggtcttaattccttaagagtaaggtgtcgcagtaacctccctagccccccagtacaacttctcgtttggaaagtcaactgtagtccaagttatgcactatgattctgcccagggaggagcccataccattcccttagaactcaaaatgtggaatttctgcaaatcctgggaaagaagtgttcattttaaagaacctctgagctttctaagtccagtggtggctttagagccagacaaacccattttattctatagacccctttaattctaacaattctgctttctattggctgggcaaacaactttacttagactcagtgaagtcactatataggggagatacgaaactattacttgtaatggcaaaaccgcaattttgcacccaacagagctgttgtgagacgtaaaaataatgcaggaggtcaagggcctagcgcagtatctggcactgagtaggcgtgcccactctcactcccactttccacgattcatgtacagtgccagatactacgggaatgcgtttttctccttttcattcgttttattcagatattctcttgacggcaaattagatgcaaggagccattctagattttcttagggtactgtatatctggagaaaagtcaccgatttttccctcaccccagcggccctgagaaagctcggcctctcggctcctcccaaacgcccccagcgccagcggcagacctgcgactgagccttcagatccttcaggaggtcctgcacgtccgacgccttggcctggttgcacggcaccagcggcagctccgcggcgcagctgcggttgcggccgaggcacaggcgctgcgcgaaggccgcgctcccggtggccgcgcactcgtaaaaggcgcccccgagcagcgccacggccacccaggtgaggggcgcgagcgcggcggccgcgctgatttgcgtgcacaccagggagccgcgcagcgccgatccgcaactcgcgcgggcgctggagcagcatccggtgagcaggcgccacgtgcgtgcgctcagcacgtagcccaggaggaagagcgcgagcgccggcaccagcaagaagaccaggccgtagggcaggttccaggcggcgctgcacgggcactggaatgccacggcggagaagatgcgctccccgcccgccgtcagcagggtcaccaggccgtagcccaaggcgctgtggtgcttgacgtgcaggtccagcaccgcccgaaacttctccatgagcctcgtcccccggggcgtcgcgcacaggcccagatccttctgcctcttcgttgtcctgcttgtcaaatggttttggtgggatggggaccggggctttccactctgcgagaagcagcctttttttttttttttttaaagggaagagggcttctcagaccttcctaaagtttcactttctcatttcagccacaccacctctggttaacagaaccaggcaagcaaacacccccaggaccttgacttctctggcacccaccccattccaaaggcagaggcaccagttatcttcctcccccaattcaggaactctgacagaaggttgaccttgttcctttattaccaccaatctgacaacgaaccaggaaactaaccttcttgacccacggccgccagttggaaaaactgggaaataccagattttcctctattgcagccaccctagttactaagccagatcacagtaaaaccaaataattatcaaaaaactgattacttacgggaaacattattcaaggacaaatttctggttcctcttccataagctaaatcagcaaagtccagctcaagttctggtacttctatgatgggcggcaccctttccatctccctaccggacagagccaccagcctagttcacactgactcttctctcctctgcctgatctccttcaggacattagaccaaatatactgtattgatttactcgtcaatacaatgttcttttctttcagatatgtcataacactgtcaatgcctggaggagagtaaaattctgactctgaccaccaagctgatctgcacagaaggggatacatgattattcaaagaatgctagttgaacccaaaatttcaaactgcagctacatctatctaatgttgtttcctccaccttcagttttctcaagcagcgttgttctgacacaaacactgtaaccacttttgtgatattgagccttactctgtgtgactccagactgagctgaggtgtgcttgaaagaacatgggctttgaagtcaagtgcatcttgtctgtggtgtgtttaacaagtatgcccctctgagacacagcatccttatttgtaaaagaaggataatagtgcccacttttcaagattactgacatgagtagattgagtagcatatgtaaagtgcctttacatataggatatgtctgttaaatgaatgatcagtgtgagagttttccccttaaaatgcaatttggggaatagacaacaaataattacattgtacataacctaagaatcttgatgaatactgaattttgaattttaaacgaggatcaattcagtggatagtattaagtgactcaatgactctgctaccttaagagaattggtgtacaccttagctgtctgcttcaccacaaggagagtatctggatatggagcttgggtgggcagttcacaatgaaatggttcttattggtgcccatccaccaggcttgccttattttatctggaaagaataggtagcccatggaaccaagtgaatttttagagaatggacaagaaatgtattattcttttcttagtccaacttgccttcttaactactccctctccaacaccaccagcagggtgcctagcgtagtgccaaaagctgtcattccatagtgatgtggtaaatagacatcttttttctatgtgtttaggggccagccccagatgagggtcttcatggtcatgcaggaaagttggggccctcttctctgagattagaccagatactgctaggcttcctgtcaacttgcagcaaagttgcgtgtttgaagcgaatcacttctgctctgactgttatctttgtaatttgtcatctcccaagataaatttcttcccctgtgccttgagtaactctcctcttactgctggactcttcttcacctctaccataatactctaagatgtgtcctctctcgtccaccctttcccatattccatcatgcagaaacatcactatatccacaacctttgtgcagatggctttatccaaatctcccctaaccgaaacctaataaaaatgcatccttctgtcttcttgagtgagattaatttattctcccacatctctcaaaccaagagggatggctggcattttcctggttacctgctgatagccataccagggttttaccactgtgctataatagtttatcatccactgaggctcaatctaatcagcaccatctcctccttcacctcattcctatggtctgttttcattcccttcattttttaagactctaatgaagtccatcaccttctcttccctggcttctgttatttagtcaaggatttgtttgaaatatgtttacttacagaaacttttatctatcagcccccttccccaactagattaattcatttgttaaccagttattaattagttcatttgttcattcagtcattcatttaaatgtttaataagtactcagaatatgtcaagtacctatcaaaagtgcctggtattgctggatacaacaaggaagaagacacaggtatcctgccgtctttgaacttacagtagagatgatatagga

SEQ ID NO: 585111 - DNA, 4001 bp, Homo sapiens
gtagcacagtagtaagaggttttgttgtcatgtctgactttttaagtgttactttttgaaaacggtctaataggcacaatattcacacagtatccaaacaacattcaaaagactcggaagggcattcagcggtaggttagtcagcctctcgcccttgttccaagccacccaattcctctccgcctgcggcaatcaatgttatcagtatcttgtgtgtccctccaggggcaccctgcagttacaatcaaatataaactaaattatgacattccaggagcctgcctcctcagacaattttaactaatcatataaaacccgtcttgaactaaagtggagggtggggagggggtgccactatacccttaacatatgaaccagcacgaagaaccaccagatagacctttaacacgtagtcagctgaatgccgctgtgaaatctattcaccttttccagtacaataaaaaactcattgactcacttctgcttcaggctgttattttcccaaaggctagactcaaatataatgactcaaaaattatttacatcatttcattctgccaagtatcagaatctactctggacaagactccaacagggaaagccaagagttaaaacataaggagaaagaagagaagagagggcagaggaggacctgggagaagagttgtagcgccaaagcatcaagtaaactgaaacactcaacaccgtccacgcacgtcagtttactggtttaaaaaatcaaaaatcaaagaaataacgcgcgcccaaactcgtgatggccacagattcatggcatttaaccgatgcccctctgcccgctccccgtcacacccggcccagactgggtcaggacccaagtgcatctcgggtggtgttaccttgagcgtgagtggtgtgatcttctctttgttcaccccctcgggtaagaagtccaacaggcagtccagcacgacgtccttcacagtctgaaactccccttccccgcgcaggtcggcgcagaagatgaggtccaggtccttgtagcccaggccgctgtcctggtgcaggacatggctggctgccgagccgttgaggcgcacgtcgcggacgccaatgcgcttctcggccaggcgccgccgcaccaccttcacgatcaggctcggctgcagctcgagcgtggggaagttgccgcgcccgtgaatcggaatggtctcgctcaggatgccgtccagccgctgcacttgctcccagttcagcacattgcagtgcgccgtagggctttcgcaatagtccaagcaatgcccaccgaagctgccgccaccgccgaagtcgccgccgccgaagtcgccgccgccgaagtcgccgccgccgaagtcgccgcctagggggatgtaggggctgcaggccagctcgtcctcagacatggcgaagtacccttcaccctccgccatgtagtgcccgccgagcgccacttggccctggtcagtcctaaaaagaaagggaaaggagcgcggtgaggacgcgcggcggcggagagcacgcgcggcggcggagagcagaggcccgccaggaaaagagcgccccctcccccgatagttccctgaccccgggcctcctcggagactccctcccccggcccttacagtccccagccgcgcaccgcgccccgcagagcagccccgcaccaaaagtatctctgatgcatctggaaagcgcaagcgagagtcccgtctgtgtcacctggaggcggccgccccttctaggagcgcagcgagcgagagcgaaaccgagaggcggcaacacttccaggagctgcgagcgcgctcagacagcaaatagcgacttcgtctttcccagacccctgccgcctgcgctcaccactccctccccgcgacccctcctgcgccgctgccaccccagctgcggtggtcccgaactggcggctcttgctgccacacacgctcgtgtctctggagctttagcagttgtgcggggaaaatgtcttcagtactttttttataccgggcttctctgcgcttccggggcccagagcggcacgttcgccacaccctcctcatctgcatagggcgccgccccctctgccctcccccgcccgcagggcacgcagctgactagcccagcagttagtgcgggacgactgccggtgagcgtgaggtcctgggctgtatgtgcggatactgtgtgcgcccgtagatgcgtgtatttatacatacatttaatttatgtacgccccctcccacaaatctcttttcattttccccaggaggagacactttaaatgccccaggaatcataagtggtcatcaaaaccagatcacgactaaaatcctgcaactgcagaaacttcccaaaattctcgcggactcagcccgtctttagatcatcacggttgggctccggaggttcctcacgaccgctcttttaaacctcggtttttaggtagaccatttactccattgataaacccgatccaagtgtggactcatgagtccactcttgcacgcaaatcagtcacggcgcgtgagtgggaagggcttgttgataactgggtttcgattctcgaaacctcgggaagcgcgccggggagctctgggcgagcccgagaaggcgcgggggcggcaccacgggcctcgggcgtgcgcggctcctgcgcacgagtggctccaaggggccagtacttcgcgggggtcagggcgcgtcacggagcagacgcgggcgagcagccaatggccgaggactgggcgggccgagtgggcgcagagagcgcgcccggggagtgcgtgctgccccggagtccagggaaagggccgctaggtgtccggtgcctttgctgcgagttctctgacaaaattggaggcggcgaagcgcgttcctcgcggccccctaaagtttggccattttaagtgcatcatagtgtcagtggaatacgatttggttttccacgagacgtaaaagtaggagtttcaagaataaaatgaattctctcctccagcttcggtgacttcggcagagctaattctacgcacgctcactcgcgccaccaccactctttgctagaaagctgtggccgtctcttcggcagctcgctgcctccatcaactaacccggagcagctttcccagcgcctagacgctgccgggggctgaggtggggcagaggggagaatgccagggtcacagaatactccccaaaccctgctcagccctgcccgcccagactgggaggaaaaacagcccgcacctcctaactgggggagccccggcctagtcactcaagctgcgcggctcgggggtgaggggtagggtgcgggggtgtcacccgtggagcatccagctgcgtgacaacgccgccccctcccggtgccctgccgagctgcgtcccaaaatggagaaatccgactgtctctgtggcagaggccatcccctcagcgctgcgcctaagcactgaggtgcgcctggggactctaggacaactaccctgtccgcatagggccatcgcttccttcagagcacacccatgtgttcctctgaccagccatcggcgcatgaatctatcttaaccaggcattttatacatatatatacatatgcatattcttgtgtgagcatgtgtatagagagagcatttagtgacctgttacgtgccaggcaacaggctaagtgctgaagatttaagaatgacatttcacgtaatctagagggcatagcacctaggtgcataattatggttcagttgcatatgtattatgagagaagtatattctgacgcaatcgcgtggcgggctaactacataggaaacggagagacacccgagaaggtgtcatttggactggatcttgaaagaatggatgttctttcagtagtcggggaaagaggagaagagcgttatctacaaagggaagcgtatggagttggagaatgtttgaggaaggatatgtacactcccgtgattaataaatgagattggtagtgccttgagataaggtttatgagtaccagga

SEQ ID NO: 585112 - DNA, 4001 bp, Homo sapiens
gatgggcaggtccacctttgccctcaaatggttctgaactaggtcattgcagtcctttaaataaattaaccaaaaccataataataacaacagaaacatttattaagagctaagcgttttacaaatattaattcacttaatactcacatcaatcttataaagtaagtgctcttgttatttccttttacaggtgaccaaactgaggcatgggggtttaataagcttacccaaaactacacagcaaggaggaggctgtgtcgggaatcaaactcagtcactgtggcccccaagtccatgctcataaccaccaggtaaaaaatgtgcctcctattctaatttctgtctgacagtgggcccagtcatggtttcaatacagctcagcagagcaatgcagcaaatccaggtggcaacactaaaatactcagaaaagaccaaccaagcaaccaaagcataacatcagcaatagcacaaccaatgtgaatcatgagaaccctctgtctttattaaatttgggggaagaaatcaaggtcacgaaatcaagtgactggtgatggggcctagaaatgagtgtctccccccacccccggtttccgctctggcaggcgggtgttagcggatggtgtacttgtcccacttcttctcggggtcataggcctcccagcggctggcggggaagatgtgcttgttcttctcgtaccagctgcgcagcaccaccttgcccgcgtgcgactcgtccttctccatggtggcgtcgctgagcaggcgcacgtcatcgtgcacatcgaagctgaagagcggcccgctcttgcccctcgccctggcgatgatgaagtcgtagaaggtgtggtagtgcggcaggatgaggtcctccttgatgaacatgagctgctccacgccggcggagcgcagctccaggaagtccttgcgcagcccctgcagcgccttcttcaggaactgctgcaccgtgttgcccttgcgcacccgcaccgtgcgccggtggcccgagccgtcccagtagctgaaggtgacctccatctcctcgtccttcactttctcgcgctgcgcctcccactcttggcgcagctcctctcggagccggttctcctcctcctcgcggtcgcggtctggcaggaagctggtgtccacgtcggggttcttgcccaggtttccggcgcgcctggcctcggccgcgtcggcctggtcatcgaggtcgtctagtgcaaaggacaggcaggagatcttacgcttgcgctcgcgccgctgctcctgctcccgctgccgctcctgctgcagccgctgctcctccaggtgctggcgcttggccagctgccgctcgcgctccctgaccagggcctcctgccgggccttcatgtcgttcagggtcaccaggcccaccgtgctggacttcagctcggcctccacggcgtcgtaatgcgccgagaacctcttgtccacctgcgacttgaggatggtctcctcggcgatgcgctgcttcagcacctccatctgctcccgctgcctttcgcgcttcttgaggaggtgcatggcacggcctgcctcgcgcatggtgcccttgtactgcgccatggcccgcgcctacccgatgggctctgcagcaaagaggaaaaacgcggcaggtagaggggggcccacgcaacggcggggaatgctcagctctgcgcctcctcacagggctttcggcagtgatggaagcgttcaggggctgggccgacctgctagggtaaccaccaacctgacagtgtcaccaggcaccaatttccagcattttatttgacctcaataaatgcaaatgcgaacggccccacgtaacgggtggctgccatgcctgagcgcagcgctgaatttggggagctgcatacagagagggttgggctactgagcggacccttacctgcccaagcaccctgtcgagcggagacacgcgggagctgacctccacgagaaccacccacgagcagaggcccactcgccccgggctctcgcgacagccgtggacacaggaagtggaggcggtgcgccccctggcggggaggcgggccctgaggagagtgccaggctcctggtagggcggctgcggaaacaggaagtggaggtggatcgccccctggcggggaggcgggccctgggaagagctccgggctcctggtaggggcggtgctcctgtggggcgggccagcgcggggaggatcctggaggaggcgcttctggccctgcccagccgtggctggccggggctcctgttttcacgctgtgggcagggcgggcccccacctgctgtgcgtgcgtgctgagccttctcgtgcccaactgtaaacacgcagaagcaatgtgggcgcagcgcaagctgctgtggccacccagagagccttgcaacacggccctgctctccaaccctcctcctcccgcctctgatgctaccccgctgtggcgtctcgtgaacattacctgcgcaccactgcctgtaattctttcttatggccccaacacaaccattctttgataatagaaccctactcgccccccagtttcgtgacaaaacctgcactcagcttgtttgacctcttctatacagcagtttcccccgggttctaagctctaataaccatgggacactgagttaaagtgtagcagtgtctttactgtgagcctctaacatgccagtttccactgtaactctccaagagcagggcagaccagttcatgtttcgtgaccgtttctcccctgcaggagatctggtaacactcgccgaaaccagtgcttcctgggacctagtttggaaaagctggttgtgaaatacatactgcggttcagcctcctcccgcctaagagcaacaatgcctgtgagcataaccttaccaagaagcgtgaatcatatgataattacatatggcacccacatatccagaggagaacagcacggtgtgagccctcatcaaattgtccaagccagaaacctaggccttttcctggaatgacgttcctccacaggtaatcaattacagaagagcctttcacactttcctttttctcccattccccaccacttgccttaatctaggaaattagcattttttttaatctaaagccttctcattgttgccccatcaccagaatacaagaatatcttattttattgagctctgggatactgtgtgttttgtttttgtttttacaaattgaagatttgtggcaacacagcgtcaagcgcctactggctccatttttccagcagcatgtgctcacttcgtgttcctgtgtcacattttggtaattcttgcaatatttcagactttttcattgtgatatctgctatggtgatctgtgatcatcgttctgtgaggttattgtaattgtttgggggcactccgaagtgtgcagtagaagacaaagacgtttattgatttaactgataaatgttatgtatgttctgactgctccactgactggctgttccttcatctctcttcctgtccctaggcttccctagtgcctgagacacagcaatattgaaattaggccaattaataaccctacaatggcctctaagtgttcaagtgaaaagaagtgtcacacgtctctcactttaaatcaaaggctagaaatgattcagctcagtgaggaaagtatgtcaaaagccaggataggccaaaagctaggcctcttttgccaaacagttagctaagttgtgaatgcaaaggaaaaaaatcttgaatgaaactgaaagcgctttcctggtaaacatatgaatgataagaaagcaaaacagccttattgcttatatggagaaagttctagtggtctggatagaagatcaaaccagccacgacattcccttaaaccaaagcctaatccagggcaaggccctaagtctcttcaattctgtgaagctgagagaggtgaggaagcttcagaagaaaagtctgaaggtagcagaggttggttcatgaggctgaggaaggaagtcacctctataacataa

SEQ ID NO: 585113 - DNA, 4001 bp, Homo sapiens
tcatagccagatgtaaaagagcaaaattcctataggcaaagaaatgtgggctgggcgttttggaatgccattcctggagggaggtgtgggtgaatgattgccaatttttccgttctaagcttatcttcatagttgtgagcatttttcaggtcctcaaaagagttagtatctaagtataaattttctctttaaggtgtttgcttaaagaggaaacatctttaagaagtgaaagctgaagaatggggcctaagatcaaacttcaaggtgttggtggcctaaacgcctgccatcaaagtaacacaacagaatgataacttggtaaacagcagcgaagctcaatagatattcttcaaattgatttaagttgtgataaaaacccaactaatgattttaaatatttctgtagctagaacaacatagcagaaagacaacatcaaaatattaaccatgattacattctacatgactagattacaaggggttctttgcgacactctaatttttcttcagcgaacttgtattgcttgggtaattacacatacacaaaaaccttactactgttccttttaaaaaattactgaatagagttttttaaaaaattgctagacgtagtttcttgcggaaaataatcaaattcacgagattcttgagtccaaatttcctttatttaggtggctccaaattctaaaaaagcttttgcctatagcccaatctcataggcagcatttgaacaaaacatccatccaatgactagatcatccctttaaaatcgcaacctttacagttaaattccagtggataggtcaagtcatggaaaagctgcaagatgagaacagaaaactgagcagtgccaatggggattggaagctaccagggctccagtatcccgacttgggaaaaaagaaaattggaaaagggaatggagggttggagtgccaagtatgtgtgaggaagagtaagagagaaggacccaggccgggcatggtagctcacgcctgtaatcccagcactttggggggccaaggagggtggatcacctgaagtcaggatttcaagaccagcctggccaacatggcaaaatcccatctctactaaaaatacaaaaattagctgggcatggtggtgggcgcctgtagtcccagctacttgggaggctgaggcaggagaatgacttgaacccgggagacggaggttgcagtgagctgagattgcaccactgcactccagcctgagcaacaaagcaagactctgtctcaaaaaacaacaacaaaaaaaaaaaaaaaaaaaaagagaaggaccgagagaaagatagacagagagagagagacagagagagagagagacagaaagagagaagtgcaaatcaaagcaacatggtaccatgaaaaaccactcctggtccatttatttaacttcttccctagcagccctgctgtgctcaaaccactgtgacaggctttccttaaggtgttagacaagagatagcacagaagagagacaaggcaaaaaatttagtactattttccagcctaaactaaacctttattttagtcatgactttaaaaaatgtatttgcgggaatgactcaaccccttgttccaccccttgccttgtgtattccttcagtgcctaagttgatatttgcagccactacctcactcaggatgctttgtttttatcatttcaaaatactcaagtccttgcccaagctgggcaaaagtgtccagtggtgtcaaaacaaagcaaagcagaccggagagcctcctgccagaaagatgcatttaccttcaccaaaaacatcatcctcttcatcgaccaggagctcctcagcatcaaaaaactgcatcttggagaggacaggcgcgagaagcagcaggcagcagccccggcagtctcagcagtcacactgccgaccgaggtgatttcctttccttgggttgcccaagccctctggagggcagcttccgcatctgccctgaagaaagcagtttcattcatatgaataggcttcttgagccttgtgaagagtgaatcccaggtggggtaattctcaccactgaggagaaagaattttttgaagagggctgcagatccggttggatatgaatacagatatcactcaaagtctgaatgcaatgaattctatttcaaagcaacaactttcatatttccttaaagaggaaggtgggtgcttaactttcttgcttatgaatttgaacacaatgggttttgttgaaagagggagttcatatttctcatatcttggttttgcttcaattacaatttatctgaaagtaaagcaagccactatgttaaaccaaagcaggcatttagaggacagagcttttattttgctcagtaatagttgcatttttcttttcttttcttttctttttttcaaacctcttgcatttaaggattggaaactttacagcatttaaaccaaactgaaccatatctaggctttatgtggctcgattaaatctatagtcaatgaatagataactggttttggtcaaacatcttgcatttcacaatatttactcagtttgatacttcagactgtatcactaaaggagaaagaagaaaatgtaactcaaaaagcagtcctcccaaagggatgagtgaacactgagcttctacgcgagcaccattggctggcatcaccatatcgagctacccaacgtgtgccaaattctgtctggctgcacaaacaaacacacatctctctgagtaatactgagacttcatttcggggtttcccagagcactccactgtgttgtaagatctcttaggtggccagaagcttagaaaatgcaaatggagatgacagtgaggagctgttgacccaaggtgtttatttttggcactttatttactgcatggttttgaagatactcccagtgttaccctagagaaactgtcccctcctcctgtaactgcaaccttgaaattgcaccattttctcccagaagagactgtggacaacagggttggagaaatccagcagtgagaagggatcaccccagaggaattcaggaatcagacactgagggttaactgagcagcaacagtcagttcatccctgcattggtggctgcagcagttcccaaagacagtgtacagcttgggtcctgctgggatcaccaattgttgtcaatcagggctggaaccatccttagaggagagcttggaaatgtctggggtgttttgggtggcacaatgactgggggttattactggtatttaatgtcttagcactcaggggcccagggatatcaaccttaccataatgcatggaacagtagctcaacaggaagaactgtccagctccaaataccaataatgcccaccttgagacacactgacaggcagagaactggagttatccttttctctagctctcctttgcatctcccctttctgacccttttaccaccccctaccatgatccccacttgaatgatgtttctggacaagggttgcacttagttacataaattaaattaattaaaatgggcctaggtgtaggaaatttggatgtggactaaagctctcttttgtgtggttgggataagaggatgggtgtccattttgataatcactacatttctcaactactgtcctatgtcctttaatctccacaacttcatgaggtgggtgctattatcccattttacagatgaagcaatgggggctctgagggcttgaaaaacattcctaagatcaggcagctagtgagtggcagatttgactaattccagagctcactctgttacctcatgtctggacaacttatgggagtgactgcacacagtccagttcactgcagcatccccgtggctcttggggacctgcactacctccctcacctcccacctcagaactacctggttaccacgtgaacctgagggccctagctattccacttcaaaaagttagcataacctctgtaggcctgtttcattttaagtgggtggaattgtgtctcccctgttga

SEQ ID NO: 585114 - DNA, 4001 bp, Homo sapiens
acaatggcacaatctccgctcactgcaatctccgcctcttgggttcaagcgattctccagtctcagcctcttgagtagttgggattacaggtgcccaccaccacgcctggctaatttttgtatttttagtagagatggggttttaccatgttggccaggctgctcttcaactcctcacctcaggtgatctgcccaactcggcctcccaaagtgttggaattacaggcgtgagccaccgcgcccggcctgtgtgatggacttctaatgagaacaacacctagcacataaaccagggcttggctactggtggtccacagttgtcacacgttgcctcagaacattggtattacatatttaaaattcaaagaataaactgccaacatttaaacttgagagctttcacatagaaattagtgtttcttgcttttttttttttttttcgagacagagtttcgctgttgttgcccaggctagagtgcaatggcacgatctcagctcaccgcaacctccacctcctgggttcaagtgattctcatgcctcagcctcctgagtagctgggattacaggcgtccaccaccacgcccggctaatttttgtatttttagtagagacagggtttcaccatgttggccagggtggtctcgatctcttgacgtcatgatcctcccgccttggcctcccaaagtgctgggattacaggcatgagctaccgcatctgcctgctttttttgaaaaattggaaaatccaccaacctctaccccattcctcatggaaacaatctgatggcattgaatggtgggtgccccactatgatgggacacatatttccccatttgctgcaccctctaccactgcctattgctacctcatattgaggccaaatgtcagttgtcatttatcatcatgctttcactatcatttttctcacaacagagacaggaagaaagtgaactattccttacccctgtgaaaacagacccctttcactcattcttcttagcagcccagccctccacccatttgaatttgctgacatctgagataaataaacatctctaaaaacagacacacacaaatttgttacttgttcatgagaaatggtcttggcatacataggaaatgctttttcattctcagattactccagcactaaaaactcccttttggttagagttcctgtctactcagttgtgagtttgataatttaagaagcatacaattgggccctttaaaggaaatatgactcactgatccttgaatttcacctcatctagcgacactgctgataacctgtttgattcagatgttccatttttttccccactgtaataaacaaaaattccaattcacatgactccttgaccgatgtaaatatttatttgtattttccatctggttggagaaataaagaaaagaggccctgtggccctgtcttgctcaccacttgaaacaaaatgtatctagttacctctaattaggatagggctgggaaggaaataggaagagagagagtcggtaaaaaaataccaaagtccattggaaaacggagcacaggaaagtggaagagaggaggaagggggaaagattggagaagatttgcagagggcaagaaatgagtgtgttgcgggaaagtgtggaaaacaaaggcagagagtaggtaacaccagacgggacactcacggttgagctggcgcctccggatcctgtccctccatggcctgtttctgatccagtgtaatcgcgaaggtaacaccatggtcccaacagagcggcctaaaacctgctcatggcaaaggaacaaaagggtcttgcagctatcctggaagttaagtccagacgtataaaaatgaaaaagaaaacttaacccccccctttttgttcttttcttaaaaaaaaaaaaaagagtatttgaggcttccgttgacttcttttatcttgtaacttgccttgcctttccttcccttaacttccgactggcccgaaggcagctgctgtgctgggctgccctagcctcctgtgccatgttttatgcatgaagatgatggggcggtaatttattcaagcagagacgatcaccgggctcctgtgtctgccctcgcgtcagaggagccgtgcaatggcagggggagggcaggtgtgtctgactgcacgcaggaatgggctgaaatgggaatccctctctgtaggcagaaatgaagagcagagctttgctgctagagctgaatcagagcaacaccccttaccttttagggcgtatgatttatttactgctgggtctccggtatctaatatagtgcctggcacttggtaggtgagcaataaatatttgttgactgaaagaatgattcggtgataaccaacataagtgatttcatactttctttttcaccagttaatctgcccagtgcactgtcttcaaatatgtctatttgaattttctcacccattctttttctccacctacgatcacacttgcccctcacctactagttcatacttcaaagcctcattttacatgaggctttcctgaagccatagacatggggctgtcctccacgcacctattgctctcacctgcaggtggcccatgtctgcactgcccaaatttgttaggcgttttgtttgttctctgatttcttttaaagcacgcatccaggctggatgaagtagctcacacctgtaatctcagcgctttgggaggctgaggtgggaggatcacttgaggccagggcaacacagcaggaccctatctctacaaaaaattttaaaattagttggtcttggtggtgtgtgcctatagtcccagctactccagaggctgaggcaggaggattgcctgagggaagagttcaaggttgcagtgagctatgattgcacttttgctctccagcctgggcaacagagaaagactgtatgaagaaaaaagagaaaagaaaaaaaaattgcccacattcaaatactgagtaagcttcttggtggcgagaactgtatattcctctttctgagctgcaacatacaggggtttacatggggaagtggtacatcaaggggtggtttggggcagttttagtcagccccctaaatctccatcagctcctcctcaaaattccccaagtaaaaatacactctaactaaatacattatgttggctataataccacacttaggtgctacagcctcttccaaatatgtggctgaagactctcttacatagacattctaaagctgcccctggcaggggaagctcagtacattgattgcttactttgttccaagcttttcctctgtgcaatgtcagattgctccagagaacaaacagttattgatcaaggcctcaggagtagtcttgccctgaggatggaactgaaaaaagtgacacccaagttaccaaatttagcccaagataacccataaacttgctgatggcagaaactctgtcatttatcttttgtgtctctcatggtgccagaagcagagggactgggggaaactaccaagagatgggagtcaaaaggcttgtaattgcaactgaccaggtgagtgctttaggcacatctcttggtctcggtgtcttgttttcttcacttagaatgggaatgacctacagatttcagagttgtcaagaggaaatgagatcaagtaactctttagaagttggtaggatactggactggcacccaagagctcaggctccccttctgtcactatgtctggtggtaaagagagtgcattccagagcagaaatgcctgggtgcaaactcgtagcaccctatttagtatcttcatgacattaacatccttatgcctcagtctcttaatctataaaatgtgaggataagaatgagggccgctgccttagggttatgctgatgacttcatgagtaaatacatgctaaggactaagacttgtgtttagcatagaggaatttctcaatgttgtcagcagctattattaactagccatgtgacttcatgaaagttggcaaattccctgggcct

SEQ ID NO: 585115 - DNA, 4001 bp, Homo sapiens
tcatagcaaacatagtctccaaagtctgaatgcaatggaaaatgtgcttcaaaaaggggtggaaggaggggtagtgagaggtctatgcatatatcactagtttgtcctaaatcctcagccatcatccttgcaggaggaattctaaatgatagaaaataaactatagcacttaatttttagtacatcctttccatgaaaaagattaaaatggggaggaggccggggggcggtttgacaaggctgaatgcacacagaccctcttcacaacatcaaagttcacttccttggcaagctgcatcccgggagagaaccacacagtacttgcctggatcgcctttcctggaggccgctgaaacccgcaaaggactggcttctaatgatcccattgggccctccaggcgaaaaagactgggatcctaccaacatgatttccgggagtctggtcggtagtcctagaagacagtggaaagatcatgacaatttataggcaggttcagacagaagatgcactaagcttgtcaacaatgataaaggatgtaaagtaagccatgagactgttaagtgcttgtgaggttctttattatggagtgtcctgaagacgaagggttcaactctcaaaagaataaaaaagatacccatctatggccaggtgcggtggctcacacctgtaatcccagcactttgggaggccgaggcaggtggatcacctgaagtcaggagttcaagaccagcctgggcaacctggtgaaaccccatctctactaaaaatacaaaattagctgggcgtggtggcgcatgtctgtaatcctaaccactcgggaggctgaggcaggagaattgcttgaacccagaaggcgaaggttgcagtgagccgagatcgccccactacactccagcctgggcaataagagcaaaactctgtctaaaaaaaaagaaaagaagaaagaaaagaaaataaatataaattacacaaaattgtccatcactttaggtttccttcaagaatttttttttttaaaacaaggttcaaccacaccctcaaaaacatgaaaactgttgtaacatttatctccattcaacaacaataaaaacacacaaataggccaagtcaaagcttcagataagtcatgcgtcaaactgaaaacacagtcaagtcttaaggcggaattctacacctaggggtcataaagctaaaacactaggttactttagagatgaacttacttgaactagttctccctttctatctttaagaatattctgaaagctaagattgtgccactactgtgacagtgcaaaataagaagggtaaagggagtgctcacaaaagatgtgataatctaggttagataagaacacaagggcggtcggggggaaggtaagaggaaaatacagcagaaagcgcacaacttgtatttcagtcttttgcttggcttttgtaaggacttaccacaacagaccaagaagcattgtcaaaacacaacttcagctgagcagaagcccagggctagttcccccaaaggatgaccctgcaactgttaggtaattctattccttttagatcaggaggagtcaaagcacataccattgtcttagcaggtgacttcaatccagagagggggacaggctagcaggaaaaagggtaaatagttactgcccagattgaagactccaaagtgggcagacaacaaatcggtatgtttgcagagtgtcgacaattgccctttaaagactcaaagaaagaaaagctaaaaaaaacaacagcagcagaactctctggtagtacatccagatgtaatggaaagaccaatttcactagaccttcctcaaagctacgcgaagcagctcagcaaggaaggcagtttgagcgagttacttccccagagagagaaggacaaacagcctcctcccccatgttgctgcaggtttttaaatcccctccctccctctccaggagagagcagccctggagtttgtatgcattcttgcgaggtacaggtgctgactcacttggctacaggtatggcaatcggcttgctctttcatctgggtgagatgcaaatcccatactagctggggaggagcagcttacattttagggcattctccagaattttagaagtaatgaagaagtacgtatgagcagtaaaagtaatatgtagggcacaaatggttagacaaaatgcaagtgcagataaggttctctctggttacttctccccagcctcaaggctcaaaaaactcctaattctgttataaataaatttttgatgccacaaggaaatagcactcaaacataaatttaattttctcagcaaggcaatttttacttctatataagggtgcaacttatgaatggagtaatggtgagaccacacttggacaggggaggggcaggagttcttattcctgaagcatggccctactgctgtgtcgttcccctattggctagggttggaccgcacagtctaagctaattctgattggctattttaaagagagtaggggtatgagccacagtggtggggtgggtagtttggcaggaaggacggttaggaacaggtaactaaaggtgacttaggtcagagcaggtgaccaggggtgactcaggtccaacaggtgactgggatgagtcaggatgaagcaggtgaccaggggaacaaatgtgaactactgattaggactggtgggaatgctgtttactgaaactaggagcaaggagacgaagagaaccagaaagttaaactttaaaatggagaatcaaagaataggagacctgaacgtactgacatactgattctttgaagagaaacttggggttcactatatttaacaattcctttaatccttaatgaggttctcctctgtgctctctgctggttactgagaaatctgtctacatttctttaaggggatctttcttaggttcataaagcatgcctgtggtatcactgtatgccatgcaaacttgtaataaactatcatgctttcttaatatttctgttctttctgtactcaatttgacaaccaagcacccaccttaatgtctcaatttggcaaattttagtattctatcttattttgtaaattattattcattatatctattgtatcacagacactctttgatcaaaggaaaaaacttagagtattcgaaatatttaactatatcattatctcatacctcttagaaattatatttttcaagccaattttccccccttatccattggatcacggtagtttaaactactgatgcctggctcctatccccaggcactgtttaattaatatgggatatcacctgggtatggggagggttgtaaagtccccaggtgattctgatgttcaccaatgtttgagagccactgacttaggagttttgattgaacaatcagttgcactagtgataggcagaaaaaaaaagaaaagataccaagttcattgcaaatttaagacttctgttaaaataatctgctacaattaattaactccaactctttcattaaatgaattaaacgctggagagtaaaacatatgtaccagattgtaaaataattttccttcttcctcattttctgtaacaggtaaacaaggttctcaaaatcagaacaaatgtctgtccaggatcctaagattgtcaaatactttgggagggggaataatgctcagaaacttttcattaaatgtatggttgggtgcagtggctcatgcctgtaatcccagcactttgggaggccgaggcaggtggatcacctgagatcaggagtttgagaccagcctggccaacatggtgaaaccccatctctactgaaaatacaaaaattagccaggcatggtggctggcgcctgtaatcccagctactgggattacagaggctgaggcagcagaatcgcttgaacctgggaggtggcggctgccgtgagaggagatcgcgccactgtactccagcctggcgagagtgggggactctgtctcaaaaaaaagaaccgagaaactt

SEQ ID NO: 585116 - DNA, 4001 bp, Homo sapiens
gaagctagcacagaaagctaatcctgagtgctgggagatgggggcttcagataggggagttcctcaagctgctgttaccctaagttggtacatccctgcagtttgttcctacagaaggataactactgatgcttcctaattaaccactggagaatagccatgatggtgctggttctcggagagttcgtggctgacatcccctgcttgtgacagcagctaaaatacaatttgaggaaagtagatggtgtgagtgggcaagctcagaggctggtccaaaatggctggaggagcaaggggaagaggggaattgagtgagtgggaatacccgggtaggggagggaaggaggtgggtacactctcagagcaagacagacccgatagaaaacaaaagggaagaaatgattgtgtgtcagctaacaatcgagcagacgctcacacaggatgcccagtcccatagagatggccaagtacaatttcttcagaatgggggcagtgattagtcacaatcctagaccttctaccaagcgtgtggacgtaagagggtaggaagtggggagcagggaggaaacagccccaacatatattttatcataactgttttcccagattaaaagcttgaacatttttcctcagtcactcaagcaacatgtaggtatctccaagacagggacctacgagcctaccaatctcactctgcgccacccccatcccagcagaatcagcccggttctcctgcttttccacttgctctctcgctctccagggagctgtcacttctcacagcgcctctgccaccttagcacctgatgacttctgcttatctaatttcaaaatgcacctactcccttcgaacgtgaggggtctctatctgctgcccactgccctgtaagagggagctagaaggttatcgtctcgggcaagagagctgcacatgctccgcttgaccagccccctcccatgccacggactcctgctagggtgctcctgtcctcaggtgcatcccctccccccatctttccagacacagatcggcatcaaagcaacacattttttcctttcttgcccctcttcccaattctcatcctcccattccacctggccaatttggaattcagacacggtgaggaacgagctggttcatagtccagctcaaacgggcagcccgggggcaaatgaagacccttgagactgccatcccagccctgagctggattccccataggctctgcgagtgccgaagtcgttccgtgccagggggccacccaggactcccatctgggggcgctcgcacacacacccctccctgactcccggggcccggcgcttcctcgccccagaaatgtcccaaccccgggcaatgctgtgggcccctctaaccttggcccgttcctccactccccagggcatccttcagttctgcttgcaaaaagtgcgcgtgcccctttcgctcagcaacttcccgaccgtaccctgtgggcttcagatgcccgaacccaccagggtggtggaagctgaggacgctccagtttcaacggctgcttagcattcaacgctcattcaagtcgaggacacccctccccacacagacctcaccgcgttgtacgcaaaatcagaagcaaaaaaggagaaatgaaaaggtgaacctacctaacgacgacggctccttgtcatgtcaggggcacactcagggttctctggcatataaaagcctccgcaccaatgcaatgcccggagctgcccgcacctccggctttgcagacagcctgagctggctcacttgggtgaaggggaccccgggaggaagtcgggtggacgcgagctgtccccagcgccggctgccctgccgcgtccgctcgcagcagctgcggcgcgcggggtgaagttgcggggctggcgggcgcgagggtggcggagcgcggagctagagcggcggagcgggcggaggggcgggagccgtgaggagggggaggcgcggcgcgggggccggcggcgtcacttgtgctgggaggggagggcgggtggagacagctgcttgacagctacttcagcccaactccaggaggctgcgcttcggtgcctgcttccagctgatcgccggcacgccaggctcctttgcaagagctggcgcggcagctttggagtgacccgtggaatcgcgccggggagcgagcccggtggatccagcgcgctggagggagagggcagaggaaaggagccgaggcaaggaaaggccctttcagctaaccttttgggatctttcatacaagctgggctgtgcattgaaaaaaatgaggcggtggtgtatggggtgggggcggtgtgagggtgaggttggctgcccacggcaagggttgtgctggaaagccccgctgaagagggctgctttgtagggcactctctctaccggggctgctttggacacagctctcataaagatggcagaaagagaattgttttttattttgttctggtggatttgaatgataaaggtttcctgtggggaaagcatgggtctgcctgatagacagacattcccaaaaaagggccttttggagtggaaactgtatggaactgggagtcgacaaggacccagggaaaaggtcctgactcagtctccatccttacatagggattccctgctatgcctcagtctcctcatctgttaagtgatcataatgaataaattgtgtatttagaatatgttaactagaatagtaccacaagacacatccactccctcccacaccacttgagattcagtcaccttgtgaaaggatcagtaataatcagtgagctgagacattagccgaaagggaacatcctaggagacatgtcaacatgggaaacacccacatccagtcgtggtctgggcactgcatcctcgggctggaatacaagcagccagaaccatcgcctgataaactgtgtcataactcacctaggaatacaacagaaagggcaaaatcggcttgatccccagaaagaacgcccaagagcatgcctttactagactgtgagttcatagggcagggaccatctctgtctgatataagctgtccccagcacagagcaggcactccatagctacatattgaatgaaagatggatcacccagtcattctgaagcaccccttcactcttacattgatccttttatttcccttgccaaccccaccctgcaacttatctgcaaccacatagcttttgctcatttccaaatggccacatctattcattaggatccagtttaaataccttaatctgcatccatttttccaagatcccttgcccccccccttttttttttgccctttcatttcagagcttttatagcaccttagtttactctccagatgcctacaccttccaccttgtatcatgactatttgtgtagagatggatggttccaaacatttctctatttactggagtctggagaaagagacctggaaagaagtacaaatatgcagtagaagtttggggagaactgagtaaagcgctactacggattagcacagtactaatggtctcataggacgaatctggagggagaagggcctgacatccaccctggagagaagccaactgtatttccccaccttcccactcccatcaccttcctgactcaggaatggcactgttgtaagtgacatataaccttttatgagagggaggaggaagaggatgaaaagagagatgaggcagatgatgttaggtactttatagatattatcccactgaagcctgtcatctctttcccatagctgcctccacttaaaagataagactactgatactctgagaagatgaacaagtaacttcctgatgatcacaaagatgaagctagtgttgaaagtcagatgtgattccaaatcaagtgctctttttactacagcacattccactcccacccccaacttaccctattgggctgaggggtatcttgctgaggtttgggcatgactgtgggcatgacttgagtgtgtgtgtgtgtgtgtgtg

SEQ ID NO: 585117 - DNA, 4001 bp, Homo sapiens
ccaagattctggacacttaaaagtataataacattacattttggcaactcagtattgtataatgtaattaaatgggaaacaagtaggttagttgctgcaaggtgagtcatggtcaagaaaatactcagtgaatgaacctccaccttaacctataaagaacggtggacggtagaggaaataaaatagaaagattaataaaattaattacttcatcccaaaaaagtttagccagttagcgtcataaactcaagggcataaacgtaaaagacatcactgagtcagcaccagaggtgtggtttgtctccatctatacaatctctttcagcaactgttcaactggtaatgcttcccacaataaattctcagcatctgcggtctaaagcctgccagctttaaaggcaggatccacccagccccttaggcaggctctagagggtgtagccagcaccctaaataggtgtataccccacgtgtgcctgagccccaaaggcaagggggtggaatttgcaattggaaggtgtggggacttctacttttctgggaactataggaagacagagagaaacaaacgcaacaaagacctgcactcccaaccttccatcattctgtttcacattattctcattctccaatcattttgagcctcccaccgccacccccacccccactccaataaaaaacaaaaaaccccagttttctcttctaagtctctttcatcactctctcccttcctgttgcttgtcagcaatgattcagcctcagtcatggatttcctcggggctcttgcacttgttaggatgagaaagggaaagaagggaggtgcctgccagtaacctagcaagatgtttgtaactgggaatttggacataagctgttgagcattaaattctagcctcaattgcttgccacccgcacaccttcttcttaagtgttctggccgcctgagctctcatttccacttctaggtcagagagaccctataacttcaccgctccgagcatagacaacatgctaacctgtgtttccataacctcccagcctcctcctataaagaaagcgctgttgtctctttacatacctatgactcctgcaatgaacacaggcattctctgcctgtccattaaccttacacaggtaagtctccccacatatcacacagaataggccaaaagtctccaagtcccgttccaggagcaatctgctctaggcctactctcctcttctagatcactcaccaggatctagagcagtggttctcaaactttggtaggtacaggctctcctggagagctgctagggcacacagacccagactcaggccgacccaagtatgaaaaacacaggtcgctaccagtctgcactcagaaacgggatcctgtacaattaagaggttgtgtgaaaaaactgtcttttcaagttctgctccccactcaggatctaaagaacacccacgcccctcagcgacctaagctctcccaccttttcccggaaccccccacccccatgccctctgcttccaccctggacttcctcccacgagacttttcccagcggtctctcctcccgcttcccctcccggggtcctcggcgcactcctacactggaaaagaggaaacaaatgcagcctccacgaggggcggcgccagtcctctggggacccaaaccgactccgcccgagacaacttttcaaacttctcaactcactcgaacccccacgacaatgaaagaaacgtagaaaagactgaagcaactgagctttacaccctgtggaatttccaatcccgcctgcgctcccaagggagagtcccctatccctcccgtccgccgcgccggccaggggcgggtgaagccccgggcccccccagtaccccaagcacctcaaccctgcacccgctggggtcccgtccgccgaggtccggggcaagggagcccaaaccccacttacttgccccaagccgcgcgcaaccgcgcccgccgcacagcgccggccgccgaaggtttgcctcccaggaagcagcaagcgcctgggcgcgggcagggaggggaggggagttacctgcccagcgtcaggtccgcggagggaggctgattccggctcgaaccgcgcctccccgagacaaggtgcagcgctggagggggcgggagtggagacgggttacaacaagtcccaagtggtggcacgccaaaccccgaacagccagaaagcgctcggaacctgtctgaactcaaacaccctgctctctcccagcggagtatgaaaaagcctttctttcctgcccgccctcggggctacggggcaattacaagtcccgacaccctgctcctggtctggggcgaggagcgatcccggaggacagcgacgctcacctgggaagaaggcggatctaggccgagcggggccgtggtcccgtcctcgcttttccctgggctcaagaatgcctggaggagaggcctgggggccgcgggtgagagcaagggttgtagcaccttcgagagtgtggggcggattcagcccacagtaggtaattccagtgggcatcccgcagtgcagactccttctcagtgcctaagagtctttaggcttggagaggacgtggggagtggaaaagtagaagaaaaagtgcttgtgcctttacttttttatgtaaaagaatttcaaatatcatcaaagattttggtactgactctcaactgtcctagttacagatttgggatgaaaggatattgtttaaaatagggagatgtgcgtgaaagcaggtccctctaggtgggatactgcggagcaatgttacggaagtggagacactataatttaaacataaaatacagtaattaataaaatttattttttaatttccttgcctacacctcagtaaatctgtcatgagtatttataataatttgtgtaatcacgtagacttcaagataaagtcatttgcagcaaatgtctaaaatgcagcctagtactgtaagaatggaatttagggtagtaataggcatattttaagcgtctggcataatatataaattatcataaaattgaattgacccttaaaaatgactttcgtggcgattttgctccaaataaaacagttgaggaaaatgctaagccattaaggtttggatgaatccctgactgacgtgctgatttaaactgaagaatgaaattcgcattagtctagatactgaaacatcagagcaaaggccaaagacaggaaagtaaaagcaaattccaggattagtacaaagctaatcttccagatcttggtgtctggtttgtagtttcatttcttcaaaagaatgtagagaattgtcttgttttatgtatttattttttccttctgttcctaattttcacatctcactttttaatattttttcagttctcttcctcatttttggcatgcaatccattgactaaattaatattctctatgtggtacttaatatactggcgtgtttctacagcctttgagaataattctgaatgtctcttaaaggtgcaatacttatgaacgttttgagatgcacttatcctattgttaaaaatatcaagaatatttggagttaaatgaggcccataggaagtctaattttattaagatatgcactcatgctaagtcaagtgaaatcacaaagaaagaaggatatatctactcgagtgttcattattaaaagcaaacaaaagatcagaaaatagacgtggagagggagaatctattaaaggtattatgctatgtaagacctttccatccttaatgggatggaaaaatagataaaattgatctcaccccttaaggagcctagaaggtgggtgaggaatgtggacagaatttcacagaactattagaatttgagttgggtcccgactgatgagcaaacttgtcaggagaatgaaattgacatgtgattagatgctgaaagagcagagtaaaggctaaaagcaagttccagaaccacgcaaatcaattacctgatttggccatgggcatcacatggtt

SEQ ID NO: 585118 - DNA, 4001 bp, Homo sapiens
aggcgggcagattgcttgaggccaggagttcgagaccagtctggccctggccaacatggcgaaaccccgtctcaacaaaaaatacaaaaattagccgggcgtggtggcgcatgcctttagtcccagctactagggaagctgaggtggcaggacggcttgaacctgggaggcggaggctgcagggagccaagatcgccactgcactatccaggctgggcgatagaagcagaccttgtccccaccctccccactttccccctagaaaactgatttcacagataaatttgattagggtacccactacatttcactaggaattctaatgaggagaatccaggtgatcacatctaagtcacacaaaattaaacattttttagtacaaatcaaggttaaatattggcaattagtataaagtaaatccctgtaatccccccccacccgttttttagtttgttttgctttctttaaaataaacccagtgagtatcaatctgtcatcctaaattctgactgggatcagaggcatcaactagttcttgtcccatctatctgtggctaactaaaataaactaaaagtctaatagtttaaatagtaaactaagaagtgtaactaattcaaaatattctagttcacacacagaagcaaaaacaattacacaatatacaagatattgatcaaatgaagtgaagctttgacccaatcaaaacttcctaactccacttgtatccatgtcgatctccttttatatccgttcagttccactgtcctaagtagccaatgtctgaataattttcagcattaccagtcgagcccctccaaaagtgggtttgccatttgcgaatttagctttggccctcactgcagagcgtgaaaaccaaaggaagaggatggtttgaagagcaatttcttttcacgaataaacaactagtcccatgagtaagggagtcaatttggagtgccaggtctaaaggaagaagaaactgtattgcctccttgtacattttgggaatttagggcctggacaaacgatagctagtgaactgaacgggcaggatagtcaatcagagtagaagcagcagttacaggtctaaaaagcgtgccagctctaccccacaggcccccgaaaacccttctactccgcccagcctccacctcgcgcttctcacctgcctgtcgcccggtctcgctcgggcttcgcgaaggggctgcggatcctaccctcgtcactggagtggcccggaccgacgcctgcacgtgaggagcccggggtcccaggcccgcgactggagcaggggtgctgatgccggcagctgtccgcgggtcaggccccgcggccccggggctcaggaagtagaaggggttgtaatagcccagctgcgggggcggcggcgccgcggcctgggggactgcagcgccgcccgaagggaagctctgcggggagggctgggggctgcagtaggctgggaaggcggccaggccgctgtgccaggtgaggtagccgcagtaggactgccacagccactcgtgcacttgccgggagtactcgcgggcgctcagccgagctggtctctctcgtggcgccgcggcttcgggcgcctcgcagcccgcctgctcctgcagctctgcaccggagccggaggccgcctccccgcgcttcctgagctcgcgcggcggctccaatttgtcggctgcggcggcagccgcgaggcccggggctgtgggccggcccggggcctggggttcggcctgggggtcgtcgcgggggcatgggacggcggtggtaggagggcctctcagggaagggacgggctcgtggtcccctccgccatcgtcctgcccgggagggtggcctcgggcttcctcgggcccctcggccatcgtcgcctcagcagcaccctctgggatacctgtcactgctccgtttccctcccccaatggcccctccccaacagccccgtcaccaccgcagcaaccgcaggcgtcaacaatcccccgccggaagcggaagccccgcccctcaggagcaacgcccgccgccaggcggagctgggaagggagggcggggaggtgcgtctgcagtcccgggttcgggccctagtagtcggtggctggtcggtgactgggaccagaccgtcgcctcctcccttttacagctttaagtctgtgacccgaggcctctctgtatattcccgtggggttgggcctagttgtcctgggagaaactagatggatgaggagtatttccgagacaggtcccagggccagcgcagccttttctgttgcagaaccgcgactgttgttttgggatccaggccggagggtttgttgcttgtgttcattccagttaaccattagtactcgagaaggtggtacagaacgcatctatccccttagaagaaaagaaattaaaagccaaactaaactgggatatatattaatataggaaactaccactgagacataggaaagtgtattaaaatataactagtgaggtgctatgtataattcagaggaaggggaaattatgcatgggccagactactaacaaaaggctccaaagcctgggatacgctgagggcctttccataacagaaaatgaaaaggaacctaaatttgagactagatttgaggaaaggcacagttgcgctggagtagaaagcgtctgtctaccgcagtggaaagtaagttttcgtaaatgcagactagctccagggtgaggacagaatctagcttttaaatcagtataatctctcttcttttacatttgaaaatctctgcagcgatatgttattgtatccccagcaccatacaaaggacatacaagggccaaatactgtgggaatatttattaatgatattaatgatgatgctgtccgggccaaaggaaaacttccgcttcaccttctgaagtttcgctgaaagtcactgacaggaggcagttaataggagaaaagacatagacattgatttgaccatcgttttatgtgacacgggagccttcagaatgaagacccaaagataacaagggaaatcgtgtatttgtatgcttaggttcaacaaagcatggacagccgtataaaaaaatgactggacaaggccgggcgcggtggctcacgcctgtaatctcagcactttgggaggctgaggcgggcggatcacaaggtcaggagatcgagaccatcctggctaacacagtgaaaccccgtctctactaaaaatactaaaaattagccaggcgtggtggcgggcgcctgtagtcccagctactcaggaggctgaggcaggagaatggcgtgaacccgggaggcggagcttgcagtgagccgagattgcgtcaccgcactccagcctgggcgacagagcgagactccgtctcaaaaaaaatgactggacaaaaaacactctgatgcaaacaggcaagaaacccagcaaggcctatctggattctccttggcctgtctgcagcattcattccttctgggtatggaacaggaccctctggaatgggggctgtggcctacaacagttaaacaaggtaggtcagataatttttcttttccttctttttttttttttgacagagttttgctcttgtcgcccaggctggagtgcgatggtgcgatctcggctcactgcaacctccccctcccaggttcaagtgattctcctgtcttagcctcccgaagtagctgggattacaagcgcccgccatcacgcccagctaattttttttgtatttttagttgagacggggtttcaccatgttggccaggctggtcttgaactcctgacctcaggtgatccacccgcctcggcctcccaaagtgctgggattacaggcgtgagccactgcgctctgccagataatttctctatgtccaatatttgcacagaaaggggtgcagggaggttagagtaatatttttaggtttgtggctggctttgggaaagggtggggttttggtttctatgccctgctttgggaaagacggattccagtt

SEQ ID NO: 585119 - DNA, 4001 bp, Homo sapiens
gcgcagtggctcatgcctgtaatctcagcactttgggaggccaaggtaggtggatcacgaggtgggtggatcaggagttccagaccagcccagccaatatggtgaaactctatctctgctaaaaatacaaaaattagctgggcgtgttggcacgcgcctgtagtcccagctactcaggaggctggggcagaagaattgcttcttctggaggtggaggttgcagtgagccaagattgcgccactgcactccagcttgggcaacagagcaagattccgtcaaaaaaaaaaacaaaacaaacaaaaaaaacctaagtttaaaagatggctaatttgtggtggggaggatatttgggggtagagagatagggaagaccctactccaggaaattttaacctgttttagtgccagagacctgtgatcagaatgagtgttaaatgcatttgataaaatatctaggattataaaggaaatcaattgtgctgaaatactcttctatccaggggccccaggttaaggccctgccctctccttactctatccagaataagccagatagctgggcaaacatttctatagcttccaatttggggattcagacaagttctcctgacccatctcctgaaagaaattcaaagtggagtgtaggaagaaaatattggaactcccattttcccctatttatctaaaacataagaaattaagcattagaaatatttagcatctggatggtttccagcataaattatgggggaggggtatccaagaggagtggaaggctggccccactaggagctgaacatggcacctcacccactcatttttctgtgtgttttagttaactttgctagttaagtgcatctgtagatactgtactcttttttttttaagcaaaagttgtcctcacaaataagcacgtggcttaaaagaatgcctgccaaaaaattggagataatatcaataacagaaacacaaccaaataaaatggcagggccgacacctctgctcctagtaggaatccttcgtcagccacagagaggttaaaaaaaaagttcaatgtcatccaagagccagaaattatcaagaacactaaaatatggattcacagttaccattcttagagaaagcaatcttgccttaaagtgaacgttatgctttgaaaagcagagcatacagccaccaggatagcggatacgtattccaccatcacgttttaagtatctatttttgtactttaaaatgtacgtattttaacacatgtgtacactttatacataagtatacttacactggacgtacgagtccagttttttagagatggaagtacgcgatcaaaagtgatttgcctccacttatcatcactataccttacagcgaacagaaggcgtgtgcctcgagttcccggatcctcgatgtcccgcacacagcaagtgctcagtgaagggtgcccctgctcatagggtgcgcggcaggccgtcgctgaaggggcttatttcacctctgtgtgtgtcgttcccccgacagccccccgcctcccatacctgctaaggggccgcgggcgaggacttacagctccagacggccgtcaggcccctgcacgaccggctcctcccggcacagggcctcgagcaagcgaccccagtcgaagggctcccagccgcggctgcccagcgcccggagcacccccaggccgcgccgcgccccctcaggccccgcctgcagcgcctgcagcaggaggcgggcgggggcctccagctgcgcccagggcgccggctccacgccctcagccccagggagccccgcgtccggtgtcgccatgccggggcacgggtgccgcgccgccccctactctggtgtggggcctcagctcagaggctgaggggaacggaggactccagcgccgtccctgacgcggcggtggcgggccagctccagcgcctgttacaagctctcctcggcgttgggagaccggagaaacccggccgcccgaagccgcagccgttcccgcgctgtcggaaagggaaggagggaggcgcggccgggggcggagcctgaacgtgaggccggcgcgagggccggtcgcaaggggcagggccgggcacaagtccagccggagtaggtgggcggggccaaggcctggggcgtgcccatgggagggggcgtggacaaaacaagtggttagtttgtgggcggtgtcgggccagggagcctggagcggggcgggggcgggggttgatggaggggtggatccgccgctgacgaccccaaccctctccctttcttcatcactccccaaagtagtggaatggagtggatgtcaggggttctgttgtgctagaggacccgcgctgtatttacgctgacggcatgttgcttgtcatggacttcaccatagaatttgaccacaatttaccaccccacttagcttcatctcttccacaggccaaaagtgctatcatttgggtttcagtcctctccagaaatagtatttgatatacaaacatccctgagaatgacatggtcacagtaaaacctaacactattaatacggccaaagactttcttctgaacttcctcccaaagaccaagcagtaaccttgctctgggtcgtttatagggggccaggtgtggctccacttcctagggttcagtttaaggaagtccgctggagaacttggcttccagccaagggtgggatcactgcaaagcgtaggaaataagcgagaagagccccacagtgcctcctaaaccttgctttgggggctagcttgtatttcctgtcccagctctgctgccacacacagcccttcattcaggaaatgtttactgagcacctagggactggggatactgggaacaaaacaaagatcctggccctcattgtcacacaactggggagagacggaaagctaattaaacaatgtttgtgatgtgttcaaaaagaacataacaccgacacacagcacgaagtgcttttaaatagggtggtcaggcaagatgaatgtgaagatgaggttggcaagccagatagaagtctgtgagaagaccatttcagtcctccctgtggagggcgggggggctctggggcaaaagcatggctggaacggagggcacttgctggatagtaataggagttgagatcagagtgggaaccaggtcagatcttaagaggcctgaggtcacagaaaggagttgggctttcactctgaatagtatggaaagccatgggagtatcttgagcttgatctgatctccatttgagccaaaatgatttcaagggagatgtcgggaaagactagtgatatttcttagataatggctgctttgcaaatgccaaaatagcaagaaagaagtttcttccagacaccttctgtttcaggtaagcagctctaactttacaggggatgttttgggtcttcgaatgacaagctgttagaggagtgggacctgatgaatagcaggcagggccaagaatgctaaaaagcctgcaatgccctgtgcatcctcacctacagctttactctgagtggctgtggctcccacccaccaaggtctgtattctggccacctgaaagggaacagggaggaaaagttctaaacatggctcaaggaccctggtggatccccgagtccctttcacaagattcatgaggttattactattttcataatgcaaaaatgcactgtgaagttttccagaagctaagtgacaagtaatattgcaacagattgaatgcagaagcagccttattgcacttggcagtggggctgggctatgagcggaccactcttcagacaccagcaatgataacttaggtgcattttattggttttctttcagagtcattctacaaaagagcaaagttaaaaaccaaggccctggcaagagggtttgaaccttcctcattccaggagccctcccccattcctccatgtccccagctgtgtcactgctgcagttcatgggggtggagggcttgctacttttgcccccccaccaaac

SEQ ID NO: 585120 - DNA, 4001 bp, Homo sapiens
ttcctaactgcaaccattgctcgtactaacagaggactaagctacccaaactatttaaactatacatatttatttggaaaagttttatttgattacaacaaagttgagtaatttagatacattaattatgtacgttaatgattaaattccttgataattaggtagaaacaattgtatatagtaattattccaactttactctcaaaagcaaaatataataaaataatgtaatctttgctatttttaaaaaagccaaaataatcttcaagtttttccttttcactctgatagcattctctatcagtaacttgcattaatgttgtagctttgaggtgccgcatatcatttcatatcactggcacacaatagtgtatcaagagaaatcagctctgaatcttactctataacaatgtgcaattgccttggtcttggatcctttaagaaatagcaaagggaaaactcaaaaaagtcctttcaataaagcagaggctagatttgctcaatgacctgaccaaccaggaagtaatagaagttttgctatcctgtttaaaaaataataataaacaataacagacatgagattttcaagaaatcagggaggagacttaaagatatcttaataaaagtattttctcttcagtgccttttaaaaaatgtcattgcatcaggattagtaagaatatctggatgcaaggacaccaggttgcaagtacactaaagaatggtaaggtcagagaagtgttttttctgcctttaaagttcctgaaaatagaggctgggcgtgatgactcacacctgtaatcccagcattttgggaggccgaggcgggcggattgcctgaggtcaggagttcgagaccagcctgaccaacatggtgaaaccctgtctctactaaaaatacaaaaattagctgggcgaggtagcgcgcgcctgtaatcccagccactcaggaggctgaggcaggagaatggcttgaacctgggaggcataggttgcagtgagcccgagatcccgccactgcactccagcctgggcgacagagcgagactccatctcaaaaaaaagaaaaggaaacagaaaagttcctgaaaatataaagttgtttagacatacagcaggtatatcgtttcaaaaccaaatacactaaagcagatgagaacacaaccgtgaccaagtggttcggagaaagatggattttaatgcaaagttgttttgttttcacgcataacgtacttctcgctgtgcttgagtgcagaaaggtgtggttcttcctaaggttgattacataaagcaagattccaaaaacaagaaaagtgctttgcaaacacagtaactaggactggctgaagcttcctgcgtccagtgccatgctcaaagatcagaacaagcaactttatccaccactttaataagatgattcaaaaaagctgcagtcttctgaagaaagccatggttgaaaacttgctccgcttcttggagaaagcctaaagccctaaaggtctctaattattctccaaagtctacaacccaagctgcattttatgcatttattaggttacaaaaccacgggaactcttcactcaaaagcaaaaacacatccggaaagaggaaaaaatccacggccaatgtaaaccccctacaacaccaaccgcccacgtcgtaccccaggctgcaatgaggccggcactcacccaccgctcgcccgggaagcccagacccaggtgtttcaaaatcagaagtacggcaggctcgttcgctctcacgggcaagaatcttaaaccccaacttcagagatacccgcgcacgctgggcgctgccattttgacagaaagcgggcctgccccagaggcccctacgcaggtcgccctgagcagagccggagtgccacagaacccctagctcatcacctccacacccagacgtcgcatcccccggcctgaggaatgccaagaaaccccaccctgccgaccaggatcaggcgaaatcaagtcacccttgaaatcccgcaaactctctcaggcagcgccgagggcgaccgcagccggcgtgggaggggcatcggcggtcaggggcggggcgtcggtgcggcggccttcggtaacccgggcaacgcggcctcctggatgtaggaaggggcgctgcccccgaaacacaaatgtctccgccaagaccccagacggttcccaaaggctctccgtgatgcaactgcacgtccctcgaatgcctgggcctccgatatccgtccgccaggagcttggctggatgcacgggcggccagtcctcttatttccccgccctcccgccgcgtggagcggctgctgggtcccgagcctccgggcgggggcgggatcggggcggggcggaggcatctccctcccagcaccgcccccttagctgccccgagccctgcctgcgcccgcccccgaagcggcgcgggacgcctggcgccgtccgcgatccgcagggctgcccgcttaggcttaggcccggcccgctggcaaagccgagccgcagcattttatttcgttcgtggtttccgcacaggctggagtttcgtgggttgggtcgtacttgggacctcggcgaagaggacccgtttatttttttttctttccaaaatggcagcctccagtcgcgcacaagtgttatctctgtaccgggcgatgctgagagagagcaagcgtttcagcgcctacaattacaggtgacccagcgggcaccgggggccgggggcggggggccaggggccggggaccgggggtgcgggctgacgcggaatatccccggggactgggagccaccgtggtttgccggcggctgcgaggcaaggaccgggctccgccatcgaaaagcgtgctcctgcctacaggtgtggcctctgagacctcggggaggagcctttctttctaccaggggagacgttcatgtcttgtgacgttttccccctaaaggctatcttggtagttattctaggagcatgattagtgttatgtttctgcagaagagaaaaaagggatggaaatcagtcatttgtgaagttaaggccagtgtgttgcatatgtaaaacttcccttgagcactggaagagttgagagtggaagtggccagtgagtagtacactgcgacaaagctgaaggcacactctagcacctccctaaaatttcctaggtgtcgtaatgagttcttttggttgcaagaatccattctatttagggtatggtggaaatgcgtagcggaaaaggaaaaagggtctcacaagctttggagctgaaacctcagtttctcctggctcaccagacagagatcccgcttactggaccttgacagcaggatattgagggcctaaactcacatctttaatataacacattcactttttctcacgcctccccactcccctatttgcctatgagtcttttattgttactctttgtatgttttttctaattcagagcctctgctttcacagtgttgctggttctgacccatcattttcttatggattctctctctgcatttttttttagatttgttttttgttttgttttgtttttactaactacctgtctctctctgagtttgagccatattcccatgagaaagaatctggttggatcaactcatctctttacctcaagcctcacttaggtgactggccagactgtggattggatgtcataagagcagagcctacccttggaacacacctggttaggtaggcccccctccagcacgtgtgtgagctggcaggccctgagatgggtctgcccagtacaacctctgtcagaggacaggaacgctaagcctcttaagcaatgactctcaaatttttagaaacccgcctggaaaatatactcatgctgcaaatttgaaaacagcatctgggtcataccactgaggttgtatccacccagttaagtggttaaatttcacgggagagaatgattttacttaatgactttgactttggagaataaagagtgtaataataagcatactgg

SEQ ID NO: 585121 - DNA, 4001 bp, Homo sapiens
actccctccactgctgagaagcctcatggtttgggatctcctcaaaggctttagactagaatacaactgagaaacaactgggttaccatttaaattactgcccaaatgttttagttctttaggtagcttgaaatctaacttgaaatacagttctaaaactagcacaattaacaaataatctagagagataattctctttaaatttttttgtttggttcagctagattcaaggcaatgtgttgagagaattaaatgtgcaacaagcttaaaataaacttcctcaaatatggctaaataatatgaaaaccaatacatttctccaaacctaaatgatttcccaccctttcagagatgggaactattcaaaatatgtacgttaggccaaatgcctacattaggccatcacaataatctcctgggatccctgcaggctagtacaggtcacctatcactgtctttgtttataacctattgtgtaggattcctccactggaataaggcagtgtggacacatttctctcactttagaaaatactggcaaagagacattctgagctattgaaaactgggcttctggtaatcttccagtgacggaaggctcaaatgcatggaaattttaaccattaattgatgtatcaattagccaaacgactgtctcagtgccctgtggtattactctacccaaacaaaaatctcgtcccggctggatgtaccaacagcaggggcctccattttctggtatttccaactcaatcttgtaaacattctgcggcagcggatgcaactgtttacggcactgggcgactccgtgttgtgcccaacacacccatgtgctagcctgtcctactgctcacacaacaatgacatctaagcctgaagatggtgcttggcgttcaataccagataagcagagaaccaggttaaggctgcatcaaagctgcccaccactacacttggtcatgcatctttaacagggacccgcaggtttctggagcttttgcaatttttcagtcttttgatgttgacatttagggaagaactaacctttaggtaaaagataaggttagcagttaatattccagcattattacttataaacaaggcatttcataaaagtgtaacctatttctgcagggcccaattctattgttgcaaacacactgcacttagatcctcctaaggccatttcttaatagataacgacaagtgacccagagcattttgggagacaaatgtttttccctcccagcaccggtttaattctcctttcaactctaaactgcccctcacggccaggtgaccacaaatgcctttagggaaaggtaattgcagggcgcttgggcatctgggcagcttgaccgaggggctggcacgggcccctctcgcgccagccctgccctagccaggtgcccctctctgcgcccctgtgcggggccctctctccggctcacctaatgaccaggagttcgtggagcagatacgcagctgcggccagcaaagctcccccggtcaagtaaagggttttcttccaccagggatcggagcccagccctgccatgatcccaccgtaatcctgcaaagggaaagcgatgatgtccccataaaaggagaagggctcctcggacccggcccaccagccgaagaaggagatgctctggttccagctcagatccaccacgcacggcctggacgaagcaaagccaaccccccagtgcatgctgcgcggctggctccgggcgcccctcccagggcccgcgccgcccgcatgggaaggggccggcgcggcccggcgcgggctcagaggcgcgcggagggcgcgggcggcgcgggcggcggcgactgaggaggcggcggcgactgaggaggcggcggcagaggaggaggaggaggaagggcactggccgcggacggcgggcctggccggcggggccccagagccctgggcggcagcagcggccgccggctccccccgcagctgcctctccgccccgctctttgtgtcggcgcctggagaaggccgcgtgatgtcattgctccccggggcagggaaacagaggcgggataaagtcacctaccccgcgccctgccccctccccgcatctccgcggtccggccgcctccgccggggccggatctgcagggctgaggcgcgccgggcaggctccgcgcctccgggcggcacgcccaaaaaccgctcgccgcgcgcgggcaagggcggcggaggtgcctggaaatgcggccccaccgcgaggaagctgcagtcggggcccggatcccggtcctcccctaccccggccggccctccgcctgcgctccagcccctcccgcgggccccagagtagggaacgcgcaggactcacctggggcggcgcggagctgcgggcaggagacgccaccaggcgggggctgggagcgtgggccaggattaaagtcgggaatcagattgttctggccatcaggaaagcgctgcgtatttgcataatgtataaaaacactcttattacattacacaattacctcgggcttgaccaggtgttcgcagagacgagatgtctggtttggcaaataacaaaatactctacctagagagatttctctgacaaacccagttcaagtctttcctctttgaagtcactatcagggaactcgctgatacagggtttcggttgggggacgggggtccctcttttgttttagaaaatctgtctaacaactgtgtgtgtgttcagtgtatttttttcctttaacttcatttattaaagttcataagtacaaagaatagaagcttgtaatatatgcacagattttaacaagagcatggatagttttaaattgtttggaagaactgaaaaaggattcgggccgtggaggttcatcactctcaaggtggaaggatgggtaaaagaaacctccaggctcttgcctatggagcagagattgaggcgcaaaaggactccccctttttttcctctcctgacacacccgccccttagaacaggcaaggagtgtggtcgtcttgttaataaataataaatatggacgtgtcgcctcaacgagacggggggaggggctagtcagctgatgcctaggcaccagcatgtgagactccccaaacactcctgggaaaatgtgacctcccaggaagaagtaatgtgtgtggttctaagtgaggctcccataagtaggttgcaaggagtgaaacccaacggcctcctggggtgactgaggtggtcaccagccggtctttcaaggagagaggccagaaggctgcctggccttgtcggcaagaagcagagtagttaagtctgggaccaaagctgcagtgctctggaagagggaacaaggagggctggcaccagggattctccatgctccttctgtgcccttcccacagagcactcagtctttgctctcagtgaacactgagccaatatttaaagaatataagtttgatatttgggatcacattatttgcatatctaggtctagacatggggatgggcataaattaccttaagtggaagaatatggaaggcaaaagggagagtcaatcctgacaaaccttatgcccaaaacaagttagaacccagaggaagtgtagtatttttatcccagaaagccactgactacaattcactctcactcatagtgacctgccccacccactcatgcaggccaggggcccactgctgcttcctggtagtgtcagacaactgttgagcatcatctggtctctggttcaaatatggtttacatttttagagacactgcagtgaacatctttaagaagcagatgtgggctgggcacaggtggctcacacatgtaatcccaacactttgggaggccaaggtgggtggatcacctaaggtcacgagttcgagatcagcctggccaacatggcgaaaccccgtctctactgaaaatacaaaaaattagccgggagtggtgacgagcacctgtaattccagctactcggaaggctaaggcaggagaattgctt

SEQ ID NO: 585122 - DNA, 4001 bp, Homo sapiens
ggcaagaggtaaagaaagggaatcaacttgcccccactaaatgtgttcatttcaaaaatatttagtgatgtctacaatatgccaggcatcgttcaaatccctagatattaaaacacattataaacctagagcaataagagcatcacagaagccaggatcaccacagggagccaaagaatactagaccgttcagaaagtcccaagaatacacgggaatttagggcctatggtatttataggactgatcagcagggaaaaatagaattccaacaaatgatgatggagtcactaacaaaattataaagttagagccttcttatctcacattaaatataaataagatcattaacaatactagaagaaaacggaggtggatatttatatacaattcatgtagataaaggccttttttaaaggacactgtgttagatccgcgaagttaagatcgagaatgttaaccgcagcaacattaagaggatgagactaacacagtaaagaaagaaggggcagtttttgttaactgaccatatgtgcaagtaccatatgtaccattgtacagagtactataatcgcattatttcatcacggcgtgagtaaagaaattatccatcttacaatgagttgacttatctgattttcaaataacagaagggaagagtttgaaaatgcagagttcagaaaagccaacttttggcgcagaagtttaaaacaaagttagtactcagaacataagtatggaaagaagaatccaattcaaggaacttttagagtgcctactaaagcataatgcacatttccctcaagtccttaatctgataaaggactattggagcgctgatgactctggatgaatctctctctactcaaccaacagatacaatatgcggtacaggataatggaggcaggaagtgagcctgaaagaaaaaaatatatacctatagctgaacttaagaaaccaaggagtgcacgcaagaaccagaaaaggcagcttgtgtctgtgaacagaccaaagcaagcagagatccctgcacctggtggtaatgtgccctccggagcacaaagccagacgggcatcctgccaacgcaactacctgaccacaggcttataccatcttcaccttctataatagttatttgtatactgtatttcaatctgtgaatgcatctcgaaggtttgtggcaatgattactgggaaatcaaggaaatccaaaaccacccgttataaatatgtcgacaaggaggccaagtagatggtcatcatcacactctaggggcacccctaaacctaaacacagaaacaaggttgtagctgggcaccctgtagcagtcctgaagaaagaaaacaggcctggttaggcaaaaaccatcggatgtcagagggaaatcaaggcagcaggcacaggaatcacaagcacaggcgggcatgtggccgacgcgtggctgccggcgcagcactgagcgcgggtgtggggcgacccgcagtcccccgcggtgtaaacaaccctgagccgcgcacacgtccgaacgacgcctcacagcctgcaggcagactgtagcgtagaaagagcccgaggcacgtcagcagttctcaagggccccagcaagccccgcaagcgtgaagcggaggcgcgggggcgcggggccgcgggcggggaggggcgggcagcgggggcctctgccaggcgtccagactccccaaagcgcggagctgcgcgctggctcggccccggccccgccccggcgccaaaggaagaagacagagacccacgggagggagaagtaaaggaagggccgtaccctgcagggtccgggagaggcgcgcgccgcgggcttcaccagcgaccaggcagcgcgagaaggcctgggtgcgggggcggctccccgactctctagatgcggcacaaccgccgcaagcccggcctagcgcgacccggaaggaagacgcggaggccgcgaggagcggcgggcccggggaggcggggcggagccggggaggaggggcggggccgcggggttggggcggggccggggaggcggggcggggcctggagggaggcggggcggggccagaagcaaagccgggcgtttctcccatgggaggtgctctgggtcctacggacagcccgctcccaggccagggggaggagctttctgctggcttcctagctccagtggtgcccgtgtaaagggcctaggtcatacacagcgggtagtgtctacaaatcctcttcggaataatcccttccgagtaccggctcgccatgtgtagtgtggtcctacaaggacttcttcagtccagacttggtggatcagatgatacataggtaatacggctggtacgcatacgtagaggaaaagtataatatacattatatgcactctgaaggtataattcacctagtttacaaacctcctcttccctgcatacaaatcctgcctgcaggctcatttccataccaacgttcagaagcctctgaccattacctctgatgaagaagatggtctggcagcctctcttactcattttgatttatttttggtagattcagtatggcactttatttatttatttatgtattttttgagacggagtctcgctctgtcgccaggctggagtgcagtggcgcgatctcggctcactgcaacctccacctcccaggttcaagcgattctcctgcctcagcctcccgagtagctgggactacaagggcgccaagctaatattttgtatttttagtagagacggggtttcaccatattggctaggatggtcttgatctcctgaccttgtgatccacctgcctcagcctcctaaagtgctgggattacagccgtgagccaccgcgcccgcccttggcactttttttagtttgcatcatatttatcttgttacaaaatatccactaagatggaaaatatttaataaaatgttgaactacacattatttgctgtctgaatgctccaatgaggcaaaccagtaaggatatttacttatatatgaacagaatcaatatatgatatgcaatatacattgtatacaaaaaaattaaaatttttattttcttcaactttttgatgcataatagctgtacatattttcagggtatatgtgataatttgattcatttctgtaatcaaatcagcataactgggttactcatccccttaaatatttatcttttctttgtgctaggaacattcaaattgttctcttctggctattttgacatgtactattgataaatgttagctgtagtcaccctactgatctatggaacaccgggtcttatttcttctaagtgtatgtttcttctaagtgtatgtttacctccccttgctcccccatggcccacccccccaatacttctcagtctctgagatccactttctgaactcccacatatgagtgagaacatgcattatttgcctttctgtgcttggcttatttcactcatcataatgacctccagttctatccatgtttgttgcaaataaaaggattttgtggagggttttatggctgaataatattctattgtgtatatgtaccccattttctttatccattcatctgttgcgcggacacttaggtcaattctaaatcttggctattgtaaatagtgctgcaataaacatagaagtgcagatatctctttgatatatgtatttcctttctgttggatctatacccaatagtagaattgctgaatcatatagtagttctatttttagttttttgaagaatcttcaaacagtttttcacagtggctctagtaatattcattcctgccaacagtgcacacgggttcccctttctccacattctcaccagtatcttttgttcctggctttttttttttttttttttttttgataaaagccattctcactggggtgagatatctcattgttttgatttgcatttatctgatgattagtgataaggagcattttttcatataccagttggccatttgtatgtcttcttttgagaaatg

SEQ ID NO: 585123 - DNA, 4001 bp, Homo sapiens
tgtatctaacatctagctacctaaaatatagaagcaacttgtctaaggccaatctcctctatttcatcacactgaatttgaatttatattttatacagcctttgactcaattgttttatgtcaaaaaattctacaaatacaatgacattccataatatgtactaactccttctatcaaataagcagtcttaggaactgaattaaaatatttatccaaaatcatacagaatagcatagcgcttatccattaaaatattcacatcttagaaacatgttatatcaaacagtaagcattaaccaatgcctattttggtgaccttaaagtacctctctatacacgttagcattacttatataatattgctttttaatgatatattaggacactttttagaagaagtctcccaatgctagaccgggagaaatactggattgaaattaaatacctagtacacttggtatacattaaagtttgcctatattcgaaacttcagttctcttacagcattcacgaaactccaccatttccagaattaaaaaaaaaaaaaaaagttacgtcacggcattaaagtgctaggtaaaaacaaattggcaatttaaaaagtcagcaaaacaccatgttatccccaattaaacttttgtgatgagaaacagtgactaagcatgaagaagagtgattcagcggaaaccgcatattgaaatctaaccctctgaaaaatcctaaaggtttattttatgctactcttttccttttgccatgtcaacaattggactgctttggaaaaccttagtatgagcaaatgcaaaacctgttaatataatttccataggtctctaaagaacaaacagtattgaaatttagcaaatggaaattaaaatttaaaaagtttgggattttgtattaaaagattttaaattaatctacaccgatatcagaatgcccataaataacttcatcttggatcagagtcaacgaagtaatcatggaataaaaggtcaattcgttcccaagcatcttttatctgggacttacaacagggctcaataagaaaaacaagagaaagggagagggaaatggagtactaggacattggtaaacacatactgttttgcctctttgcctctatactcccaaatatacccgttaaaaacatactggcagattactttgaattcagcacgcgctctataaaccccttccaagcaaaggagttccaaggcgcaggtcttggaacaacacaaataacctcaggtctgcaaaataaggaagttcccctttaataaggaccgaggctaaggctaagatcctctcacttccatgaatggcaaagttaccaactttgctcatcccgtgcagacagtggatgatgcctccccagtcttactttaagccatttgtccccaaataacccaagtttctaaaaaccagacggaacgagaagcttagggttccctaagtttaactcctccttcgtcccttcccaatacaaagacacacaaactgggggggacacggaggtcggtgccctcgaggcttaagtcgccatttgctgacctcaacggctggcccggcatgcggcccggcgaggacacgagcgcggcggacgccctctcagggcgcccggacggccgacccgggacgcgcatggaccggggtcagccgcctttcctctgctccaggccgggcccgtcaaccccacggccgccagcgccagcgcctcggtcccggccgcggcctcaaactgcccggccgctgccttcgtccccgccgcagcgcggacggcgccggcctcccctgcgggcctcccgtcactcaccggccggcgcggccgaaccgcggcccaggccctagctgccctggacgccgtgcccagctgctccgctctgtcccggcgacgctccgtaccccacacagccgtccgaaccgcctcctccgcccctcttccccagccgggccgccgccttttctcttctcccggcctgctccagaggcagccaccctcctcgcgcgccccgccccgctgcgccccgcccacccggcccggcttctgccgacagctgggcggggacgcgcacgcagtcccggcggggacgcgcacgccgccctctgaccccgcagcgtcgtggctagagtagggtctggagagagctcccactgtggcgagtcctgtcgttggattcccgcggcgccccgtaaggctccgccccggcggtgctaccaaaccctgttcgattttagaatcgtacattcccagagggaatcctagacccctcattttacagttgaggaaacaggcccaagtagcatgacttgttcgcgccgctagtcgaaggagcagcagccccgatcccttgactctggggcactgctttccctttagctcatttttggaggaaatgggtgcgcccttgctcgacctttggtgattgccgccacaggccttcccgccggctaactcagcgtgcccaagtcccgtgacttagtgccaggacggtgctgtgacccgttatcccctgtcgggttttacctccccccgggagagctcagccctggatcccggcgggcggcggagcctctctggagcccggacgggacagcccaccagggtctgcttctgtgaggggccgaggcgtcattccgcgaaggtaattagctggggaggggacttgaagccgcttttgcagtgtaccttacatatgactggggagtaaagaaatcccacagggctgtatcaaagaatggatggatgtccacgcccccgctaccaccaccaagccttggtctacggccgagggacagtgattccgagctctgggtgttgggagccgctcacccgcccccacccctctgtcggggactcctgcccaccccgtcgcaagagaattacaacaaaggaaagatggttgtaatcctggcagtggggatgggggcagagccaggaaaacactgttgtcatcctttttgtggctgcatctttaccccttgctgttgtgctttgggaaagagagctcacacataatttgctatcctacagagaaagcctgtgggtttttcagatccgtaaattaaacaaaacaaaacaaaaactgagttaggaacttagattacagagtaaaggttgattccttaaatgattaactttttgaaaaattatctgttccccttattttgcctgatttggctgtagacaggctctggtcctcggttcagaccttgagagccactgtccagagagctacatggtcaggatggggaaacaggcaggatggcccagtgggagaggatgtaggtgctgctacactatagccccgctcaatgctcactgtcctggattgagtcacagacctttgttttgctttagctgtcctcttataaaggatctaaaatagattatctctagagccctttccagctttaaaattctgtgaatctctaattatacttattgagatctggggctttaccttttactaagtcacctagctgacactaggtcaccctcactcgcctgaagttgagtcattcaggttggaaacctcattgtcttctttgtcccttcatctcaataattttccatgtccagacaattatttaaaatcctttttttctttcaccttcatccctagttactgttaaatcaagtttagcctaaagcagcctccttacatattttacgttcagcctaaaggtttctgtgtacaccgtgaactataataagtggaggagtaaacagaccatagcccacacttctgtcaatcattgagtttggccaatcaaatgtagccagttgttcgaaccttgttcaaataaggcaaaccccaacctgtaaccaatccagctgtttctgtacctcagttccgttttctgtatgtcgctttccttcttctgtcctaaatcatcttccaccatgtggctgcgctggagtctcaaagcctactctggctcaggaggctgcctgatgcgtgaattgttcgttgctcaaactcctttaaatttaatt

SEQ ID NO: 585124 - DNA, 4001 bp, Homo sapiens
agtcatttctttctgaggagcaaggtagtaaagacaattagagttatcaaaaaagaaaaaaaaaaaaccctcataaggccatcaagcttcagaatttcgatggtagactgacgatccaggatcttctagaaatatatttaatctattaaaattaaaattaagtatttttttctagagttcttttttaataatagagtcattacaaaatagtacaatgccgaattgctaaattttttcattttgggttatttctcaggtaaaaataagtgcatatagattttatttagaggtagcaacaaagaggataaaaataagcatttgagtgcattccattctctgcaagctttgaaataaaggactatctaattcttcatgagttatcgggaaaaagtcaccaattcttcgattcttacaaaatcatcttaatactatggacaaattcaaggttcgtagtaaaaattgctttttttaaagtcttccctttccactccaggccctgagactgggttaacgggcaaagggagaaaaaattgggaaaaagtaacgtttttgtttggatgtcccagttgagtttggtccaatgagttgggggggtgtctctccatttggcgggagtggggagggagaccctggaactcctgagggatcggtggggctgcccctcagggcgcgggacacgcggaggaggcgggagataaccgcgagcgcgatctcccgcgcccgccagcaaggctgggaccgcgaaaaatcggggaaactgcctttggctgtgagggtgcggggcagatgtagaaaaggggcgcagggggagaaggtgaggcacctggccaggccctgggggcttctcgctcgcagccctgtcaccgccgggggccccggggtgggggaggggaggggcatttggcgcctattcaagcagggtggggtaggtgggtcttccgaggaggaaaaagggcgccctgggatgccacgacccgcacctcccggggctggagtccacggtcggcgtgggtggcgggaccccgcggcccgccatcccgcccctgcacatctggctcttctggcttccccccgacacccagccgccctcctcccggacccaggaaccgctgccgccgcccgaggccgggcgtgtggcatggccgcgcgtccaggctccgagggacgtcgggtcagggtctcaggctgcgaccctccccgtgcacccctcctggcgtgcgcgcccccctcgcgaccgctcccctcactcactatccgagggtcgagggcgcccggcggctgtcactgcgctggggctggcgctgcaggagcagcggggtggccgtagggcgcagctgcaggggcgccggctcatgccagccgacgtggagtctgcctcaggtggaggaaccgctccgggggcagctgagcaacctgcctgcttcacagacctgtatctcttaaaaggcgccagctggtacttttaaaatctttgaatttggtgcctaaatccgcgcggtccaatgagacgcgtcgcttgcatgcgcgcaccaataggagggcagtgggtgggggcgccctcgtccgcgcccaattggaggctgccgaggcggggccgagccgcgaagcccagcccccttccagcttaccggctccccacgtccggaaagatgctacggccgggggcgggacctccgagcacggggaggccgcggcccggccacacgtgtggagggtctatcacgcatgcgtgcgcccgccaagattccttccgccgtcttctggaccggcctcctgcaagtcctaatctcagcccaaattcagcgctggcttccatctggagatctttgatgggtacaaatggtagccgactttcttcgatcatctctcgaacgggagttcggtgagcagcaactcggctcgtccgggaatccagactttccggaagacggaccctccccccagtccagcttagcccgcctctctaggatttacgcgcgcgctctgctctccctcctaactcgaccctccccttgacccacgcctctgcgcaggcgccttggcgggctgtggctgcggagttggcgggtcggcgcctgcgcactggagtcccccgcgattttttcctccggggtgggcgaggaggctgtgcggccttccccagcggctgtagcaggagacctgcggctgcatctcccagggccttccggcggggccgagggtaggaccgaggcacttcttccttgcaagcgcgtttatttgtattttcaaccacacttcagacgctactggtttataggaacgttaagtttactgagtgtgcagctacgctcccctgggtttttgttcctttccttaaagggccaggtgtaggagacagtagtcctgctcccaaaaaaagaataaatagaagtgcccgccctcttgggctggacccccgtggccaagggagtttttagtgatggctggcatggacgtcagtatgaaagtgtaccggagtattagtgatgcttaacttttcacaatttgaatatgcacttaagtagggcagtgcattccctgaactcagctttatggctacagcccagtgaagcaacgggatgtgaactccaaaacggcgaatcctcctttgctgtttccctctggtgcctttctgcagcctcggagtgagttcttggctgtagtcagttttcagtaccgttagtgacgagtccggtggggcgcggccaggattaggatgaatcatacaagtgctgggtggatcctgtctttacctaaaattttgataattagttgtggggcgcggccaggattaggatgaatcatacaagtgctgggtggatcctgtctttacctaaaattttgataattagttcatcatgggttttttgcctttttcatttttaaaaatgttaaaatagtgtcactcttgatgacttaaatttttttcatccccgtaaacgcacctgaggcctgtgcttccttgcctcaccctaacctggccctggggctagatcctggagattcagggttgaaaagacaaagtcctgtcctttagggagtttacagagaccaatgggaaagaagttgacagtgaacaatttcagaacacgaaagaggatatgaaagaatgtaatcgggggtagagaatgcagattagtataggttaaggattttggatggtcaggacgctttctgaggctttgaacccagatgcgttgaactggcaatgcagggctgcataataagcagagggaataataagcagagggaatgcctgactacgacttagtgaacaagagagagaggagatgaggttagagaggtaggcagaagccagatcctgtgggaccttgtagtttttccatgcagagtttagactttcttctgattgcagtggttagctgttggaaggattttggcaaggtagttatttgttgatagaatattgaaattataatagcttttttatgtaaaaaaaagaatgtaaatgttagcctttcattctcacaataggttagcattattttcagtgtacaatggtcgtgcttctcagtgtgagttaattctcactgtggctaccaaaaccacacagctagtaagcggagattcgagtgcccgtctgcaggattcaaaaagtccatgtcctttcctcttatgctatgctagcctataacactatctgctggagtcctggttggttttagtacatttcacattacttcacagtttgaccttagagataattgtattcacctcttctattttcagatgctggcataaatacaaaattcgaagcaggcaaggtttctcattacattagtttttatttgtatttttttgagactgagtctcgctctgtagcccaggctggagtgcagtggcgcgatcttggcccgctgcagtccctgcctcctggttcaagcggttctcctgcctcagcctcccaagtagctgggattataggcatgcgccaccacgcctggctaatttttatatttttagtagagacggggtttcac

SEQ ID NO: 585125 - DNA, 4001 bp, Homo sapiens
tttccattagaatgtatagatttaagaatcagatccaagtttgaatgaaaatccttgcttagccttttgactagctttgtgaacttggaatgtcctattcctatttttcccccaagtgcagacactaataagactcatacatggcattgtttaaacttctcatttaccaactcccagcccagtcatatagagaaaagtaaattttacaatgtttgatcttacatttaacttttcaatatagacctgatcctccatatcaaatatcataaataaggctgcagtccttaaaaatctttgtaactcttctgttaaataattaagttccagtctctaatacctacagataacgaccatgtggtcaacgttaggcatggctattccttaagaatttaagaggcccaatgcttgtgaccataaagtaatctttaagagaaaattttacaaaagcctcctttgaaaactacttggaagtaacatatatgtatttttaatttcatctcctcaaacctgtaaactggggaaaaaattccaacaggcagtcatttctttctgaggagcaaggtagtaaagacaattagagttatcaaaaaagaaaaaaaaaaaaccctcataaggccatcaagcttcagaatttcgatggtagactgacgatccaggatcttctagaaatatatttaatctattaaaattaaaattaagtatttttttctagagttcttttttaataatagagtcattacaaaatagtacaatgccgaattgctaaattttttcattttgggttatttctcaggtaaaaataagtgcatatagattttatttagaggtagcaacaaagaggataaaaataagcatttgagtgcattccattctctgcaagctttgaaataaaggactatctaattcttcatgagttatcgggaaaaagtcaccaattcttcgattcttacaaaatcatcttaatactatggacaaattcaaggttcgtagtaaaaattgctttttttaaagtcttccctttccactccaggccctgagactgggttaacgggcaaagggagaaaaaattgggaaaaagtaacgtttttgtttggatgtcccagttgagtttggtccaatgagttgggggggtgtctctccatttggcgggagtggggagggagaccctggaactcctgagggatcggtggggctgcccctcagggcgcgggacacgcggaggaggcgggagataaccgcgagcgcgatctcccgcgcccgccagcaaggctgggaccgcgaaaaatcggggaaactgcctttggctgtgagggtgcggggcagatgtagaaaaggggcgcagggggagaaggtgaggcacctggccaggccctgggggcttctcgctcgcagccctgtcaccgccgggggccccggggtgggggaggggaggggcatttggcgcctattcaagcagggtggggtaggtgggtcttccgaggaggaaaaagggcgccctgggatgccacgacccgcacctcccggggctggagtccacggtcggcgtgggtggcgggaccccgcggcccgccatcccgcccctgcacatctggctcttctggcttccccccgacacccagccgccctcctcccggacccaggaaccgctgccgccgcccgaggccgggcgtgtggcatggccgcgcgtccaggctccgagggacgtcgggtcagggtctcaggctgcgaccctccccgtgcacccctcctggcgtgcgcgcccccctcgcgaccgctcccctcactcactatccgagggtcgagggcgcccggcggctgtcactgcgctggggctggcgctgcaggagcagcggggtggccgtagggcgcagctgcaggggcgccggctcatgccagccgacgtggagtctgcctcaggtggaggaaccgctccgggggcagctgagcaacctgcctgcttcacagacctgtatctcttaaaaggcgccagctggtacttttaaaatctttgaatttggtgcctaaatccgcgcggtccaatgagacgcgtcgcttgcatgcgcgcaccaataggagggcagtgggtgggggcgccctcgtccgcgcccaattggaggctgccgaggcggggccgagccgcgaagcccagcccccttccagcttaccggctccccacgtccggaaagatgctacggccgggggcgggacctccgagcacggggaggccgcggcccggccacacgtgtggagggtctatcacgcatgcgtgcgcccgccaagattccttccgccgtcttctggaccggcctcctgcaagtcctaatctcagcccaaattcagcgctggcttccatctggagatctttgatgggtacaaatggtagccgactttcttcgatcatctctcgaacgggagttcggtgagcagcaactcggctcgtccgggaatccagactttccggaagacggaccctccccccagtccagcttagcccgcctctctaggatttacgcgcgcgctctgctctccctcctaactcgaccctccccttgacccacgcctctgcgcaggcgccttggcgggctgtggctgcggagttggcgggtcggcgcctgcgcactggagtcccccgcgattttttcctccggggtgggcgaggaggctgtgcggccttccccagcggctgtagcaggagacctgcggctgcatctcccagggccttccggcggggccgagggtaggaccgaggcacttcttccttgcaagcgcgtttatttgtattttcaaccacacttcagacgctactggtttataggaacgttaagtttactgagtgtgcagctacgctcccctgggtttttgttcctttccttaaagggccaggtgtaggagacagtagtcctgctcccaaaaaaagaataaatagaagtgcccgccctcttgggctggacccccgtggccaagggagtttttagtgatggctggcatggacgtcagtatgaaagtgtaccggagtattagtgatgcttaacttttcacaatttgaatatgcacttaagtagggcagtgcattccctgaactcagctttatggctacagcccagtgaagcaacgggatgtgaactccaaaacggcgaatcctcctttgctgtttccctctggtgcctttctgcagcctcggagtgagttcttggctgtagtcagttttcagtaccgttagtgacgagtccggtggggcgcggccaggattaggatgaatcatacaagtgctgggtggatcctgtctttacctaaaattttgataattagttgtggggcgcggccaggattaggatgaatcatacaagtgctgggtggatcctgtctttacctaaaattttgataattagttcatcatgggttttttgcctttttcatttttaaaaatgttaaaatagtgtcactcttgatgacttaaatttttttcatccccgtaaacgcacctgaggcctgtgcttccttgcctcaccctaacctggccctggggctagatcctggagattcagggttgaaaagacaaagtcctgtcctttagggagtttacagagaccaatgggaaagaagttgacagtgaacaatttcagaacacgaaagaggatatgaaagaatgtaatcgggggtagagaatgcagattagtataggttaaggattttggatggtcaggacgctttctgaggctttgaacccagatgcgttgaactggcaatgcagggctgcataataagcagagggaataataagcagagggaatgcctgactacgacttagtgaacaagagagagaggagatgaggttagagaggtaggcagaagccagatcctgtgggaccttgtagtttttccatgcagagtttagactttcttctgattgcagtggttagctgttggaaggattttggcaaggtagttatttgttgatagaatattgaaattataatagcttttttatgtaaaaaaaagaa

SEQ ID NO: 585126 - DNA, 4001 bp, Homo sapiens
aggcagacggatcacctgaggtcaggagttcgagaacagcccggccaacatggtgaaaccctgtctctactaaaaatacaaacaaattagccaggtgtggtggcgggcacctgtaatcccagctacttgggaggctgagccatgagaattgcttgaactcgggtggcagaggttggcagtcagcagagatcgtgctactgcactccagcctgggcaatggagcgagactccatctcaaaaaaaaaaaaaattaaaagcacataaaaagtgaaccctataaggtagactctggtgtgttgcccagattccctttcagaaataaagaacttgttacccaaactgctgagagttctatctgaaaacacttgagttgtcagcccttttgggtattgcctcagcaaaatcacactgtcctctcaatccccacccaatgactgatcaacggctaataaagtcttggctctttgcaactcaggtcatctctgaaagggtatttcatcttcagaactccctcgaggatggctaagcagtccattaagactgcattgcagctggtcttctccctgcccatttgtttccctctctcccttccataggtgttgatcccaagaatactccttaataaacttcctgcacagcaatcttcacctagtctgcttcctggggaacccaaactgggttacacgttctgcccaaaggcagccattgctaacagggatgcatatgttattcctggcttccttttttttttttaaaaaaagacgtatctagaatgttttaaattaatttttctctatattctgtacactgctttgttgctacgcttttaacctgttacacatagatctctgacctgcagaatctttagcagcattcaatgtctactagatgagctgttccaaataattattattaaccttacaagtgcagtgagacacacttaactagttacagcaactttttttctcttttaatgtataaagatttacttcatccttttaaatggctgtagtgttttcactgtatggatgcatcattacttaataacaggtaatgaatatttaagttgtatgatgtttttccagataaacaatgctatactaaacatctttatagttgcatatttactttccccactatttccttaaaattaatttcctggaagtagaattgctgtatcaagggaatgcatgtttttcattttgatccatatcaccagtctgccctccagaaagctgtaccaatttacattttcatgtacactgcatgagtgttctcacagcttggacagcgatgcacattattcaccaatctgattaaattattaatgaggctaattatctcttcaaatatttaatggccatttgtattattttgccattaacagtccactcatatctttttatcctctgttcttccaaatatatgagtgctctatgtaatgagatgaatcctctgcccatatataataaacagtttttccagctggctatttctcttaactttatttatgatgccttttcttatacacaggttttaaacttttaggtggtcaaacccatcaatctttttaagattatgggttttgagtcatgcgtaagccttagtttgaatactttaaacccatgttaaactacaagcaaccattattgatatttcttttcacaaagaaagccataacatagttttaagtattctataaaccagtatggaaacagttaaattccatgcaaacagtaataacctacaaatacccatgattatgatcaatttctgcatatgtatgggaacaatggaataaaaatcaaagacacaattgaagaaacatgcctgcagatctgtttcagcaggactttcattttcttcatcatcatctgctctgacagtatcagaatgacaatcttcctcagcttctgcctgaggggggaaaacccaaataatgtcaggcatataaacacaccagttgccctctgcaatctacatttctcattcagccactttctatttagtaccatactgtcaacactttgtggaacccactttgagtagcaaggctgtagggggcacttgagaccttactattaatttccaaaggaaaatgagtctgaaaagcatattctctactccaacccacagtactcacgttattgtgaatcctaacatttcccccccgccaaatttaacatcagttgcatccatccaaaaatcaatttaattacagttgtccctcagtatccacaggtgattagttccaggagcccccaggacaccaaaatccctgggttttccagtccctcatatggcatatttgcatataacctatgcacatcttctcatatactttaagtcatctctaggttacttataatgtaaatgccatgtaaatagttcttgtagtatatttttcctaatttgtattattttttattgttgtattgctttttttcccccaaatatttttgatccacagttgaatcccaggatgcagaacctgcaggtacagagggccaactgtgtaatataaagtaacaattcaagtctattactattcataaatgatttatgattaatctaattaggtaaatgaagccaaattcttcattaatatacataactactgataatctataataaaaattattttctctttttctggccaggtgcggtggctcacacctgtaatccccacactttgtgaggctgaggcaggagcatcacttgaggtcaggagttcaagaccagcctagccaacatagtgaaaccccatctctactaaaaatacaaaaaatcagccaggcgtggtggtacacgcctgtggtcccagctaattgggaggctgaggtgggagggttgcttgagcctgagagatggaggttgcagtgagccgagactgcaccattgcactccagcctggatgacagagaccccatcataaaaaaaaaaaaaaaaaaaaaaaggaaaaaagaaaagaaaaatattattcttcttagaaaaaaatgaaataaaattagaacatctttggtatttttttagttctacaagactttaaaactttttatgagaaaaacacttaaagagaattaatccctaagtactcatgacccaacttcaataattatcaatgtaattccttagatcaaatatcaagtcacagtattcatatttctcaagatgtcatatgtaaaatacatatatttcacagtttgtgaaatcaagattcaaataaagtccacattgtaattgcttgatatgtctcaagtcttttgtaatcctcactcttttttcttgtaatttatttgggatgaaactgggtcgtttttctgtagaagctagattttgctgaggtgtcaataaatatgttcctttgacctcttactcttatttcctataaattgtggcaggatcttgaaaggctagattagattctgctatttcttttttcttttgcaagactgcctcataggtcatgttgtattttccatcaggaggagaaatgttctagaatgcagttgacaaggtgctgtgacagatgttccaaacataattgagtctaaggcaaaaagcccaaataattttagtgtccataaacttctacaagtcccaaaacagaaaatactctaatgtttcatgttaatgaaatacaacattgcttctttatagttatcttcttcacaggtaagtttaatgataccaatcagatataacttgatacttgaattttttttgatactgtagaataaacaaatccactgggttctaggttaaaatgtattgttaggtggctaaaaataacaactttgtttcagaaaatagtaacatttagttgtcctatggagttcagcaaatagttattgctttcttgggacagagtctccttatgcagcccaggatggcctcaaactcctgagctccaaagatccttctgctccacctcttgagtagctgagactacaggcttgtgcagccatacctggctgtagcagatagtttttgcttcatgg

SEQ ID NO: 585127 - DNA, 4001 bp, Homo sapiens
tagtcagaagcatttttcaacatttttgtgttcccataacacttgtgcttacttttatcacaacatttgtactgaggttggctgtttcatttactagatttaaggcatccaggacaggaacacatctcagttacctctgtaaccataaggtcaaacacattgcttgatttgtagtaaaggcctgtctaggcctcagctgtcatgtctatgggacatctataaagaggtatggtgatctactgaggtcccttttcatgtgacattctgtgattaaaagtttatcataaatcaccttgcaggtttggttatattgaagatctagtattgtaccagagtctcacactatgccaggctaataggtactcaaaaatattggctgaatcgacaaataaaatgccatctggataatgtgtatctgaaggatgaggaaaggaaatgggagaagtgtaatatagacagcatctttcttctcccctgtgttacagtggagctctaaaccattcttactttgattttgacagtatgatcacaaaaacaaactattatatctgggatcggctgagttgacatttggtcaattcaactactacttgaaataagtagggcctcagatgccacctggaggttttccttttatttttcataatcgagtttgacctaaatatcaccttcacttgaatagctcatgtgtatgagtagtccatgtcttcatcatgttactcctgtttcacaggtgcgattaataaattataaaggctaagtacttaatcccggtcagagaactacttctgaaagtttaggggcaggggcaattgccttttctatcctccagattaatttaataaaaataaattcagccattcatttatgcaataaatatttgagtccactataaattaaatcgtttggaattattgcatccctgattctttaagccccagccagagattagtttctcagatgaacaatttattctaaaccaaagaaaggcatagggcagagactacgtattccaatatggaacagtctcatggaatctgcactgtcaagctctgcaacttagctcagtctctcatttggacggcaccgacgccgcggagacgaaccctccaaccccactccgccaggaccgcctgccaacatcctcccagggaatgacgcctcgcggggcagatgcgtcctacacccagggctcctcaaggtgccggcagggactgtcggtgggcctggcttttccgcagaagagcaatcaacaagtgtctcctcttgccagagctccctcccgaattcaggcgctgtgacagcttacctcaatctatgctcaatgcttctgataaaatcccttgagaggaccgagactggttcaatatactcagtgagccgagaagggacattttccccggctgtcctgcaaaccctcctcctcacatcgagctcggcgggggttggggaggctcagcaggaaggaatcctggggagaagccagggttggcaccccccgccccccgacgcactccttctcaggccagggccctctaacgggtggcagccgtgaagctcccactcctccccagagtccccgccgacccccagccctaggcccggcccctctgcacaccacgctcccgccccgcggcgtccaccctcgagccccctggccaggttaccatgctggcggggcggcctgctgcgctcgaggggctctccgtgccccctctgcaccgccccccggaggaggggtgctgggtgtccgggtgtctactcctgcctgtctctgcagcggagcttagcagagttctcggtcggagaagcgcaccaggcagcggcaataactgcgggcccggcgtacggcagccatcttcgcggggcagggggccagatcggggcgcgctggggtggcggcggctgccggggactcggggagtggagggacgcccgttgccagccgaggcgggggattgtgcgagcaccggagcgtcagccctactggagaccccggacgccgccgcggagctgccccctcagctgcggaaacctgcgccgacgcgccgagcatgcgcagtgccggtgctgcccgtgtgggcggcccggccacccatccccgcgggctgcctagtggagggctaagggtcgcggacctactgtgtgcgcgcgcctgacgcggggggtgaggctgcccgggtgccgaacctcaagcccaacccgcgtgttgggctgagtgaacacttaagcgaacttgaacaagcattacctcaaaaatttttacaacccaaatttaggggtgggcccttaaagcaagccgccctgagaagcatcgaactggacgcttgggacagtcgctacaaagtcctcggagcctctggctagagtcccgcgccaggaatgcaggaaaacagtgaaatttctcaacagtcacagttgttataacgactaaagtttttgagagcacagacagactggagattgaggaaaagacgcgctttggcgcccagcaggaggaaagagccaacgcaaggcatgtctcactacagatcccataatgcagtgcgaaaagggcttgcgattccatggccctgaaacccaagtgccgtggagacggcgcccgcgaggcactctgggatttgtagtcggccgctcaggtttgagcaccggaacttacacttggtcctcggccccacctcttaaagcccaaactacctgatttcttcttgagtgaatgtacttgttcataaggtgatactttgcttttacacaatttaaatctttttaactacgggtttgcctgttttgtgaaaactgataggcttcatagcctataactttaatttagcaaacatttactgagtttttaaagtttctagtggtgccagggactaataggcttccaaacattcaacgagtttacagagtttaaatttctaatccattctattctggagagattaaaaatgcagtatatccgctgggcgcggtggcccacgcctgtaatcccaacactttgggaggccgaggcgggtggctcacgaggtcaagagttcgagaccagcctcaccaacatggtgaaaccccgtctctactaagaatacaaaaattagttgggcttggtggcgcgctcctgtaataccagttactcaggaggctgaggcaggagaatcgcttgaaaccgggaggcagaggttgcagtgttcgcgccactgcactacagcgtgggcgacagagtgagactccgtctcaaaaaaaaaaaaaattgtagtacatctttggcacagaaatggaggtgaaagtgctgagggaggggagagagcgagagagtgaaggggagagagaacgagctacaataaggaagtccaaatgccgtgttttgttttgctgagacagagtctcgctgtagcccaggctggattgcagtggcgccatctcggctaactgtaacctccgcctcccgggttcaaggaattctcctgcctcagcctcctgagtaactgggattacagcgagcgcccccaagcccagctaattcttgtatttttagtacagacggggtttcaccatgttggtgaggctggtctcgaactcctgacctcgtgatccgcccgcctcggcctcccaaagtgctgggattacaggcgtgagccactgcgcccggcctgccatgttttaatattgggatccacccttcggatgcgtgtgtttttatttgcaccctaagtcagctacctataaaaaatgccttactgtttaaaagaggccaaaaatttaaattttttgttttaaaggagactctagggcttaagtctttttaaggataaatttcctcccaatgaactccttaaaattgaattttgaaatttaaattggggggaaaggttaaatctaagatttataatagaataaaatgataaatgtgactcttacatactgagaatgaagtattgaaatagtttgggaacaaatctgtttcatttaaaatgttgagtgctagtttaaaatagcctggtcaa

SEQ ID NO: 585128 - DNA, 4001 bp, Homo sapiens
tctttcttctcccctgtgttacagtggagctctaaaccattcttactttgattttgacagtatgatcacaaaaacaaactattatatctgggatcggctgagttgacatttggtcaattcaactactacttgaaataagtagggcctcagatgccacctggaggttttccttttatttttcataatcgagtttgacctaaatatcaccttcacttgaatagctcatgtgtatgagtagtccatgtcttcatcatgttactcctgtttcacaggtgcgattaataaattataaaggctaagtacttaatcccggtcagagaactacttctgaaagtttaggggcaggggcaattgccttttctatcctccagattaatttaataaaaataaattcagccattcatttatgcaataaatatttgagtccactataaattaaatcgtttggaattattgcatccctgattctttaagccccagccagagattagtttctcagatgaacaatttattctaaaccaaagaaaggcatagggcagagactacgtattccaatatggaacagtctcatggaatctgcactgtcaagctctgcaacttagctcagtctctcatttggacggcaccgacgccgcggagacgaaccctccaaccccactccgccaggaccgcctgccaacatcctcccagggaatgacgcctcgcggggcagatgcgtcctacacccagggctcctcaaggtgccggcagggactgtcggtgggcctggcttttccgcagaagagcaatcaacaagtgtctcctcttgccagagctccctcccgaattcaggcgctgtgacagcttacctcaatctatgctcaatgcttctgataaaatcccttgagaggaccgagactggttcaatatactcagtgagccgagaagggacattttccccggctgtcctgcaaaccctcctcctcacatcgagctcggcgggggttggggaggctcagcaggaaggaatcctggggagaagccagggttggcaccccccgccccccgacgcactccttctcaggccagggccctctaacgggtggcagccgtgaagctcccactcctccccagagtccccgccgacccccagccctaggcccggcccctctgcacaccacgctcccgccccgcggcgtccaccctcgagccccctggccaggttaccatgctggcggggcggcctgctgcgctcgaggggctctccgtgccccctctgcaccgccccccggaggaggggtgctgggtgtccgggtgtctactcctgcctgtctctgcagcggagcttagcagagttctcggtcggagaagcgcaccaggcagcggcaataactgcgggcccggcgtacggcagccatcttcgcggggcagggggccagatcggggcgcgctggggtggcggcggctgccggggactcggggagtggagggacgcccgttgccagccgaggcgggggattgtgcgagcaccggagcgtcagccctactggagaccccggacgccgccgcggagctgccccctcagctgcggaaacctgcgccgacgcgccgagcatgcgcagtgccggtgctgcccgtgtgggcggcccggccacccatccccgcgggctgcctagtggagggctaagggtcgcggacctactgtgtgcgcgcgcctgacgcggggggtgaggctgcccgggtgccgaacctcaagcccaacccgcgtgttgggctgagtgaacacttaagcgaacttgaacaagcattacctcaaaaatttttacaacccaaatttaggggtgggcccttaaagcaagccgccctgagaagcatcgaactggacgcttgggacagtcgctacaaagtcctcggagcctctggctagagtcccgcgccaggaatgcaggaaaacagtgaaatttctcaacagtcacagttgttataacgactaaagtttttgagagcacagacagactggagattgaggaaaagacgcgctttggcgcccagcaggaggaaagagccaacgcaaggcatgtctcactacagatcccataatgcagtgcgaaaagggcttgcgattccatggccctgaaacccaagtgccgtggagacggcgcccgcgaggcactctgggatttgtagtcggccgctcaggtttgagcaccggaacttacacttggtcctcggccccacctcttaaagcccaaactacctgatttcttcttgagtgaatgtacttgttcataaggtgatactttgcttttacacaatttaaatctttttaactacgggtttgcctgttttgtgaaaactgataggcttcatagcctataactttaatttagcaaacatttactgagtttttaaagtttctagtggtgccagggactaataggcttccaaacattcaacgagtttacagagtttaaatttctaatccattctattctggagagattaaaaatgcagtatatccgctgggcgcggtggcccacgcctgtaatcccaacactttgggaggccgaggcgggtggctcacgaggtcaagagttcgagaccagcctcaccaacatggtgaaaccccgtctctactaagaatacaaaaattagttgggcttggtggcgcgctcctgtaataccagttactcaggaggctgaggcaggagaatcgcttgaaaccgggaggcagaggttgcagtgttcgcgccactgcactacagcgtgggcgacagagtgagactccgtctcaaaaaaaaaaaaaattgtagtacatctttggcacagaaatggaggtgaaagtgctgagggaggggagagagcgagagagtgaaggggagagagaacgagctacaataaggaagtccaaatgccgtgttttgttttgctgagacagagtctcgctgtagcccaggctggattgcagtggcgccatctcggctaactgtaacctccgcctcccgggttcaaggaattctcctgcctcagcctcctgagtaactgggattacagcgagcgcccccaagcccagctaattcttgtatttttagtacagacggggtttcaccatgttggtgaggctggtctcgaactcctgacctcgtgatccgcccgcctcggcctcccaaagtgctgggattacaggcgtgagccactgcgcccggcctgccatgttttaatattgggatccacccttcggatgcgtgtgtttttatttgcaccctaagtcagctacctataaaaaatgccttactgtttaaaagaggccaaaaatttaaattttttgttttaaaggagactctagggcttaagtctttttaaggataaatttcctcccaatgaactccttaaaattgaattttgaaatttaaattggggggaaaggttaaatctaagatttataatagaataaaatgataaatgtgactcttacatactgagaatgaagtattgaaatagtttgggaacaaatctgtttcatttaaaatgttgagtgctagtttaaaatagcctggtcaattacacagatggtttcttttattctagcaagtaattaaagcttaataaaataatatttgtaaagataaattgagcattaaaatactgttatgcttcatagctactaattttctattttcagtcagttccacagtatccactagacctcattacaaggttatattctcatattatatttacaggattataatttcctgaggccaaaactactgatctaggctacttactagcctagcagactcttgctaaaaggtagaccaagacagtacctttgtttgccaggtagacctgcttggacaatttgactaaaactgatcattttactttagaaattgcttttcatgggagtagtatatgacttgttagattccttgtcgtgtctctatcttttcactgataatgattttcagttttcatttgccatatgggctggctgttaaataggtaaacacaaaggtaga

SEQ ID NO: 585129 - DNA, 4001 bp, Homo sapiens
ataaggaagcccaggccaaggcagttggtatgggtcccctcactcagtaaggagtggctctcaccctcttgatgcctgctgggacctaactcccgtctaagggctgcccactcctgccagggttattgcctgggcagagcacagcatgctgaggggctccacccaggtgtgcctagtccacgtcaagcatgttgagtgaggtggtaccatccacccacacccaagggggtggtgggccaggaaggcggcacccaagagctgtctttggtgctgaacaggacgagcttggcaaagatcccgggagaggcaggggagaatcacccagctcaggaagttgaagacttctaggtctacatctatgccatctccaccctgaagcctacaggaaacattgcctgccatgagtgccctcaatacagcatccgggccattcctaggacatctactgtctatgaccttgcatcatagttattcgatgagctcagcatccaaatactgaaacccttcttcatcctctacagttcctgtaggatgctgtgctgtgccacccatgtccctccttcaggaatgaggcctccccacaccatccccaccagctactggtagtactgggggctgccgggtaatttattggctgagtccctctctgggaatcactctctggaagagagagctgcctcacccagagtctcttgtccagtccacatggagatacaaatacccagccctcttcctcagctggaacaaccgagaggcatcccagctccagagctccctgggacaggctgaggcctctgtggcaggtgcactgcagttcagcatctccccctgcccggccctgcttccctcacacccacagctgttgttcccaaaagctctccctgataaatcacctgaggcaaacctctgtctgagtctatttccagaaaaccctacctgggacagcccctaacacagtcctgagcttaagaaatgcctgcagaatggattgatgccacacataacacacaacacacacatacacacacgcgcacacacacaaacacacatgctcccagggctaccaatgactccacgcatctggcccagccttttccctccagacagacgccccagcattgccccagatacttaaagcacttggcatcctcacctctctgtgtctccatttcctcatctataagacgggaacagaaacagaatctacccctattaggctgttcgatgactaaattaaataagtaaggacatgaacttagagtagggagtaccccatcaggatgctgcccgtacatcctggtttgcctcatacggtcccagctttacctgtaatgcctcccccacaaccaccacattttatttggcatttactttcagtttcaattgtgtgctgaatgataaattatatggttatcctaatcatagggcgtaaattcttggtgagtatcagctaccttttctgagaggtgctggcaggcactgggtggggtcctgtgcccacacacaggctttggtctgcccatgcttgctcgtaaccacacctgtctggactctcccaacacacactggcactctcacccctgcctggctcctggtgtcccaccgacactctcccatgctccaaggaatccgtgaccgaggaacgcggggctgcccctgcaggaggagggtccggggcagggcccagggagagagctgccagaaaggctggagggtggctgccagcccaccatggtgaccctcccaccccagctgcccatacctgctattctcaaacacagtgaccaggttggacacagatgccagcttctcctcacttgcccccttcatcctgccggtttccggggtggatctcagctaccctcgaagcagagagagaggcctccagccagcacactcagccacgctggcctgggacagataggctaaatcacccatgaatctgttctgatctttcttgagggctcagaaggtcggctcttggcttcagagtgaagaaagaggaagtggtcccagagccacagccctgcaggggaaaggccagcactcccgcagtgggaggagcctgctcgggccccacctctccctcaggggggctgacctttcacacctgtagacccccattccagaagccacctaagaggtggcaacagggcccagaggtagcttctggagcccagtctgggctggtgcagtggtttgcacctctaattccagtgctttgggaggccgaagcaggaggattgcttgagcccaggagttcaagaccaacctgggcaacatagtgagacaccgtctcttaaaaaaaaaaaaaaaaaaaaaggccacccggagccagacccttggctggtttcttggcctagtggttccagccaaccacactttctccttcagaaggtccagtggcttttacttggcctctttcccagcaccttcttttctgcatctgcccctgctcacagctgtaaggaaataatgtcttttttattctttagagacagagtgcggtggtgggatctcggctcactgcaccctctgcctcccggttcaagcgattctcctgcctcagcctcctgagtagccgggattacagggcctgccaccacgccctgctaattatttgtatttttagtagagatggggtttcaccatgttgctcaggctggtcttgaactcctggcctcaggtgatcctcctgcctcggcctcccaaaattctgggattacagatgtgagccactgtgcctggccaggaaacagcatgttttatttaaaataatcacaaacctggtaagggtggcagggagtactgtgatgttcccacctccccactggggttctctcattttagttgttgctgtcatcacctcattgccccaagggagggcagtttcctccctgaaactcagaggataataatagctaacatgcactctttttcatgcttatgagtattttcttattaatcctataacaacctcatgaggtaggtactattcctatccccactttacataggaagaaacagaatcagagaggttaagtaacttgcccaaggtcacccaggaagaatacaagagaagttggatttccaaagcaaaagtgggtgtcctacagttccagcaaaggttcgttgggagcctggatgaccatgttcttgctgctccatccccaggcctccctgatcccaggacactgggttgtctttgcctgaggcctcctttaccacctggtctcccggcccttacagaacaaatggacgctgcctctgttcccctccttcaagccccacaggccgttcagggccctcccactgggctctggtcccaccagggctctccactgaacctggtctgtgtcctggagtgcagggcctgagcctcggtgctcttggtacgtgaagtgcctggaacagcttcacgctccagtaactgtgaacccctggggcctcacatgcccaacagccgccctcaccccaagcctcgtctgagtggtttctcccaccagatgccgggccccctgccccaaaccctaagtctcacaaacctccatttttgttttttactttttattatggagaatttagaacatatgcaaaactagacagaatcatataatgcatcccatgaacccctaatccagaccataacaaacctcagctcacagccagtcccctgtccctgctgcagccacatcgactctgccttctcatgtcattttgaagaaaatcccagatgtcagatgacattacccataaacattttagtgtgtatctagaagatgagaactctctctctctttttttttttttttgagactgagtcttactctgtcacccaggctggagtgcagtgctgcaatctcggatcactgcaatcttcaccccactgggttcaagcgattctcctgcctcagcctcctgagtagctgggactacaggtgtgtgccaccacacccagctaatttttgtatttttagtagagacggagtttcaccatgttg

SEQ ID NO: 585130 - DNA, 4001 bp, Homo sapiens
aaggaaggggtcaaagatacagtaaataattaaagacttgaaagtatacacaagacagagtgattattcttggacaggacagagcctcttcttctaaagcagtaaggaaagaggtacagataaacatagacacaggtaagcattttcacaggtgagcaatagattgagggacaggagaggaggacataaagttaggatctaatggcttctaccttccctgtggaggaagcaacaagaccatgtgttcagagagaaggaagcaggggtgacatagaaggctactgcacagctagggtgaagaagagagctgctgggcctgctcaggacctaaccaggttggtacctgccaatttgcaacatcagcaatccacaggattgactgactcttctccaagagcacatatgtgcaaagtgggaagagttagtttgctgggttaaatgaccactgagatttcttccagaccacgtatgaccgttaaggcaaggtaattaggggtccagacccatagggtccagagcaaaatgctgccaagagaagactgatgcctgcacagacatggaaagggcaaagaactgaagattttgatgaaattagagattaggtatacaggtctaaagaagtgagaggacagtagactgatttgtcatacagcaagagtttaaggctttgatgatggttctattcttgttgacaaattccagaatatttactcaggatggttggtgggactccgaaaaagttaaattacccacttaaatatagagtagtggctgcacttttaaaataatcgctgtctttttcattgtcaaaataattgagtggtcagataattttgggaaaagttgcatactatataccccgtttcatagggattaataacatattagcttactaaaggatctgagtgaacctgcacttaacacattgacaatggcaccatttcttcaagaaactcctatgaccatttgtttcagattaagcattagtatcagagttactgtggtaccttaagattacccccaaattcaaaagctacacgaaaaaagaataattttggctctctctcaatagtaatgtaatccttaacagttcaaaattatccctagctatatgttactataaactatttttaagacggtttttaatgaataagaaattaagtattaacgaatacagccatgttaaaatctggaaacttcatacctctactttttcttgctcctctagtgctaaaaacacagctgctcggagttcagccttaaaaaaaagttaagaaacaggaaattataatttcaagacaattttcacaacaagctcacatttatccagcaacaaacacgagcaagccaacgagctgggagggcaggtgcaaaggtcagaaacgccttccgaaacgttctcagtcacacaagctctccgacccccaggcttcggctggacgcgctgctttcccgccgcggatcatgcccgagcctgaggaagagacgctggggccgcactccagggcccagctgcgggccgcccgtgtggcccccaagccccgcggtcccgcccccacggaatgaggcaggggatgggccaggcacccccagtccgcggtgccctccgggaccacacgaacgaacgagccgaccccctctgtggggcgggcaggacggaggccatgccggggcgcgcccccagtgcccgccggccccggtccctcgccagggaggcggcctcctcgccgcgaccgttgtgacgcccgctgtccacgcaagccctgcggatccgccaggcccggccccagcctccggcctcaccttgatgcggttcaggaccccgctgttctccagcgtctgcaccagcaggtcccgcagctccgtgtcctcctcggccaccactgcggccgccgtcgccgccatcttgcttctccaagacaaccgccgaagccgcgctaacggccaacggccgcagcagggtacgctccgcgcgcgggctacgcggccgacgcagccaaagccccgccccgacgcgcagcgcgctggccctgccccctggcgtcgggaggcggggcatagagacctcggggttgacgctggacaccgagccttggggagcgccggaccactgagcgccgaaacttagggtcggcgctgggggcggggctgcggggcgcgggtgggcacgcaaggggcggggcgtcggcggggcctccagccggcaacccgttggctgccgtcgcctgaggcgcgagctttgaagccggcgagcggtgaggaggaggcgccctcgcgtgtggagagcggactccgcctggactccaccgcccacggccgcatcccatcgccgcacaagatcgccggagtcatattatcgacgtagttaaagcccactagcctaaagccgggcggactgcggtaaggaggccccgagaccgaacctgcagcccctgcagccccgggggggcgccggggaagggactcccgagaggtcgcgaggggcggaaggccctgcaggttgtcacccggaaataacgttctgaggccccccagccaggcgaacgcaccctgctcggccacggcctccgaggctaaccggaaaggtgccaggccgaggtgcaggggcgggatggccccaggaagagccgagggccgaggagggcgttgggtgggctccgcgctgcccgaactggggccgcagtctccactccctcctgccccgcggccctccgccgacagccaggcgccggcggggagtcctggacccctcccgggccctggaagccccgtcccgccggagctgacgcgccctcttggtatccatccggccgcctgggctgcccctcgcccctcgccttggcaaaaccagcccccggaccgagccctgccttggagagtgtgggtgcgcaaggccagccgagctgtcggttccggggtttcggggtgcgccactgtatggcggcgtaagccgagaagtgtccgaggccgggctccagcagttgagaggctgatttggccacggtgaaggacgcgcccggaggaaggaaacgggaatccgaaacgggcggtggccgcgcctttcccgaggccggcgtcgagggcttcagcgcctcagggtgggcgggaggggaaggtcgtgcgacccgcgtggccggcggaaaggagcagcgggagccgcggccgtagggaagccacgggaagacgggcggctgcgctgcgatgcgcggccctctccctgaagccctcggctcaggcgccacaggaaaggctccttcgggcaggcctcagctttcagcttaagtttttttcctttggccgagtcaactgcggtgccgagttgtattttcctttcagaggtgtgtccgagaaccattcttaggagacgcctgccggccgctttgggatagggcctgtctgcccatgctggcttccaaaggcctctgtgtgttcctgtatgtgggcgtgcacgtacctgtcacatgtgtacgcgcagaccacaggatgtccacactggcttccaaacacatctctgtgtttctgtctgtgagtgtgtacgcaggtgtcaaatgtgtacgcacagatcacagggtgtccacactggcttccaaacacgtctctgggttcctttatgtgcgtgtgtatgcacttgtcatgtgtacacacagatcacagggcatccacactggcttccaaacatgtctctgtgtttctgtctgtgggtatgtacacacatatcacatgtggaagaggtaggaagaggctggaacaggtaagggtcatgaaggtgcagtgcactattgtactgtttgcgctttatatgtgtttggttagttttgcaagaacatgctggtgaaggagagagaaccccaaacaattgattagcagtgctactgaaactcagatatacacaggaatggcaaagaaacatctatgaaaaaaagcagattctggaactccatctccctgagattgtcactcatggggtctgcaggaagtttcaggaatctgcattttcttct

SEQ ID NO: 585131 - DNA, 4001 bp, Homo sapiens
taagtgtaataaaaataagaggtaaatttgtcagtgaggtggtgttatattaaaacacaaatctactactcttgcttaggtagaacagtcccagatttggcaactaataataatgtgagaataaatagaacaagtgtagaaaacagacactagagtttaccttccccttaaagcaatttggattatggcttaaagcatatatcataacacatatgttaagaaatatcttgtatgatacatatgtttgcaatacctatgttaaattttaatccatatgctttgctaataaaaatgctagtatttacacatgatggtattgtggatataaaatgagggctaaaatggctcaaggatttccttacattttatgtatgagagctatgcattttgttaataattctttttagtttccaattttctaaagtctgaaatgacagctgaggagctgcatttggttttcaaatgaatgataggtaccaaagaggatatgactaaaatagtgagagagaaagcattaacacatatgggatgtatgctttttgcctgaataacactacctctgtttcaagaagtagcactttagattgatatagtctattatatatttctgtgggctggaaacacagatattttaatttaaccttagaaaattaaagattatgaatttttgtatgcccacttctggaaagtaggcagatttttcttgaaaatagcaggaatctcattaactccttttacttaaaacctgtaagtgacttcaaaatgtgctcttgaaatataaatctagtcataaaatatgctcagtgataatgttattcattcaaataaattaagccaaataaaatctcaagagccctcctcttcttcctctttttacaacaataaagctataccccacattaagaccattagaaaaactcaagaggcaattccaaggagttatctggcccctatgttacctccacatgcaagttataagaatgagaaatctgaaaagctcagcatataaaatttgataacctttagctaaaatggctaagaaacttcaaaaggcatacacttttgccaagcaaaagttttctcttaagtagttactggaaagtttataaaaatttctcatccttaaaaaaaaattagagaagtcaaaataccacaaaacaaaacaaaggaaatatttgggggaaagaactcactttgtcttaaagccgcttcttcctgtgatttaaacagtacgaaaggagaatatatgttgattatttttcctccaatccacatgcatgtcaactccaaaaggaacagaaagtcaccagcaccatctgaagatcccttccaactgcatgcagctttttcaactttgcaggagaaaacagaagggtccctgcatttcctccaagtcttataccgtgtacatgactcctactgggctgaaaaagcactatttgtcaatttttacttaaaactatgagtaacaaattctctgcaggacatccttaaagggaaattctgccaggattagcattcgaagtatctggctaagctccaaaaagtttaaaatacacaatgttcacacagacgcatacacacttgagaaatttccactaactaggctaaattaagggcatatttataaaaataatactctaaaaggatgatgtattttctgtttcctcaatctgtttttggctttgttttctttgttttctggtggtgatcagaacccttcttttaggttagaaatgtctgaaccgctgagcttttcttttggacattgtctcttagaatctccttttgaggccatctggaaagggatgaggtcccatgctcttacctgcaaaattattggtaccttaagagatggccccctggattgtggcctctatctctcccttcttgggaaattggggaactctgagacataagtttgagtagaatactcaaggtagttccctgctctctggacttgcagtgtggactcagccttccccgctctgcctgcttcctggtgagctggccacaattgtgacatcacatccatggctctatgacttcataaagcataaactcattgagtcttttgaaatcttcaaaacacaaaaagtggacagagatgtcaagagttggatctgaagaaatttttggatattaaaccaatccataataggtatcctcagtggggcacactgattcataaggcaagtgacattttctcttagaatctccatttgaggccatttcttcagtttggaaggcaggatgagagaagaaattctgccttaatcccagaccaaacttaaactgtccttgttctaactgctaaaggaatgaaatgttaatatcttctaaggtcaaactcgggtatatacagtcaaagaacttgagctagagaaatgcagagccagttaactgtatgttttgttattcacttgactttaatgattaagacattatgaaaatgaacatatggcgactaacaacaataaatttggattcagcaaaaggacacaagtatatttcattagtaatagattttaatccttaggacaccattgctaaacaggtactgcctgtattttccttgttttatgggcaaggaaagcagtccttgagatgtaaaagtgcctgggaccatcaccctctttatttgctcccatgcttcctgagagggtaatctacatccaccaagtcattccaaacctactacattctgagccttcttctccctcccaacttattgcaatctgtctttcacttgaaccgctccaaaaaagcttcattaagatcatatacaaccttgattagcaacccaaagagtatggtcttcagtcttaccgaaaaattctcatctctggccatgtctatttctttctgaaattatcttcccttggttttgctatgttacacccttctgattttctgtttgctcttagcaccctcactttctctctattcacctcactcttccctagagctttatcttctgttcagtatgcttctctgcagactttccatcacgttcttcatcaaaacaatgaacaattttatacaacatgactcccaaatgtgtactttcatctgataccactcttcaaggttccagacctgtatcccgctatctattagaaaaccttgtctaggggtccccagccatctcaaactcaacagtcccaaatatccttattgtcttctccccattccaaacttgttagtttgctgtatttcctacttcagggaatggcacaatcatccaccccttatgttagagtattccctttcctcatttatcctccaccatccccatcattgtccaccttctgtaggttctagtttgttaaatgatctttctcaaatttgtcctcacccctgcattccatgtctcacatgtctcactcagattattctgtcagccataaaataactggcatctgcctcagcctgatccctttctatccttctctatagaaaaatattatttttaaataagtttgttaaattataaaatacatgcttcttgcagataatctggaacagaaactggaaaacatatacagaaaatgtaaaatgtaaaatgatttgcaatccaagacagcccagaccaaatctttgtgtacctctttaggctttgtatcattcatatattaatgatacagagaaatgctaaaattttttgtaaatatattgcataacatagttatgcagtatatttagttagaaaaccaagaccacattgtatatacttgtagaaagtgcgagatatttttcttttccattactaggtttatggttgaggcccctataaaaaaaggcaaattaataaaagtatacaaattatttaatgtaagtttttatgggacatgggagcctttcagaaatgaagactcaaagcaagagataaacgtgtgtatttttatgcttagatttgatgaagagtggatagtcatggaaaagtatgactggacaaaggggatatagtctaatgattatacactcgggggaacttagca

SEQ ID NO: 585132 - DNA, 4001 bp, Homo sapiens
ttcattaattgatattaaattagatgtaaaactagatagacaagttgaggacaaataatacatggctttgaatgccaactaagggattcagagtttacttgcttcagaattgggaccactgaagatttctgagcagaagagccctataatatgaattgtgctttctgaacactaatatctcacgcagtcctcatgagtgatcagctttttaatgggctgaaatttgtgttttatttacggccagatgcggtggctcatgcctgtaatcccaacactttgggaggctgaagccaggagttttagaccagcctggccaacatggagaatccctgtcttttattaaaaacacaagaattagccggtcatggtgtcacattcctgtaatcctagctacttgggaggctggggtgcgagaacttcttgaacctgggaagcagaggttgcagtgagtgagccgagatagcaccactgcactccggcctgggtgacagagcaagactctgtctcaaagggaaaaaaaaaaaagttatttatgtttctaatgagggaaatttagcagcatattttacagaaaataggtttcatttcaatgacaaatgatacttctttatgggtctcattagagaactgaaaatacttgcaaatacagtatatttgataatgtcattttctgctctagatctaatcaaagttgtcagcaaaattaatttaaggtccacaattctctactcatgttaacctgagggagaggttattgtgctattaggactacgttataactgagaaactgttaaatgccttctcatactcctctaatggagacaacccaagtttcagagaaacagtttataaagcactctataacatagtgaagagcattatgaaaatatctggcatatgcaatcttgttagcatgaaatgggtaatattaaacacagtccctaatatcactgtggcaccccaatttagaagagctatactgtaccaactttgctttccacccacagaaaggaccaagtatgaagttatataaacaccattctcccttaattgaggaactggtaatcgaaatacaaactgatctgcttattcactatttacatggccattcaaagtaataaaattttaaaagtaaatgttatgttgaaaaaagtcaagtgaaaagcaagatgttatccaaacaaattatctgtctttaaacaaagtaagttttcctttcctttcaaataagaaaaaaagagaaccaaaaagttcaccaatagaagtgtaattcacatgaatcgcagtgatggtataccatggaataggaaaaaataagttacaagtcatagttcaaatttttttcatacccctgcctgtactgtaacttgtgaactctagaactttaacagactttctgaaagctgaaaagaatccagtaactcgtacagagaacctcatgaacagttcctgaggtaccacaagcacctgtttccagcgtgttccagccatggcttgtaagtggacctgcaaatgctgcaatgtccagggtaccaaaataggggaaaggcgcccaggcacagctcaagggagctagcttaccccaaggctgtgtttgacagggatttgggaactggagaggaaggaggaggaggcagagtacagcctctgtcctacggccccacacccaccggcagacatccatcctcccgcctgcgccccgccgcgagggggtactcacagctctagtctcatacagaaccagcttctggaccgagctgatgatgggggcggcggccgtgggcatggcggcggcaaatgggggccccacaacagggcacgagcctccggaccgccccaggagactcggcgagaaaacccctcaggccctggacatcaagtccagccaggaacaacacccattaggcactaaacctatagatgatcaggtgtttccggatccctgcgccccgcctccaggcaagccccgcccctcacgtcgggagcggggctggaggacgtatcatagagaggtcgggtagaggctcccgggacctgcgtgctgccgagagaggaagcgaagggcaccatctttggtaaggattggaggaaaacatgggcggagaaaaagtcgacggattaattgagtctatttatctcctccctctctttggaaaaaagcggaaggtttgggattgggtagcttcttttgaaaagggttctccgagttgcaggatagatccttgtgttttccctgcctgctgcggcccattttcctggaagccggccctctgacggtccttcactgagtgtcagttttcccctcacctctaatccatgttgtacctacgctgtgtggcccaagaaattgttttaaaatcacctaaagctggaaagtgtggctttgccacacgtttgtgcgtgaggctagccacttgaagttgtcgacagagactagcgcagtgtggcggagccgcgcttgaaatgaggtttcttcatttcatgtgtgcgacataaatgggcatgcgcgtaccctctcttccatagttgtgaaaatgagtgtattataattataaatgccaaattaggtacaaaagtgactatttcgaattggaaaagaaatgacaaagaactacagccccgcctctcgaggccccgccccaccaagcagcaggtgcgtggcggccagaggtctccccggcaaccgcccgacagccccgcggagtccctggaggcagttgcttccctgaggagggtccggctgcggccaggtaaggagccttccggcggcccgctgggtcgtggtccgccctggaggcatcttggtatctgttgcacggaaccccgcctcctgcggggacccccagaccagcttcttttcttgcaaaacggtctctttgtaaatccactttttaaaaccacgtctcctttcaacgactgaagtatttattccacaaatatttactgaacacctactgcaagagtataagatgtaggggagaggcagctatcctatcttaggcggcaattctaggtttcccaggaaacctctaaacctcagaaacctctgctagagggcttctcaactgctaagtgtaaggaaactttaaaaaaaaattatagaattatagcatacccagataacattcatgtaataccaaagatcatattgtaaattaaaatttgagaaattacaaaaattgtaaagaaatacttaagtctatgttattttgcgcttctttccccctgtagtttggtactccttttattaagaactagaaggatggccgtgtccgttctggcattttggacttggatcttttaactgggaaaaatagttagctgtgttctgtttcataatgaaaccaactcttctgaatattagttaaatgtttgcacagtgtttttatctaggatagcaactcttaaaatacctgaaggattctagttttcaattattatagtttagcacttccattttaactttatcttagtttatttcacccggaatcagatcctaagacaaaactttgaaggcaggttgtttatatgagacgtaatcccaggaaacagcagcagggaggggaagaaaactaataaaggaaatattaccagagaaatttctctgtgggctgaattcactagggaatactgggaggcatgtctcagttatcccctcttgaggggcaaggaagctggagtatttattcgccaacttccatcagttattggatgaagcctgatagggcagaacattgatgccctagaacttccagtctaccctgtgttcagggagagtaggttctggcagccagagaaagcccttaggcaaaaagtcgcacatgctaacattttggaagttgggctggtcgtgcatagaaaaggtgtatgtcaagtggatatgggggaggcactaatagcagctgctacattccaccctttgcagcactcgtatccattcttcctccacatcaagttcacaccatgccaccctaattctttaaggtagtggctagtctcaa

SEQ ID NO: 585133 - DNA, 4001 bp, Homo sapiens
aacatgacttttacacagggccaaatgctgcacttagttatcgccacactgtcccactgactccaaaagaaattacatgcctagaatcaatggtagattttggccttacacatacatttttaagtcaacaatgtgacccttcttaggataaaaacaagaaaaatgtaaagcatttagttctgacttttcaaactccttcaagacaaagatatttcatctctactaaagcaccaggagtttcagtctctaatagtaaacttaccagagtgcattttgcactattatttatacatatttgtatatgtgattcgcttatgtactgtataaacaagtaaacagaattataaaacataacacatactgaaatgagtgccctatttcattttcctgagcatatgctatataagctttaattagcttttcttaaaagaagatcattttctgaaaaggttgatacattcttatttgtcaacaaataatatgttaaaaactggttttgggtaaattctttctttacattgatagaatagactttaaaaattccaattaaaatgtgcttctatatcttctttgatattatccttagactaaaaaattattcaaatcatcatattcatttagaggtaaaatatttttatggaaatctaccccaattacaaaccaccagatgtcaatactaactatatcaacaatgtacaaccataagttgtcatattcaacatgaaattggttactataagcaattctgataaaattgcatggcaactcatggaaggggagacaagatgccatcagctgaaaggaggatttcctttacactatagtaaacacattcatacacacacacatgcaacttaacagaaaatgttttctaattaagtttttaaaaatagaatctgttatatctaaatacaagtattgatttattttttaaaagtacacaaatatcattatcttgagtagttatattcaacaacttcaagagtagtgatttaataccaggcatattttatgcccagtcagaagcatttggggtgactctagtgtaacgaggtcagaaccagcacaaggtgtaccagtgtaatcagagaattaggcaaaaggagacacatgcaacagcaggtttaaaaagtacagcaatacaaacaccatgcgggactttcctctcatttaccaaacacaagctgcttagctagtttcagtaaatgaaagttattttacttctaggggagatatccttttcattgcttagccatcccaattgtgaaaggagatgtgaaattgtcctttgtcatagttctgttacctgccgaagagcactaacttgggagaaatattttgatgtctactaaaacaccataaaattatgtgtttaaaaaggaattggtataattttgaggaagagatgatgtttctgactttttaaaaataattcacaatggttatcgtaacttctaaatgtgttatcacatcatagaacaggaagaatcaaaggaaacagacaaaacagaatgggagagaactctcttcttgtggaaacagatatttcttaagagagtaagtatttatttattttggtcttacctgacggcagctcctttaaccaaaggtatgtcctctatgtaggtagtttatcctttgaagaacccagtggcttgtctcacagcccaagacagattcgagttctcaaaaactatccagcccaaaagaatacagaggaaaaagcttttcccactttctttcccaggaccagccaatagctgaagtcatgcaggaaacagagtagagaggagggaaagcagcttcttctccctgaaatcccgatcagcagaaattggaagttgttgtatatctcccacccagacttttgtttaaaagttttttctactgttgctaggtgttgttgggttcggagattaggtttctcctcttctgctcccttcacaacactgtcagagcaatggctatgttgaggagctgagctcgcgggtgctatatttaaccagtgttctcagcaagtcaagcctgtcaacagctgagaagtttggagccggctttactcagttcctaagcagctgggttatcagtggatacagcgctgctcaccctgtaaaagattgcgggaaaaccggcaggcccttttaaggacttctgctcatttcacagaggtaattattgtttgaagctcttaactacagactgagatttgggacttaggttttaaaatgtgaagagaaacagagcagcagttgtcttaggcagagcaatttactaatgcaatattcttctcgattaggctctctcagataaatgttctgaaataaaaaatgctttttaaaagtgtatcacttctgcataaatggaggtcttaaaaaagtgtatcacaactgttggttgtgaaaatgagtacaagatcacttccaaacagcttttgacactggtgtgtttcatttatagctagatcacttacctagtcatatcaaacttttgtccagctatgtacctgaatgttattaaaataatattaccataaaggaatgtctataacattatgattttgaaaggagtaacattaagaaggaaaatcttagcatcctcactcaggtcattcattcaaagtaacacacggtaaacactccaggaaatccaggacatgagatacctctggttgttgacaggcttgcctcatcattaaccctcaagtctctacaacatgaagaatgtctcaagatactttatgtgcttcatcctacataacaaaacggtatgaatctgccgagattgaaactttttagaaattgtttaattaactagttttggggaccgttttactaattacatatgtgaaattaacactaagggaaactgaaggaggtcctcttggccacaggtaaagtaggaagggagacacacacaccacacacatatacacacacacacagagagagagagagagagaaacattattgattaacaaactagaatatggccctgacaaaaatctcaccaataccattataaaggttgaccctcttcctgagatcaatttatcagattaaagataccctctttttgacatgcaaactgaagatgaaccaagggcatatgtaaaggtgtggatgtaatattttaagagttgcatacttgcagtaagtagcttatgtgctgggtaaccctatgtctctgagaaagtctgccacttcaatcaggagtgtgtgtatgtccttctttttaaagaaatgaccctcacctgctcaagccattcaaaaacatctcagttcttctcattccaaataccacactgacagcatgcaccctgcccctttaatgtatttactaccatacacatgtaaaattgcatttgctcagactcagtctttctgagtctgagccaaccatgatttaaaaaaaaaaaaaaagagacttctattaagatgaaagagctctcatgtgaaattaactgactcttctcgagctaatggatcttttagaaacttaatctattcacagtccccaaaagtgggttctaatagaggtagaaagtatataagtgaagtatgagataattcagaatcatcagaacttttaaaaaattacaaaggggctgggcacagcggctaacaccagcactttgggaagctgaagtggaaggatcacttgacgacaggagttcaaggcctgcctgggcaacacagcaaaaccctgtctctacaaaaaattagctgaccatggcagcacatgcctgtagtcccagcttcttggggagctgaagtgagattatggcttggggccaggaggtcatgggtgccgtgagccatgattgtgccactgcactccagcctgggcaacatgaccatgtctccaaaaaaaaagtggggggtcggggtgagatgtgggtaaattactgtttgaaaaatatatatgcttcccctcacacacaccaaatgcaacagccccaggttaaaatccactaaaaataaccctggggatatattatttca

SEQ ID NO: 585134 - DNA, 4001 bp, Homo sapiens
ctcaaggcctagaacctcctgggatctttctcccatatctttctccctagaaccaccttctttcttctgagtccctatagctattacacacatttggtactcaccacctgctggcttgggttattatttaacctaacatccagcgtgtttgtctcttcaattgcccaaggggaggatatcatttcaatacacccaatatttattgaacatgaactccggtgccaagcctggcctgtgggggatgagttggaatggtggtgggaggcgggggcagtggaggagagggctcaaagaagaagcagactttgtttctgcctcaaggactttctaatctggttagaagaacaggattagtaaacagatcgctagaatatgagacaggccacacgctgtgccgtgagaaaggtacaaactgagtgtgctgggcgttcagaggagacaggaatcagatttggctggcactgtttcaaggaagctttatgagctggagcagcagagatgggtagacagggaggacaggcactcctggcatgagaaatggcacagcaaactgtggaggtgggaaggagggagaacaaaggacttcaggactgtgtcttaacctcatggtgacattctttagcaggacccaatacagagccttccacacggtaaacgtgcgatataaatgctttgttccctccttggtttggagagggtgggatctttaggaccagcacttagtgatgtctttccacagaaggatgggtaaggagaaaacgtggctctgaataaaccaggggtttggagctaaacacagggaagggtcagattccaggggcagtttggggtcgtcttccttggccttgcccttctttcaccctgtcgtccacacccactcgccagtgtctgggctctccctactcccggcgtcgtgccagggatttcccaaaccgtccaaaagggctgggcttggtttgccagccccgggaatccctggagtctccgtgttccaggcttctgtgaaggatcagggaaggggggctaggaaaggggaggctcctcctggggattgcttgaattggccccctcaacacgggcttccgttgtcacgtgactgcgtcccaggtctcgcaagtctggggctggcgagctccagctatcctcctcccgccccccggactgagcgctggagaagcacggactgagcgctggagagcgctggcggcagcctgggtggctccttctgctcgtagagctccccacacctgctccctcccccagctgtgctaatccaggcgccacccaagcctggggtacccaagcaggggcaaatgggggatggctaggtctgggtgctccaaggccggtgagtgggcagggctgcggggcccacgcgcgccccggaggttgctcgccaacccctgccccagcgtgcaatcgcatggttgcggcggccgggaggctgcgcgccgagcgcaagccgcgagcacaaacagggcgaggaggctggtgtgagcgcctgggcccgctgccagcgcgccggggctggaacacaatgtcccgagcgggcgggcgggcgggcgagcgcgagcgagaacagcctgactcagcagctgggtaagtgggtgtgctcgctcaccagatcaaccgctcttgcagcctgcggtcagcgacgacccggcactcggcagctccctggaacgggaggggcaagcatacggcccgctcctctgctcgcgccccagcctgccgcgcgagacctccacgtggccggtttgcgcatccctctgccttctcgcccctctattaaagcgtctcccagcccccagcctgagcgcagcaggctctgcccacctgggagaagcactctcctcaccccacccgacaggtgtggccaggcacacagctgctgtgtacatgtcctgttttccccaaatctcacccctctgggacgcctcggaaggtcttggcatgggggatgtaactcttagttgcaaacagaggtaggagtttgttctggggtagtggtggagtagggagccgaggaaggggatcctaggagaaaagagggacatagggcaagaggatctcccctatctctgtcctcagctgacccagagttcagagtctcttcctgccccctcccctcaaaaccactaggcccctgaagatttcctcctcggagggagggagaggcaggtggtgtggtgttttgaagcccgagaccctgcttttctgcccccacccccaaaccacaataaagacccaataaagatcctgccacctagccacaaagctcctccttccccctctatgcaggggaaatggggtcccatttggggtccccactggggacttatgctgtccctatgctgtctcctggcgtcttgtggggccattgtgaggatgacagcagcccagagcagggttattcctgggggtggggacctgtctcacgtcccagcttcctggggtgcctgcgcagtgccctgagggatgctttgtgcctggagagtgccaggacaggcggggaggagtggttccgggaaaggccctggcaggcagcataggcctgggctccagggcctttgagagtgggcctaggggagggacctcaggctgctgaagtgcctcacctgggcctcctgccatctggtggcatctctggcaccctctgtggctaaagatgccaacacaggcctgggccgtggacccccttcccatacacacatcacgcttcccacacaggctcttacccagccaatgcacactgcatctcccagtcgagaggcaccttcactgccatctactcccaccttcttcctgatgcttgaaatctgtccgtgatcccaggtcagtgattgctcgaggctgtgacagggacactctcagacagcagcccactgctcttctggacttccctatctccaagtccagtcacctacaggacacctgcccttacatggcctagaagtgactgaactcatattcatgcccctcataccagctcctccccattgcccaccatgaccctcccagtcctaaaactcactgcaaaggtagattaatttttaactgctttctctccttcaccatccttatgtctgatctcttatcaaattcttccctttgttgcttttatttcaaaagatattgtttgttcattacttttctccttcaccctttcccctccagccccatagagtccacctttggcccaaattctcacagcatctgccacactgtcctttctttttccttcctcctacacaccctgctggaataatctttctcaaacatcatttattgtgtatgttatcaacttcagactcctcaaccaagcacagtgagtacactagctaacctgtgtactctctgtgatgggacctgagttcattcatggcatgtccaggccacggggtttagtgcagtgcctcctgcacagcagtagggcagcaaatgttcctcgtgacccattcatttggtggtgttccctttccatccttcctattctctctcctgccttggtctccccagtcccatcaagcctattggcttactggtgctcactggggcccttttgtttgaagtgccactatttttcatttccccaaaatctttggtggggggcggggggtggtggctggtggggaagggagaggctgacatccaagttaatatcagggaggttgtggcaaataccaactgcaaaaccttgggtgcagagtagaatgagggcagatgcctgctaggagggcagatgcctgctcagtaagagaacaaaaccacagaggagggcagaaggtggaaaggagagtggcgtaactagtggcttccctctgagcctgtgagctgcctttaatcttttcctttttttttttttattttttgagatggagtcttgctctgttgcccaggctggagtgcagtggggcagtctcggctcactgcaacctctgcctccccggttcaagcagttctcctgtctcagctccccgagtagctgggactacagttga

SEQ ID NO: 585135 - DNA, 4001 bp, Homo sapiens
acaaagacctcatagcttgttatggagaaataaaacaataaagaccactatattctttttaatctaaaatagtcacaattattggttgaagagttgatggttcaatggcgaactcttatcagctattagctaactgtaattacctaggcaaataagtaaaatgaccattcaatgaataataaactagcataattaaatcaagattagcaactttgttcttaacttaaacttaatctccgaagtataaatcttacctaatacagatatcaaccaagacacattagaagaaaaaaactgggtaactaaataaagtgtttctcacaaataatgagtattaataaccctcgttttaaaaatgtcatttgtatagaatctctaaattggtcagggccataattgcagactgtcaggcagaggtcagctgggggagagacaaacagaaaatggtgaagtgaaagtatgacaataaaaatttcccaccagaataagaatttttttcaagtcgattcttggcttttgattcaaacaccaagagaagcagctccctttagagaattactttataattctctaaagtaaaaacccttatggaggaggtggatagaatcccagactattaaaaatacttaaccaaaatatgctttaacttttcccttgtccacaatctaacaaaatgggaagacaatgaaaataaacactcctgtctacactcagagaggcaaagaaagctcccattcagtagtaagccttattccactggaaaacatactcctgaaaagtaaatccaaaaccacgagctcaaactgcttcatgcagaatttactgaacggcggccaaacgctgaacacactgtcctgaaccacactgaagggtatctacaattctgcatctccgcttacaacttgaaacttactacgctttcgccaccactgcagaacccgattttagagactacgatggtcctgccggttcgttaatcgaagaaagccactctgcaccctgacgctcgtagtgtctttttggtaatactggtttttgactcttatactgtgaccggtgcacctttttggacgaccaataaggcggaagacgttttcacgtcccagaacagaagagcataaggagccctggcacagcgttcagccgcttcggtatggcctgggagtgacgcggatcacctgttagacggcgctgcgcggactcctccacaagcggccgacagcggcgatgcggttccccaacgcttgtcccgaggcggcaggtgaaggcggggaccgcccgtccacacccggagcgcggccaccccgccaccatccccttcacagccccgccaggtgggcgaatccgccccgcgcccgcggcgtcccggcgctcggctcgccctggggtccggttgtcccggcgcccggacccgaaagcgaagtttggctcccgcccgcagcggtgccggctgagggtccggccgcctgtccggggagagccgggggccagagaccggaggcggagcgggacctgtcatcccgggcgggaaacaaaagcccagtgaggacgggcgggcgcgacccgcctcgcctctgccgggagaggccggcgggggcggagagcggcgcccgcggtcactagtctccgcgcctcccgcggggagcaccggccccgcggcccctggggcgcggcgaggggcgccgcagtggggccgaggcctcccgcgcgctcccctcgaggcttccggaccccgctcccccgcgacacgcggctcctgggctgcgaagccgcgtgggggtgggagctgaggcagcgagtgcgaccgcggcgggacctggaaggagggcgttcggctcccggggcgccgcggccggccgccccatctccgtggccatggcgccggtacctgtcgccgcgggggctcgccgactccgtcactctccgccttgcccgtgctccgctaacccttcagcccgcccagcaggccgcccgcgcgccggacaccgccgcccgagactggcagcgcccgcgagccggcccgaatccccggggcagcgcccggcgccgtcccgccccagccggccgcaggacccgccttccatagggccccggggctgtcagtccgcccccaaaaggcgcgcgggctgtcgatccgcctgtccggattggtggccgcgcgccgtccatgcaaatgaggccccgcccccatcatttgctcctccacctccccacgccagcccacgtgtctggcccttgccctttgtgggggccatagagaagggatggtggaaactgacaccccctcacatctcttacctcccgagaaattaatgcctaagcaagctagttgacttcccatctgtatcgtctctctgaaggcactgcccctcctatctgtccacagggcctacctagaggccggagaggggcaggccaggctgtttgttaggtcagctggccaggttagccctaggaagcaaccccattaagtctaagatgcccagtcgggactggggaaatcccacctcgagaaccaatttagcagatatcacctccctctggacacccagtgactgtaaagaccatactttctcttggcttgctacctttcaagcaggagatcccaggagattaaaacaggaagaggccttacggctgagttcggccaggtggggtggctcacgcctgtaatcccagcactttggaaggccgaggtgggcggaccacgaggtcaagagatcgagaccatcctagccaacatggtgaaaccccgtctctactaaaaatacaaaaattagctgggcttggtggcgcgcgccgtcccagctactcgggaggctgaggtaggagaatcgcttgaacctgggaggcagaggttgtagtgagtcgagatcacgccactgcactccagcctggtgacagagcaagactccatctcaaaacaaaaacaaaaacaaaacggctgagttcttccgccaactccgaaaggtagactgccaaccagatggctacctctgagttactcccatagagatgcaggagctgcacctgggccttagggaatctctaatcaactctctcatttttaaggaaacagaaacctgatgtcccatagctagttacacgtgggacctaatagttacctatggaaacctaatatcccatagccagattagaactcatgtctcctggctccaaacctgctctctttgcactatactgcattcaaacatttatgaagagcctcgtccagaaatcgccatgctgccttcaagagatgatgcctgggcgccgggcgcggtggcttacgcctgtaatcccagcactttgggaggccgagatgggcggatcacctgaggtcgggagttcgagacgagcctgaccaacatggagaaaccccgtctctactaaaaataattttaaaaaattagccgggcatggtggcgcatgcctgtaatcccagctattcaggaggctgaggcaggagaattgcttgaacagaggttgcagtgagccgagatcgcaccattgcactccagcctgggcaacaagagcgagactccattctaaaaaaaaaaaaagggtgatgatgtctgcagaaaagacaaataaagccaagactgaaaccgcctcgagggcaggggttctgtctcagtcatttgtctgtcctcagtgcctagaagcttccctgtttaccagttgccgaggggagtcactgaaacaatgtatttgttcattaacgcagaaaaacaaagttgatcaaaattcctctgcatactaataccaattgattaagcatctactatgcttaataatagcacatattaggcagggcacagtggttcacacctgtaatcctagcactttggaagacagaggtgggcggatcacctgaggtcgggagttcgagaccagcctgaccaacatggagaaaccccatctttactaaaaatacgaaattagccaggcatggtgacgcatgcctgtaatcccagctactcgggaggctgaggcagaag

SEQ ID NO: 585136 - DNA, 4001 bp, Homo sapiens
aaataaaacaataaagaccactatattctttttaatctaaaatagtcacaattattggttgaagagttgatggttcaatggcgaactcttatcagctattagctaactgtaattacctaggcaaataagtaaaatgaccattcaatgaataataaactagcataattaaatcaagattagcaactttgttcttaacttaaacttaatctccgaagtataaatcttacctaatacagatatcaaccaagacacattagaagaaaaaaactgggtaactaaataaagtgtttctcacaaataatgagtattaataaccctcgttttaaaaatgtcatttgtatagaatctctaaattggtcagggccataattgcagactgtcaggcagaggtcagctgggggagagacaaacagaaaatggtgaagtgaaagtatgacaataaaaatttcccaccagaataagaatttttttcaagtcgattcttggcttttgattcaaacaccaagagaagcagctccctttagagaattactttataattctctaaagtaaaaacccttatggaggaggtggatagaatcccagactattaaaaatacttaaccaaaatatgctttaacttttcccttgtccacaatctaacaaaatgggaagacaatgaaaataaacactcctgtctacactcagagaggcaaagaaagctcccattcagtagtaagccttattccactggaaaacatactcctgaaaagtaaatccaaaaccacgagctcaaactgcttcatgcagaatttactgaacggcggccaaacgctgaacacactgtcctgaaccacactgaagggtatctacaattctgcatctccgcttacaacttgaaacttactacgctttcgccaccactgcagaacccgattttagagactacgatggtcctgccggttcgttaatcgaagaaagccactctgcaccctgacgctcgtagtgtctttttggtaatactggtttttgactcttatactgtgaccggtgcacctttttggacgaccaataaggcggaagacgttttcacgtcccagaacagaagagcataaggagccctggcacagcgttcagccgcttcggtatggcctgggagtgacgcggatcacctgttagacggcgctgcgcggactcctccacaagcggccgacagcggcgatgcggttccccaacgcttgtcccgaggcggcaggtgaaggcggggaccgcccgtccacacccggagcgcggccaccccgccaccatccccttcacagccccgccaggtgggcgaatccgccccgcgcccgcggcgtcccggcgctcggctcgccctggggtccggttgtcccggcgcccggacccgaaagcgaagtttggctcccgcccgcagcggtgccggctgagggtccggccgcctgtccggggagagccgggggccagagaccggaggcggagcgggacctgtcatcccgggcgggaaacaaaagcccagtgaggacgggcgggcgcgacccgcctcgcctctgccgggagaggccggcgggggcggagagcggcgcccgcggtcactagtctccgcgcctcccgcggggagcaccggccccgcggcccctggggcgcggcgaggggcgccgcagtggggccgaggcctcccgcgcgctcccctcgaggcttccggaccccgctcccccgcgacacgcggctcctgggctgcgaagccgcgtgggggtgggagctgaggcagcgagtgcgaccgcggcgggacctggaaggagggcgttcggctcccggggcgccgcggccggccgccccatctccgtggccatggcgccggtacctgtcgccgcgggggctcgccgactccgtcactctccgccttgcccgtgctccgctaacccttcagcccgcccagcaggccgcccgcgcgccggacaccgccgcccgagactggcagcgcccgcgagccggcccgaatccccggggcagcgcccggcgccgtcccgccccagccggccgcaggacccgccttccatagggccccggggctgtcagtccgcccccaaaaggcgcgcgggctgtcgatccgcctgtccggattggtggccgcgcgccgtccatgcaaatgaggccccgcccccatcatttgctcctccacctccccacgccagcccacgtgtctggcccttgccctttgtgggggccatagagaagggatggtggaaactgacaccccctcacatctcttacctcccgagaaattaatgcctaagcaagctagttgacttcccatctgtatcgtctctctgaaggcactgcccctcctatctgtccacagggcctacctagaggccggagaggggcaggccaggctgtttgttaggtcagctggccaggttagccctaggaagcaaccccattaagtctaagatgcccagtcgggactggggaaatcccacctcgagaaccaatttagcagatatcacctccctctggacacccagtgactgtaaagaccatactttctcttggcttgctacctttcaagcaggagatcccaggagattaaaacaggaagaggccttacggctgagttcggccaggtggggtggctcacgcctgtaatcccagcactttggaaggccgaggtgggcggaccacgaggtcaagagatcgagaccatcctagccaacatggtgaaaccccgtctctactaaaaatacaaaaattagctgggcttggtggcgcgcgccgtcccagctactcgggaggctgaggtaggagaatcgcttgaacctgggaggcagaggttgtagtgagtcgagatcacgccactgcactccagcctggtgacagagcaagactccatctcaaaacaaaaacaaaaacaaaacggctgagttcttccgccaactccgaaaggtagactgccaaccagatggctacctctgagttactcccatagagatgcaggagctgcacctgggccttagggaatctctaatcaactctctcatttttaaggaaacagaaacctgatgtcccatagctagttacacgtgggacctaatagttacctatggaaacctaatatcccatagccagattagaactcatgtctcctggctccaaacctgctctctttgcactatactgcattcaaacatttatgaagagcctcgtccagaaatcgccatgctgccttcaagagatgatgcctgggcgccgggcgcggtggcttacgcctgtaatcccagcactttgggaggccgagatgggcggatcacctgaggtcgggagttcgagacgagcctgaccaacatggagaaaccccgtctctactaaaaataattttaaaaaattagccgggcatggtggcgcatgcctgtaatcccagctattcaggaggctgaggcaggagaattgcttgaacagaggttgcagtgagccgagatcgcaccattgcactccagcctgggcaacaagagcgagactccattctaaaaaaaaaaaaagggtgatgatgtctgcagaaaagacaaataaagccaagactgaaaccgcctcgagggcaggggttctgtctcagtcatttgtctgtcctcagtgcctagaagcttccctgtttaccagttgccgaggggagtcactgaaacaatgtatttgttcattaacgcagaaaaacaaagttgatcaaaattcctctgcatactaataccaattgattaagcatctactatgcttaataatagcacatattaggcagggcacagtggttcacacctgtaatcctagcactttggaagacagaggtgggcggatcacctgaggtcgggagttcgagaccagcctgaccaacatggagaaaccccatctttactaaaaatacgaaattagccaggcatggtgacgcatgcctgtaatcccagctactcgggaggctgaggcagaagaatcgcttgaacccgggaggcggaggt

SEQ ID NO: 585137 - DNA, 4001 bp, Homo sapiens
aaagggggcgtcccggaagctctaccgaccagtaagagacctgggtgctgagcacgtgaatcaacagatgcggatgactgtgtaggcgggcccaatgggagcacagcagcaggaagtaacttccagacagtgccataccgccaagcgcatgcgccaaacaggctccagtgataaagcgcctgggagatgtagtacccagtattaaggtccaccatctcccccagccactactaagtttagtttagacagcttctatgtgtcctcggagatagataagcccctcaaaaggggcgcactgtgaccactgctacctcccctaggaagccaaaagctgagaatgggatatgggctgaaaccttccctctggccccccacccccaaatctcacagcacagaccacaattcacaagttcctgtctcttttaaggtttaacttttaatcagccaaacatcttgcgcagaccctgagccagccctgcatcctggttcttcccctgaatgaccaccttccccagttcctcctgggctgcccggtttttgggatctatcgccagcaccttcttgaggtcagcagttgctttttccaggttcccaagggcagcctgggcaaccccccttcggtataaggcctttaaatggccaggctcccgctccaacacccggtcacagctctgggctgccaactgaggctgccctagcaacaactgacaggcagccagattggcatgaaggacagttcgttctggagggccaggtgggggtaaagtcaggagcagccgaagagcccgtccatagcatcgggcagctccttcagggttcccagctcgaaatagttctgtgccccttgcacgttcttccctggccagggcttccttctcgctagtctccagctcccaggagtctcggccttgagtgaaggatgccagtgtgagcctgacaggaggtccagagtgcccaggcagctgaagctctgcttcctcaccttgacacatggactccaagcatttctctatgagctccccccaagtttcctccctccatggccctacgcccatagttagctctgtccagccctctggcggccctgatccgaaaggaaaccccaaagccagtacccggcagcaggagcctagtttgggtttgtccaagccatggccacggattacgatcttcttgacaaagctcccatcggggcagtaccagagatcagaagcttgaagggcctctggcatctgactggttgatccatgagacttatgagagtctccttcaagttcagcaaccagtttttcagctccttgagtatgctctagaatttggctggctggatctgggcttacttccagctcaagcgtttcggtaggagggtctcggggctgctgcctaatctgaataactgaatcaaggttctcccgaaggttcttttcccactcttgttgcggctgagaggtgtccttttctccaattgtattgactggtggcgtctccatatggatgcttagtcccttccacggtgagtgaacagttttggtcagaaagggatgaaccaggttcaggtcagcacctgaaaagaaaaccaaacaatgctaatagcagggttcttatttagactcctttctcgtcctttcccattcttctgagacccaggcccctagtcctgaaagtccccagttttgctttcctccaaaaatctgctccagcttccccgttccacccacatataatttagaactataaattccacaattccctgcggttaaggtagccgcgccaactacggacacccggtcgggtcaataagtacctgcgcggccaaagtgcctagcatggtgacaggaggagccgggccattcgaatcacctctccttccaaagctaaatggctactgaatgctgccctcggagccttgccccacgcggagagggcagccggagaggggcgcggtgcgggaggcgggggtagggggcggaacaactgggaaagatactgacaactaaccctggagcccgcgagactccgaatctagtcaaattcctggcagccaatcgggagaagggaggaatctggttagcccgcctattgaacgtgacatcatttcctccgcaaccatgaagctccaggccttagcaactgaactaggccagagcaaccgaactaggcagaatcgaacagaatttggcgcggtcgggctggccaggctgctcaagagtcaaagtgggccaacatggtgagaccctgtctctactaaaaatacaaaaattagtaggtcatggtggcgcgcgcctgtaatcccaactactcggaaggctgaaacaggagaatcgcttgaacccgggagacagacgttgcagtgagccgagatcacaccattgcactccagcctgggcgacagagcgagactagagactccgtctcaaacaaaaaaaaaaaaaaaaaaaaaaaaaaaaggtgggccgggcgcggtggctcacgcctgtaatcccagcactttgggaggttgaggtcaggagttcaagaccagcctggccaacatggtgaaaccccgtctctactaaaaatgcaaaaatagctcggcgtgatggcgggcgcctatatcccagctacccaggaggctgaggcaggagaatggcttacctgggaagcggaggttgcagtgagccgagatcgcgccattgcactccagctttggcaactgagactctgggaggctgaggtgggcggatcacgaggtcaggtgatcgagaccatcctggcaacatggtgaaatctcgtctctactaaaaatacaaaaagttagctgggcatggtggcgtgtgcctgtaatcccagctacttgggaggctgaggtgggagaatcgcttgaaccagggagtcggaggttgcagtgagccgagatggtgccactgcaatccagcctggcgacagagcaagattcccgcctcaaaaataaataaataaataaataaaaagccgggcatcgcgcacgcctgtaatcccagcaatttgggaggccgaggcggcgggggggggcggggcggggggagggggcggggcggcggggggatcacttgaggtcaggggttcgagaccagcctggacaacatggtgaaaccccgtctctactaaaaatacaaaaaattagctgggcgtggtggcgggcacctatagtcccagctacccgggaggctgaggcaggagaatggcatgaacccggaaggcggagcttgcggtgagccaagatcgtgccactgcgctccagcctgggcgacagcgcaagactccgtctcaaacaaacaaacaaacaaacaaaaagtcaaagtgtagagaagtcctggaatggagactgggggcggatgacaatagagtggagaatggcagaggtcgtggtaaatgatagtggcagcagccttttatctggagacttcaggccctcctatgctaactatctttatgttcagagctcattcagtacagggtgttctccaggataaaacctcgggactctctctccaaccggccctgtcccttgggtgactacctgaggcttctctttacctttcctttcacatccatcattgcctttcaagtcctccttcatcaagaaatcttagtgcttttcaaacataagtgtgcatacatatcacctagggaacttgttaagttgcagattatgatttaggaagtctgttgtggggcctgtgattctgcatttcaataagctggttaatgcagatgctgctggttcataaaccgtatgtttttctttttttttttttttttttagagagatggggtctgctgtgtttaccaggctggtctcaaactcctggcctcaagccatcatcccatctcagcctcccaaagtgctgggattataggtgtgagccaccacacccagcaatgaaccaatgggatgagattctagaacagtctcatcccattgtcttctcccctggctctgtgcccctttagtttatcctacattttacatgtataactgg

SEQ ID NO: 585138 - DNA, 4001 bp, Homo sapiens
acctggtcatcgtgaatgtccttcagagtgtagctaaccacactgatgcccatgttgaccaggtctgaggaggccactttgaaaacctgttctgagaatttctgcctgtccttatagatctcctgtgataacaggatggtggggagaagggatgtaagttttttttttttttttttttttgctcactgcaacctctgcctcctgggttcaagtgattctcctgcctcagcctcccaagtagctgggattaccgacacccatcaccatacccagctaatttttgtatttgtagtagagaaggggtttcaccaggttggctaggctggtctcgaactcctgacctcaagtgatctgcccaccttggcatcccaaagtgctgggattacaggcatgaaccaccctgcccggccgggatgtatgctcttggatccactgtctctcacagactagtgtgggccttgggcccccctcattttgacatccttccagatggttccctgcccctaggccaacctccacagtcatgtgggccatgatggccctctggtggccctctaacgtctccagggcaatgtgggcaatctcagcctccgtcttccccaggaacatctgacaggcggccgccaacatctccttgttctgcccctggatttttacctgtagccagagtaggggtaggaaaggtgtggtgggggtctcatgaagtcagagaaaaagcagagagagaagggagagccctctaagaaatgcttcttccatttcagggaaagaaaggaggaggaggcaagtgccttggggtgcctggaaaagatgagactagcagaggaacttctctgcaggcaagggttgagaagactgtggccagaagatgtcttaatgtctgggagagagggtgatggggaagtggactgtggggaaaaggctctgaaagcttcacctgggcaatgccagtgactgagatggggaccccatggcgagtgtaaaccttttcactcttgacattgagggtcagtgtgttgagagagatcctaggggaaaaagaagggacagacagtaagaagaggaggaaaaagagaaaacggaggtcccccttccctggttcccttcttgcctacctctggatctgttggatgcagggcaggacaaagacacgccctccagccaccatgactggggggcttcggcagaaccctgcaaggtgtggggcagtgaggaacggtggcagagcttgaatgtggaagactgaggaactggcgggggtgaggggacagcaacccacaggagagaatctgggagctggaggggaagcagtctgggccttggaatggtgggaatcaaactgggcagttcgtggccatcaaggggcagaagtctggtgctgggaagttggtagggagagggagaaggggcagaggccagactcacaggggttctggggtcactggctgggaagggaacaacagtacttaccggagaccaccatggcctcatttgggccacaagtgaaaaacatggttcaggctggagctggaggagagggagggaaagcctttgcggatggggaaggcgcgctgtggcgtccacaggggcccatcctttccctttcccgtcaggccctcccagtctgcatccgccacggcccgtcccttctacacccatgggtccgctaaggcttttccctacaaaatccttaagatccccagctacctcttctccgcctgcgtatggtccctcccttcccctcgccgctccctttgataaaggtcccccgcgcccagaggcctgcagacctttcccctctctccctgcttctcggcagccccaggctccatctcccctcccccactcaccttccgggacgcgggcggcagcccggctggggtctcgggaagggcggggtcgcgcagggacctgggagccgggcaggggccgctcgcagaccagctttcctgggagctggccccgctcccgcgttccccaccctgccgcaccccgttgctgcggcagacgcgaccccgccccccgcaacggactaagcacccccacttcgccccgcctcggcccagtgcgctcggcccgcccctttcccggcaggccccgctagagtccgcagcccgcccgcccgctggctctcgggcccagccgggctgcctggttagcccggggagggccacatccctgccgccccagtcaccgcccttcttgagccgggaatcccgcccacgccgcgccacgctccgcccccgggtgagggacttgacctccgcctggcaccctggcgtaagggtgattgccacatctcggattcgccgcggggcaactacctgggaaaaccgcagactgggcaatgaaagactacatccggcaaccggatgctgggttctgtgactccaggaaaaggggctcctgggcccagggaggtgcgcgggctggggactcggccacggcgcctcccgccggtccttgccatctgaaggccgggaggagtggggagtcggcgcttgcaaagatacactcaagactgcagacagtaaatcaattttatttgtgttcacagaacatactaggcgatctcgacagtcgctccgtgacagcccaccaacccccaaccctctacctcgcagccaccctaaaggcgacttcaagaagatggaaggatctcacggatctcattcctaatggtccgccgaagtctcacacagtagacagacggagttgagatgctggaggatgcagtcacctcctaaacttacgacccaccaccagacttcatcccagccgggacgtcctcccccacccgagtcctccccatttcttctcctactttgccgcagttccaggtgtcctgcttccaccagtcccacaaagctcaataaataccaagagacctgcatttacagcagggggaacatctcacacccttgcataagttaaaataaatattacgtacacatctccatcacctaggaggacgtacataaatacatataaatattaattaggagcaataagaaataaattaacgacgctctccttcccaccgggcctagccccagctgggctgtgcctcggtctctatgcgcctcggtctctgtgcgcctcggtcccgcctcaagcaccgggtggcgtctccgctgtagtgttctgagttcaagttgcctcggaagtcccagttggggatacgctctcgcgcaccaggtacgcctggtgtttctttgtggtttttcggattctttttggggagtgcggggagtcacagttagaaggcggccgggtgttgctggaggaaagtgctgaggtccagagcgtagtccgagggctccgaagtcagattaaagggctcgaggacggcggacacaggggtgggcgccagggatgcggcgttaggggcgtcctctggaggcaggggcgccggcacaccctcttcagccatcaggatctggcagaagacgatggtgagcagcagaaagagaagccttttggctgggttcggttcctcgactggcagctggcgccggacctaaggggagacaaaacaggagacaggtcaggtcgaggcctctggagtcgggtcgttccccagtgactccagggcagcgcaccccgcgaatgcccacttcggcgatactcaccactcgagggtagagaaccctgcggctgcgctttcggtgcccgcgagaggcgctggggcgcccggcaggggccgctgcgggctccgggagagggtcgaaggtgaagatctcaggaccggagccccgccggggtcccgggatggtggagggggccggggtcggggcctgcaggatggtcatggtcgggtggcagctgcgagagtgacacatggtgagccgagcggagtgtaaggccaagtgagggtcggctgccggcagaggtaatttatgtgctcctgaaaattgggcgggtccttctaactcctcctcccgcagctggggagcggttggcagcagcgggctggaaattccgacgattaaacaaaggga

SEQ ID NO: 585139 - DNA, 4001 bp, Homo sapiens
ccccataatttcatccacagcatggggagctatctacaggttgctatgtctgtttctatccttctattacttaatttaaatttagtagatttcattctgaaatgtgcctgtcctcctttgtccacctctagtctggtcatcatttgactgtagatcccacgtcaacacagtagagagaagggctgggaagctgtccagccccagcattcctcagcacagtgattcacagagcagaaggcgaaaaagcaagagtgcagatcgcggtgggattccaggagctctcacaaacaaccccgctcggacccactcacatgcaacccacgggcaggtggcagaggaatcggaaaagcagaaggctggaatcgccacaaagccagggcagcactggttccagtttcagatcattttcagaaacaaaaactcttccagcactctgaaaattttcacttagaaaaacaaaagccaggagttgtaggtggggaagttggaagactttatttagttttattcctctcaagtactgtgcaaagtattcagtgaatactttcctagagttcactaatgggaagaaaaagaccctacggcaggcactgccttttatgagaaagtggcattggcatcagaatacctcgcataaacctgagccaagcattgggatgatgtatctaccaaaaagtcacaaagtaatgtgatccccaacttttcttcctttacccctgaagtaagagaacaatatatacactaaatagcatcataaaactggtaccctcgttggaatagtatctgacgatcattgtctgcttcttggatttctacaaaccaataacctaaaagccagtttcaagtgtaaaaatgcctgcaaaggaggtggtaacaagggccgccaaaggcttaggaatgaaaacctcgccacaaacttgtctctctctgcaggaagcttgcaagaaatctgacaggagcgcgctagcattttctgaaaagcattgctctcaaaggaagcatccatcctggctgcagcctcagccattggggaagggcgagtttctctggaatcagctttctcatttccctctccctcctctcaagacaaacattttctcccagcttgaacgttccccccgggcgcgcgggcctcctgccgcctggagccgagctggcactggagcgcttctcctctggagcgcagaggcacccgacgccctgcggcagctcgcagcctttcccccacgaccttctagaacagccctgctctgcctccctccggtctcccgagtgcgcccgtcatcctgcctcgcgagaggtgaacgcggagaaagtaggatgaccacctacgctcccgagaaattctgggcaaagaaaggcattaccccagtccgcacgctgaaagtcgcctttcttttccttttttccccgctgtgcctgaatctcccgggacacttagacggctggagcctcccgactccaaggcgggcgacggcaaagttaaacgccagcgcgctgcggtccccgggcaccgaggcgtccccgctcccgccacccacacagggcgccaagtgccccgacccgcgagtgacgaggacgcacaggctagtgacacgacccgtagccagcactgagcgggacgacggggcccgagcgcaggagggtgcgcggggagctgaggagcgccgggggcccgggcgcggcgcgtacctgaggccgccgccgaggaggcgacggggagcagcgcggccaagagcagcagcgccgcccaggacagccggcgcggcgcgcgcagggtcgccccggcctcgggggccatcgagagcccggggtgggccggggctgggtgcttgcggctggcaggggggcgctggccggagtctggggagtgccgaggcgccgccgtcgggtccccgccgccgtccgtctgttctgcgcgctctgcgcggtgcccgccgcgcccctgccccgcggcgatcgctcccggccgcacaccggcagccgcgctccgccactgaggccgccgacctcccgccgagccttttagctgcgctcgggcgccccctgccggtgtgcggggccggggccagggccggcgggggcgacccgggcgacaggggcgacgggggcggcggggcccgggctggaggcgggcggggcgcgggacgaaggggccggagcgccccggactgacttagcggttctgaacttggggcggtcgctgtgccgggccaagtggctgaggaagttcctcccctcgtctaaccctctcattttctggctggggaagtcgcccatcgcgccgaggagtgccctttgtccccttacagaaacacctctgcgccccaagtggggactcgggccgggacccctcacccggtccgcagcgctgtagttcctgtggctagcccagtccttccacgtccctacccgcacccggcgcgcccacgtcaggggttttcagcgtccttagaccctgctccgtctggctgtcatttctagggcgcgcacgatgcgggtcgaaaaggaacccagttttcagtgtgccttgttgcccaggccaaggactcagcggacctcgcctctcccttttctgtaattgtaacactgccccaggtctccctattcctccttctccctattcctccttccagcctggaagcctcgcggccctccagatggactcggagcgcccctggaggctacagtgacctaagctctaggaaggccgggtcctggacgccgcgtgctgctgtccgccgccgaccggtgtcctcgcagagataacctggctgaactcaccgcccagcgctatgtcagttctccctcatgacaacccaaaacttgaccggatttgtgttctgcagagaggaaaaaaaaaaggtaaatgaattgcaaagagatgaaaaccagaaatacagtatctctttgaatttgagcacccaggaaaggtgtaaacctaccgccttcctttccaggaaactctcctgcttcccagcaaaggtttttgtttgtttgtttttctttttctttttgttttgagacagggtctccctctgcctctgccgcccaggctggagtgcagtggtgcagtcttggctcactgcaaccaccatatcccaggctcaagccattctcctgcctcagcctcctaagtggctgggactacaggtttcagccaccatgcccagctcatttttgtatgttttgtagagacagggtttccccacgttgcccaggctggtctccaactcctgagctcaagcaatccgcccaccttggcctcccaaagtgctgggattacaggcgtgagccaccacgcccagcccaaacacactttcctgcattactcccttatgttatcatgtttccccacatgccatttaatggagctgtgtggtttctgtctcaccagcagccacccggctctgcctattttgggggaatggtagctccctccccaactccaaccaagtgacaggccccctccttactcccactccttcccaaagccccacttccccactggctcagggctctgcagtggcctagacagggtcactcagagttgggactcttctaacacgggctggtggaaaggtctctttctcccatcattcgtggatttggaaggatggtagccatggcaggctgaaacacagccttcctccccaaaaagacattcctgtcctagtccctgaccctgtgaatgtcaccttacatggtttattaaaaagcaattaagcatgctgagacagagagattatcgtggattatctgggtgggccctaatgcagtcatgtatgtaacttataaaacagaggagagggagattgacgcacacaagagaaatccaggtgaggacggaggcagccatgggaacgatgcacccacagcccagggatgctggcagccctcaccagaggctggaagaggctcctccagagcctgtgctggacttcaggccagtggaactgatttcagacttctggcctccaagactgagagagcagatttct

SEQ ID NO: 585140 - DNA, 4001 bp, Homo sapiens
tctgaaaagcaagaagaaacttacgtgttatctggagtaacactgtcctttaataaaccaagattttgctgtctctgtataaaacagtttacgggtttgtttatttagacaaggcaaagtggaggtggctctgaattaatcggttaagaaaatagagttttcttcgtgctggtgctggtgagctgaatttttggagggatattctgttcgctggtgtggtgaatattctcaggggttttttttaattggattttttttttttagtttcgattttgccttgatgggttcctttagcttttcctgctttggggttcgatttagttcggctttgagggtgtgtcaaaacttgctacagtcgtagacgaaagctccggacgtgcggtacagagactggctggaagggaaggccatttgacagctactattcccgttcactggagagttgttcaagccgatcctctgtgactcgaacatctcccgcaccgagtggaagttctgctgctggcccgggtagcctgcggccgccgccgccgccgccgcgctcgccaagtggcccaggtctccgcccgcctggttcaggtaccacgaggtgaggcggccttggtgggccgcagggtggtggccggcctcctggcctcccccgccgccgccgccgccgccgccgtgactcagggacgacgagctgctgctggtgaccggaggcagagagtagtcgggcagggggtcgtccacggccgagccgcccgcgcccccgggcgcgccctgcaagtggcccccgcgctcgccggccgcgtacaggctcatggcttgcaggttgcagtggtaggtcccggcgccgcccgcgccccccgcggcccccgcgccgccgccgccgccgcccgagctgcccgcgctggaggtctggctgcagggggagctgtagagggagctctggccgggcgagtaggcgccgagcgccagcgggggtgcgatccccgcgcgcgaggacgcggccgccgaggccagaaggccggagctgagctccgcggccgcgctctgcggcgacccccgcagcgacgtcatgatgttgtccacgctgaagccctggctatggtgcggcggcggggcggagggcgcgggcggcggcggcgcggaatccgcaccgtccaggctgagcggccgcgccgacggcaggctgcccggggggctgctcccgctggacaggctgctgctgctgctgtcggggctctcgatcttgggcaccgcggcggcgctgccgctgcccagggcggcggccggggacaggggctggggcggcgaggggcacgtaccgttctcggtcttgatgtcctggatgcgcacgggcggcggctgcggaccgggcgcgttgccgtcggcctgctccggcggcgcgggcgggggctggcggccgggcgggggcggctccttgaggtgcagcctgtccttctcctccttgtccttcaccgcgtccttcttcttgaagcgccgccgccgccgcaggaagctgccgttctcgaacatgttgtaggagtccgggtccagcgtccagtagctgcccttgcccggcttcttgtcgtcgcgcggcaccttgacgaagcactcgttgagcgagaggttgtggcggatgctgttctgccagccctgcttgttgtcccggtagaaggggaagcggtccatgatgaactggtagatgccgttcagggtgatcttcttgtccggggcgttctggatggccatggtgatgagcgcgatgtagctatagggcggcttcaccatgtccttgggctgcggctgcggcgtgtagggcccgtaggcgcgggccatgccgcccgggtactgctcggcgtgcgcagggtgcgagtacacgctcatgggggccggcatggcggtgtagccgcccccggccgccgcggccgccgcgcggtagtagctctgctcgccgccgaggtagggcaccactcccagggagttggggctggacacggagtagcgcgcctgcatggcccccgctcgccgccgccccgcgccgcccgccgccccccaccctcgctcgggccgggccgcgccgcgccggccgccgagtccgagtccgggcccggccgagctggtgccggcccgctgcgctgtgcgtccggctgcgctgccgcctctcccggcgctcgctggggctggctcctccggcgcctcgggctacctcggggcccgcgcggccgcgaggcggggtcgctgcgaggggagaaggccgggcccggccgcggcagaccgccttgcaggaactcgcggcgcagcttccaggcgcaaacgggggaaagcagacaaaaagaaagaacaagcaggcgcccttctcgccacactgcctgcgccttccaggagactctgccctgagctgccggcgaaggcggccaaataaccagggcggggggggggggggccgcgcgccggccgcctgcccgggccccgcgtcaccttttctcggtctctcgcgcgccagccgcttaaggaagcattgggaaaacttctgaacttttgagcatccgtcacccaggcgaggacttttttacgcagttacacttttttccgggcagcggagccccgccccgccagcggcggcagccaatgggaggtgagaaccgcctccgaatgagccggaggccgagccctgccggcccgctcccggaggccggaggaccgcggggctgaccacacgcgcgccggccgccctggcccgggccccggccctgcgcccgcgccggcgcccggcccgccgtcggttcgccccccgcagtccacctgcctgccgccggcgcccggcagacctcccaccccgggccctccggacccacgcccgccgttcgcgcagacttcctgggtcctcccgggaccccgtgcagacccttccttcgcccacggctcccgagtggccctggcgtctccgccccgcctcgtgctggctcgctctcattccttcgccagccccgccgacgccagcgctggggttgccccagcctctcctccccgccgcctctcccctcccgcagccccttccctcccttctccaacgccagtctcactcgggtcactgacgtctccggcttttctccacttggaggttctcctgtcctgaactcggctacaaaggacatgattttgagggctcggtcacagccaggccctgctcgcggtggggaagaaggttcgtcgcccatctggcccccctccatgacccctccccagccgaaatgaaggcaaggggtgcggggccctgctgggagtttccgacggccgttcacccgcgaaggatgagcccgccccgctgcgggccgccctgcttctcgcccccctccccggggggccggcccttggcggcctgagggtgcgggcggcgagggctgccggagcccggctgctgccccgcgctcccctgcccgcccgcgagggtcccaccggctcgccgcgccgccgccccctctgatcccgtcaggcccgtttcggctcagatgaggggtcaggctgcgggctcggtgacattagcaggtgtgatgacaagaagcaaataaatatgtctaagagcttaacgcttccccaggccagtctccatctccacatgcgcggggctgccggctcgcagagacaacgggtgtgtctgggggaacgtccagggtcgcacctagagggcggttcaaggattctggggggacacgcacggaagggcccccgctcgttgtgcacacgcctgagattcgccgtcgctgggtggttggaatgggacaggaagaagagaaatgagggaaagaaacgaaggagcgggaaagagccaggcctccctcccccggcacggcgattctgcattttagcgacttgaggagagaccctcccggaggctgaatcccaagtcgttcactagaagctgggggaagtggcgagctcaggagactgcgaagaagcgtgcgtgacgcatttaacagctccgctgcccctgatttccgaccatctattaaatc

SEQ ID NO: 585141 - DNA, 4001 bp, Homo sapiens
gggcaggcgcatttctcaggggagtcctagcagggtccttcaggtcctgccacccaggacctgtatcatcaatgtgggtccattgttgggcggggggggaggcagggaaggggaggagtctccaacagtttggtgaccccctccactggcaaatgtccctttagtgaaagatcctgggatccagctctgtccctcccaccccctcctcttaacacttgcccagctgcaaacatctcgctgcagacaccccaacatacagaacatatctgattctgacatttacttcgggacagaagtacagcaaaatgaacgcaaggaaaaaaagggacaaaaggaactagacacagcttcctgaccaagttccccaaaggccagatgccttctctccaagctaagtgagactctgaacgggagacctgcagtctcctgcacagggatccccaaagagcccaggaaggcaggggactttacaccacgctcacagcagccagacaattctgaagcttcggctgctggccagggatactgggaggacagtaagaccctgatccctgctcccacgaataagatgccggctttccccagcatctgcttttcccagtgccctcagacctcctagcttcggggtccctgtttgtgggagtggcagtggccgccagccctggaggcctagaagcggtgcgcccagctggctgggctggagcgtgctgcgttacctgagaggtcctcgcgagcgttctggtgcaagtagctctgctccagcgagtaggaggacatgctggagtgcaggcctgccgaggcggcggggttgctgctgggcgtcagggcaggcggctgcttgaggtaaggcgaggcgccaggcgagctccagtgcgccgcagggctcgtgtagggcgagtggcattcgatggcgctcgccatggccggggacgagggtaccgggctgctgctgctgtccggcccgtagtcgccgccgccgccgcccccggccgcaccgacgcccccgggtcccgcgggcaccgggcagctggccatgtaggtggaacccgggttgggcgacatgtgcgggacgtggtggtggtggtggtggtgagggtgcgcgtggctgggggcgcccgcgccggcgtcgtagcccgcgggcatcatgtcgaggccgccgtagccgccctggctgtggcagccgagcggcgccgacgggggcgcctggaagtcgaagccctggggcagcagcgacgccccgaagcccaagccgctcaccacgcggtggtacatgggcttgagcgcctggcacttccgcctgaagccgcgcggccggcggcggaacgagccctcctcgaacatgaactcgctggccgggtcgatggtccagtagtggcccttgccgggccgcccgaggcccttaggcagcttgatgaagcactcgttgagcgagagattgtggcgcaccgagttcttccagccctggtaggcgccgcggaagaaggggaagcgcgcctgcaggaactggtagatctcgctgagcgtcaggcgcttgctgggcgagctctggatggccatgacgatgagcgcgatgtacgagtagggcggcttctcgggccgccgcagccccgagctcgccttcttggcgcccccgctcccggcgcccgcgccgccgccgcccgcgctcttgcaggcagccgagggggcgctggccgaattggaggaggacgaggacgaggcgcaggaggcggaggacgacgacgaggaggaggaggtggtctccggggcggcggcggcggcggcggcggcggcgggcggcgggctcatcagggcggcctggagcgcgccggggaccgggctgcacgcgcggcggagcggggccggcggcggcccgccctcggtggtcatctgggacccgggagcgaggccgggccgcgagggcgggccccgggcgggaagcggaggcgccggagcggggtcggcccagaagccctgcgagcgccctagcccgccgcccgggctgcagccgtggccactccgggccagcgcttcggcgtcgcctccctcagctcctctggggcttctggcggcggcggcggcggcgggcgggaggcaacgcccggcgcatccctccccgagccgcgggccctgccttgcgcaacggcctcccaggccgcggggccgagcggccggcgccgggcgactgcgcccgcgagtgggaccgcggcctggaccccggggacgagcccgacgtctcccttcaggagcgctcctcgctctgtctctcggacttcctccctccctcgccctccccggccgccctcctcgctccctccctccctccctccccccccaccccgccctgccccctcctcgctccgcgccgccgcgctcactcctccccctcccgacctggcggccgcctccctctcttatctcgctccccgctctccagggtctcctcgctcttcattcctctcgcggcctcctcccctttccctcactcaccctctttccaattgagggatcacagactcactccggttctgccagggggacgacccccacccctcgcaaaactcgaccacctctgacttcatgaaatattctttctgtttgccccccgcagcaagccccgcgtcccatcccaggacccagccccgcccctccgcgcccccttcctcctcctggcccgccgggccgagtggtgctgctgcgggtgcggctgctcggagcctccctggccgccctccccagggccgatactgactccatctgtcaacttcgtttagactttgccgccctcagccacacgccggggtgccagacgcccaaaggtaacgtgccaatcctctctctttctggcagggcctgcaggctccccgacaattgttagggcgactgggggccgccgcagggttgcgggccgctggcgatcgtggacgttttcggaactttgagcagagggatttacactgagaaacctaggccaagtttcaaagactctggaaacctggatctcatgggacttagggttgcatttgcttccacttcttccccccacccccgcaccccagttagtgttctgtaagaaaaaagtgcaaaagaaaaaggaaggaaggaagaaaagaaagaaagagaaagaaaaagaaagaccctgagataagcgagatggctatatttatagtcagtcctgaaggggtgtgcagctgtcactaggtttacatcctccgtcttaacattgcccacccaaaactgtgccaggtctcagctaactcctgtccgagaacacttctccccagttgtggctaattcctccctaagtaagagtcaggctctgagagagatgtgccctcgggagcaatcacttccaatgagacccgacagttagttattggattacacgtgcagggaaatgtagtccgaccagggataggagctgggagagggaggaggagagcaggaggccggagctggcggggcctcccaagggctgaagggggaggcccagaaagaaggtgctgcagaccagcggaccaaacaggaggtagagctgggcaccccgctgcgtctaggctgaaaggaccgaggtgcacgggtgtgcctgctggggagcctggggagttgcaggaggcaggagaaagggaggttgtgcagtaatcaggaggaagacaccaggcaaagagccttcacagccgcacagcctaggcaggccccctggggcggcaggagccctgtgtgcccctggagtgccgggggactgctcctggctgagtgtgctggtggggctgtagatgcagagagggcgggtggggaggggaggggtatgtgggaggggggtgggccggggctggccccagacagtgacctgaggttgagtggaagcaggctttttccatcaaaccctgcctggataccacacacagagaccgagtgtcagtttactgccctgagccggctccttctccctaagctccacagtaattagacaaagaaaacctaaattagctgaacaggcgtcg

SEQ ID NO: 585142 - DNA, 4001 bp, Homo sapiens
agcagctggatatcagcagcccagcaggggcagaggagttaatctctttggatacccaactgcaggaagtcattacatcataggcctttccacacctctctccctaccacgtgtcccgtgccccaagaggatgataaggaacggtagagagtctctcttcgggttcatttacaggtagaagccattacggcccggcccagcccccaaacctcctcccaaacgccagagtgaatgaagcgcaggccccgcgtcccccacaccagagcccttccctcaaacagtgcctgaatccaggcctcggcgggagcagcgggtgcagccagtctggattgaggtggccagaccggccggttcgaggccccagaacatttcagaagcagctagtcagaagcaggtttactggagcgacatctccgagaagaaaaggtatcaatataggcaaggaaaggaagccgtccaggaaaaggtttgcaaccactgctttttctaatcggatcgatgtgcctgtaggtgttaacacccacaagctgaaacttggacccgaaggttctcattcagctagtgacgacgcaacatgctcctgcgacagactggaaaccacacatccaacccctcctccagacactgcgtcccaaacacccccacacctctcactccagccacagcgcccgcaccagacccccactacggtaaactctactccaaagttggctgcggacctacctcctcggtgctgtccggagaatccagcaaatgtactcctgtccgttcgcccttccctcgccggcgtcccctgccccctctcctcacctggccatgccccaagcttctggggagcctcattcacccctccgagaccgtccccaggtgccccgactccggggatcaaagataacccccaaagcctcgcagcggaggctccccctgccaaccccttgccctggagcccgcaagcgcactccgacgaatccgagacgcgtctcgcgctgcgcaggaggcccggcgggtcctgctgccagcccggggtgggtacgcaccttccagccggcagagctgttgctgtcgcccttatccttgaagtagggcacgcaacgcaccatccactcgtagatctgggacagagtgagccgtttgtccggggagctctcgatggcgcgggtgatcaggtccgcgtaggacaggtttccccaggcgttccgccgcgacgaacatttcctcggctgcccggagcccccagccgcccccggctgcggcggtggcagcggttgctgaggctgcagcagcgcctgtgtacccccgctcagcccgcccgccgcggtggctggcccagacccggggtcttgccctccgggtgccagcacccgggccgagtcctcaaggagcagcccggagcccagcgtgccgctcccgccgccgccgccgatcgccatggccgagccggcccgtcccccgccgtcctcgtcgtcttcatcgtcctcctcctcggggatcatggagtcggcggccgtctcccccgagggcttggcagggctcgcttggagctccggcctttgcaggggccacgtacaggatcgcggacggctctggggctcgaactccgggtccagctccacttcgagcggagagagcggggccggggaagccggtgcctctgccatcttcgccgcccgcccgcccgcggctggggctctcgcgctctcctctcgcgccggggcggggtgcagcgggggagggacgtggacgccgcgaaggctccggctcccgggcgccgccgccgccgcctggggaagcaccaaagaagagagaaggagagttggttatcccgggccggagccccgtcctcggcgagtcctcgcccgctgccgccacctcccagtcctgccgcgcccgcctcccaggaacaggaggacctgaagacgtgcggccagcgaacctggcgcagcagacaccgccccccggccaggccgcgatggagccgcgagcgaatcgacggcctcgcgcggggcagccccctccccccgccgcccagccgcaggtccctcccgggctaggcggcggggcggggagaagggggaggggcgcccgggggaggggcggccgcgcctttaaagcgggcagcggccggagctggcgcagccgagccgcggtcagagcccgagctcgggtgtgcgtgcgtttgtttatgtttcgctcgggcccgctctagtgcctcccgcggcgccgccgctcaagtctgtgctgtcttcggctcttctcccctttcctagcctggccgcctccgcgaccccccgtcaccccccacccggtcgaatggcccgagcccggggactgcgcgggcagctccctctcccctcttcgcccgcgggccagagggcgaacgggggtctgggcgcagatgggcccttgtcacttccaaaaaataaaggaaagacagaaagaagggggagcagcagcccagcgggtgttcgcagaggttcgagcccggcggggacggccacttcggggttttgtgtggtttgcattctcgcggacgtcgtcccctccgcccccttcccagtcgggatccgggggagggagcgagtcggaacataaatcttccaacaggtcgggaagcgccaagtctcccgggctgctagaaaacccggaccagcacgttcatcacctccttgctcccgctgctgccatcttgacagtttcccccttcccgagtcctttaaaaacactagcgggcgagaaggggggcgcgcacaccgcggctcagggaggggaaagggaagcgcccggcccagctcggaagcagatccggagtcaccgggaaggcggccgcccgctgcacggctccggcgcctacctcgcttccttcccttcagggacgcggcgggacgacgcacgatcccgcgcgggcccggggcacggcgaggagggggcgcgcaacctcggcgaaggagaagcgctcgggccgtcgccgcagcccgcccgaggaaccgcctgtcagctcgcgcgccgccaccttccacattcctcctcctcccttccacgagcagggcggccgcggcagcagcacaaagttatagacacacgcagggcgcctcaacctaggctgacggcgggcgggtccccgcccagggggagggctgggcggcgggctgggcggcgggccgggcgcgcggcgggcgtgcgtgtgtgagtgcgcgtgtgtgagctcgcgcgcgcctgcgcggcccggctccgcggggctgcgggcgtgggtgtccgggcgcgcgccgtgggccgggactcggcgggctcccgctgctgtccccgctgggctcctcctccctcccgagagtctcaacgacaacaaagcgcggcgctggcccgggagaggagggagaaggggggagaagggaggagaggaggaagaagtggggagaggagggagaagggggagcggcaggagcgcacagcccccgacgctccaaggagcgcagcggcgtggcctccctgactccgggcagggcgcctggtaccagggggtccctggcctgcgcgtccgcccgccgggctctgggccagccccggtgtccggttccctgttagaacgcgacaccaggtaacacccgagataagatgctggccgcaagatgggcagggttatcgcggtgtggaaatactgaacggcgaagatgttggtgcctgcacaacttcgataagctgatgctcacagattcgatcaggcaccaaaaggtttgcactgagtctctcacctcggacggtggaccacagtcgtgtttcacttttcatgggtttcatggcaaacgggggagaggtgtaactaactccggaagaaatgcaaatttacccccgtcctacattcaagagcagattccgaacaactgagaaggggaaataattttaatctaatttgtaaatgacgacaaaaccgctacgtgggcatttttgacttttaaaaaaagacgtatcctttaggttaaacgaaaaacatctgcacaagtccttat

SEQ ID NO: 585143 - DNA, 4001 bp, Homo sapiens
gccggcagagctgttgctgtcgcccttatccttgaagtagggcacgcaacgcaccatccactcgtagatctgggacagagtgagccgtttgtccggggagctctcgatggcgcgggtgatcaggtccgcgtaggacaggtttccccaggcgttccgccgcgacgaacatttcctcggctgcccggagcccccagccgcccccggctgcggcggtggcagcggttgctgaggctgcagcagcgcctgtgtacccccgctcagcccgcccgccgcggtggctggcccagacccggggtcttgccctccgggtgccagcacccgggccgagtcctcaaggagcagcccggagcccagcgtgccgctcccgccgccgccgccgatcgccatggccgagccggcccgtcccccgccgtcctcgtcgtcttcatcgtcctcctcctcggggatcatggagtcggcggccgtctcccccgagggcttggcagggctcgcttggagctccggcctttgcaggggccacgtacaggatcgcggacggctctggggctcgaactccgggtccagctccacttcgagcggagagagcggggccggggaagccggtgcctctgccatcttcgccgcccgcccgcccgcggctggggctctcgcgctctcctctcgcgccggggcggggtgcagcgggggagggacgtggacgccgcgaaggctccggctcccgggcgccgccgccgccgcctggggaagcaccaaagaagagagaaggagagttggttatcccgggccggagccccgtcctcggcgagtcctcgcccgctgccgccacctcccagtcctgccgcgcccgcctcccaggaacaggaggacctgaagacgtgcggccagcgaacctggcgcagcagacaccgccccccggccaggccgcgatggagccgcgagcgaatcgacggcctcgcgcggggcagccccctccccccgccgcccagccgcaggtccctcccgggctaggcggcggggcggggagaagggggaggggcgcccgggggaggggcggccgcgcctttaaagcgggcagcggccggagctggcgcagccgagccgcggtcagagcccgagctcgggtgtgcgtgcgtttgtttatgtttcgctcgggcccgctctagtgcctcccgcggcgccgccgctcaagtctgtgctgtcttcggctcttctcccctttcctagcctggccgcctccgcgaccccccgtcaccccccacccggtcgaatggcccgagcccggggactgcgcgggcagctccctctcccctcttcgcccgcgggccagagggcgaacgggggtctgggcgcagatgggcccttgtcacttccaaaaaataaaggaaagacagaaagaagggggagcagcagcccagcgggtgttcgcagaggttcgagcccggcggggacggccacttcggggttttgtgtggtttgcattctcgcggacgtcgtcccctccgcccccttcccagtcgggatccgggggagggagcgagtcggaacataaatcttccaacaggtcgggaagcgccaagtctcccgggctgctagaaaacccggaccagcacgttcatcacctccttgctcccgctgctgccatcttgacagtttcccccttcccgagtcctttaaaaacactagcgggcgagaaggggggcgcgcacaccgcggctcagggaggggaaagggaagcgcccggcccagctcggaagcagatccggagtcaccgggaaggcggccgcccgctgcacggctccggcgcctacctcgcttccttcccttcagggacgcggcgggacgacgcacgatcccgcgcgggcccggggcacggcgaggagggggcgcgcaacctcggcgaaggagaagcgctcgggccgtcgccgcagcccgcccgaggaaccgcctgtcagctcgcgcgccgccaccttccacattcctcctcctcccttccacgagcagggcggccgcggcagcagcacaaagttatagacacacgcagggcgcctcaacctaggctgacggcgggcgggtccccgcccagggggagggctgggcggcgggctgggcggcgggccgggcgcgcggcgggcgtgcgtgtgtgagtgcgcgtgtgtgagctcgcgcgcgcctgcgcggcccggctccgcggggctgcgggcgtgggtgtccgggcgcgcgccgtgggccgggactcggcgggctcccgctgctgtccccgctgggctcctcctccctcccgagagtctcaacgacaacaaagcgcggcgctggcccgggagaggagggagaaggggggagaagggaggagaggaggaagaagtggggagaggagggagaagggggagcggcaggagcgcacagcccccgacgctccaaggagcgcagcggcgtggcctccctgactccgggcagggcgcctggtaccagggggtccctggcctgcgcgtccgcccgccgggctctgggccagccccggtgtccggttccctgttagaacgcgacaccaggtaacacccgagataagatgctggccgcaagatgggcagggttatcgcggtgtggaaatactgaacggcgaagatgttggtgcctgcacaacttcgataagctgatgctcacagattcgatcaggcaccaaaaggtttgcactgagtctctcacctcggacggtggaccacagtcgtgtttcacttttcatgggtttcatggcaaacgggggagaggtgtaactaactccggaagaaatgcaaatttacccccgtcctacattcaagagcagattccgaacaactgagaaggggaaataattttaatctaatttgtaaatgacgacaaaaccgctacgtgggcatttttgacttttaaaaaaagacgtatcctttaggttaaacgaaaaacatctgcacaagtccttattctacgatccgtgccccaaatcgtttatttgtactctacgaatgcaccacacgcgacatgcacaccaaaagtctacacactagttcataaatatattttttaaaaaatccttgtaagtcaccggagatagctcagagtgtagaagcgggctcctcaacgaccccatacacaaaaaggtccagcccagcgtacgcaagagccagcccgcccagccgcctccgggctccgggctttgcgcagcgcccgtcactcaagtgacgcgcggccccgcccctgcaccaagctagttcgacgcgtacaaacagatgatgtcatcgtatccacacgcgcgtgaccccggagctctccgccgcgtcgccattcgctgcgccgcttactcgtcaaggcacgccgcgcgctgactggccgcggccaccagtctccaggccccagacgcccctctccgcccccccgcccccgccccccagcaaataataaacaatcgagtaaaattctaaggaaggagagagaggagagggaaaaagggagagggcgcactagaaaccaatccttcgcgcgctggcggtgggagggttcaaggggggacgcgagaggacagcggacgggaggaaggcagccgacttggggcggtgggtctgccagcgaagaggaggcgtcgggggaggaaagttgcagcgcactcgactgggcgcgcctggcggggtagggggcgctagggcccggagcggcggggctgggggctcgggggcggggcgcgacccgccgagggggcggggactgaatggcgccggccgacacgtgcgggaggagggcgggcgcgcgccacacacactgggccggggcgcgcggccctggtagccgcgcgcgcttgtttaccagcgcacgtgggtgttatttttaaatggaatgtggcgctggctgcgctgccgagtggcgggcgcgtggggccgcccgcgctggcggagggacgcggcggggcccgcggcgcggcctctccgggcgctgctcgcgagacagctaggctgtccccactgcgcgccgct

SEQ ID NO: 585144 - DNA, 4001 bp, Homo sapiens
acgaatctaggcaggtctccgaaaccggggtgaagatgctgaagttcaggtaaaaacccgcattggccaaaatgctcccgggctttctcgggagtcacccgaatggcaacttcaggctcgggtttggttctccggactccccacccctattcccggctccaggcgccgcggtcaacctgcggggagactagacgttggggtgccagacacgcggtgatctccagacgcccgaaacgccaggcgccgagtgagcgaggaaaccagccgggagggggctggccagggaagccggggagcaaaggaaagagcggggcgcgctctgggctcagggttcccataccctttccccccaacctaggatcggggtgggacgcaggtgtgttcacgagatcgccccagttgggggacacagggaatccgccgccgtctgggcctgtctcaaaatccgcattccgcgaaattacccggtcctttatgggggcggccgggaccccaggtcgcattctagcgccactggctgtgctctgacgcagcccaaggaagtttgtttggcgtggatgaggagcccgaggctgaagcgccgccggtcagagaggtgctggggttgtccaggggagataccagactcctcagttggggcgggggggggtcctgctcggtcactccgggctccttccctggtggcctccgggcccccgtggccgccctctcttccccccttaagtggtgaagcgggagctctctccacagcgggtgagtagaggtgtcagccagatcgtttccccaccctccacctccggcgcacaaatcacaggggccatttccagacgctctcaagtccccaagaagttttccgctctatccccgagctgaccgagcgatggaaaaggggctgactggccctggcacttccgaggtgcgacctcagcaagacaagtcccctcttcaccagagacgacacggcgggtaggaccgcgatcccccgctctcttgcccccattttcatctgtctccggcgcgtcctggggagtccggtaccgactagagttggggggagccacttcccttcccagctctggaaagtctgggccgggaagtattctttgtctgactcggggcggggagggggtcgcgcccccgtacaccccattcccagaggcccggcggggagggggcggggcccagattcttggggaagggcgggcctcggtggcctctccggccgcccccctccccgccccggcctccggctgcccccactcccgccgcgccacagcccccacctgttcccgaggcagctccggcccgctggggcccgggccaggggcggaatgtcgcggctgcgcggggtcagtgcgccacggccggccctggctggaacaaagtgcgccggcccgggcccggctcctcctggcgcccggcgcccagcgcgtctcgggcgggcagtttgcaaacacaaagtgagccagcgagcgggcgagagagtgcgcgagcgagggagttggtctggtcgcccgcccagcccccacccacgtccctgggcccgacccgccacctacctgtcccgcccggccgctccgtgcgggctccggcccgtcagcccgcgcggggcatggggctcgctccggtcgcagcccgggcccgccgccgcccgccggggctgcccttccgcgccgccccgcgtcgcgcagctcccgggcgtcctcccagcgcgccgggccgaccgccgcgcgcctcaaccccgccggggcatggcactttgtgggctgcttggctcgctccggctccgctcttccttcccggtccttccgcgacgctcgtcagctcgctccggctcccgggctcccggaccccggcgtccccgcccccggcccagccctggttccggcccgggctcctccccgccgcgccgccgccgcctgcgccgcgccctcctcgcgggctgggggctccgtcccggccgccggccgccggccgcactgtccggtccgcagggacggcgggctccggactccgaggggctgcgactgagcctgggctgcgagtggctgcgagcgggcggcgcgcgggcggggcgggagggggcgggggaggaggagggtggagagggaaggagggagcgcgcggagagcgagggaggagggagcgagagagcaagcggcggagggaggggagaccaacttctagtgctaccataattcgcctaaagcaggtgcagcaactttcaccccgcctggcagcccgctgagagcgagagaaaaccacgtgcaccaaactttaggggaggaaaaatgggaacgtggggagaagacgtgaggcggcagatctgaaaaagatggtaggtggagggaccccagggattcaccctggcctcggactaatcctatggggcgcttgcaaaccccggccatcccctggagtctgaaggtacggccaagtcctgatcccacacggttcactggttcccggcgggctgcgctcggcgcggggagtggccgggggcccagagacggagccagtgtcaggcccgggccctgtctggcctccctcctgctccccactgcgtgggggctgggggtgggcttcctgagccgagggtagaaggtggggaggccccttcagggctttgtgaacggtcaccccctggcgcgcactgcctccctctgcggaaagggaatttcccgtaaagtgctctgcgaaccagtgaagaaggggcccaaggccagagccatgcgggcaaagtgaagtgcaaagttgaggcaattatccggacaaattagattgtaaacaaaaccccgcgtctctgaacatcgcttttgcccagggggactggagggattgtggtggtggcggcgatggtgtgtttgggttgggagggggaggtctgggtgaggaaatgcccacggcccaagggggagggctgtgttgttagcagacgcaccactcagagtcccgtggaaatctcaatacccgtccccctccccgccccacacacgccggaaacatctcccatctgtctgcatgtgttgggggtggggagaagtgaaggaggcctcaggggtcctcatgaagtaccccaacccagctcagtgatgccgggtccccatgaccaagggaggatcctgttgtgggatcaggacaagaagacagtggctcttgaagcctctcctggccctaaatcctcaggcaggtggacaagaggctggcatagtatgtgagcccctgtggagtgggagctggaagcctgaggtgtggggtcggagctgcaaggattgatgcttagttgcctggggggaggggatttcttggccgttccagtggtccttgaaagaaaaggggacctcagagaggaggcaccctcttgggttgtttttcatcacttctgtcccttttctgcaatgttagtgacacctgcacaggtccacattttatgtatttgcctttttgggcaggtgggacaggcatacttaggtcctgctggagcgttttagatttctaggtgtgaaattgtgcagggaagactctaagtgccatttatgtggatatctcagtgtcctttccagtgtggcaactgagataaccatagccataagaataaaataacagctaacatctgagtcgtaccacccaccagccatttaatcttcacagtaaccccaggagggagatatttgtattatctccattttatagaagaggaaactgaggcacaaagagatcaagtaacttgcccaggcttacacagctgctggtcagtgatgagccagattccaactagagccacttcagtgaggacaagaaagaagctcatggtggtctctgaagcgacactgcctgcttgtgggttagctgaggggaaggatattctgggagaaagaaagcccttggtagtactatctgatttaccttctgttgaggcccagctctggtggaaatcatggtgtgtggacagccctaggccaagcctggagtggcaagtccttgtgtcagaccagctgggc

SEQ ID NO: 585145 - DNA, 4001 bp, Homo sapiens
cacagtgaagcatcggtcaatagcaagaaatcactgaagagcctctgacatgtctctcacactcagtcatacctggaaatgccacatacgtacacggatgggggcccagaaaccccaaacagtagtcatatcatttatagtgtggaaaggttccctgatgtacttaggggggagggaagggacataaatcaatggaagttgcgacaaaaacagtagaaataagacgaagcctgggcgttaaagaaagacaaaaaaagtccttatgaagggaaggaggagcaggcttcgcaaagaaactaaaacaagaattgctttggtcctctgtaaagttataaaacacaaaggaaaatatcctggactaagtttaaatactcctgtcaaaatgctttagctttaaggcacgtttgatggagattttaaaaattcatcttcctctggattcaaagtgcaaagtccgcgcgcgggcccgcgttcccgcctccccgacggcgcgcactcggcgttcccgggccccgcggcgctactcaggctaggagcgtctccaccgggtacggcaggtgcgggccagggcggcggactgaggccgcctgcagggctgcgggcagccgcagggggcagtacaggtgcgcgccgccggccgccgggcctcggagtggcttggcgggggccgccgccgggagaggtgcaagcaggaggggcggcgcggtcggtggcacctcggcctcgcgcgcgcccagccgcgccggctcgcccgcgccgtacgcgcagagcggcagcagggccctgcagggcgccgcggggaggagcgcggggaacgcgggcagcggcgggcagggcgcggcgccccactgaagcgtcgtcccgggggccgtgtccctgaggcggcggctgcggaagggcttgcgcaggatgctgtcgatggcgaaggagctggagaacttgcccgcggggctggcgcgctcctcctggcgggcgggcgagcgcatgcggggcgaggccggggcggcgggcgcgggcggcggggcggcggggaggcccggggcctcctcgggccgcagcccgggcgcggggaccggcgcgcggtggctgaggcgcttgcggcggcggcggaagaccccgtcggcgaaggtgtactcgctgttggggttgagcatccagtagttgtccttgccccagggccgcgaggggtcgcgcagcaccttgacgaagcagtcgttgagcgaaaggttgtggcgcacggagttgcgccagcccgtgtagctgccgcggaaaaaggggaacttgcccatgaggtactcgttgatctccgccagcgtcaagcgcccgcccgccgagtcgcggatggccatggcgatgagcgcgatgtacgagtaggggggcttgggccgccgcgtatatggcttgctgcgtgcaccctcgccgctccccgcgccgcccgcgcctggccccgccgccccggcctccgcgccctccgccaccaccgctgcagcagctgctgccgggatcgcctcctccgcgcccggcccgcctcccgcactctgttcgccgtcgccctgcgtatctctggcgccgccgcccgcggccgggctgttggccgcgcagtccccatctgagcccagggagtcgtctcccgccgccgacagcggggacggcgcgtcgctgccgcccgcgccctccaggtcactgccctgcttgtccccgtgggccgcgcgagggacgaacacctccaacttcatgcccgcgcacccagtccctccccggcgtcgtaccctcttccttcgcgcagcctagagaagctggtgccagggaaggggatggcgatccggggccggggatcttcgcctttttctcccgggagctctaccctggtcttccgagatagtcacttttccggagtcctcttccgctgggctttttctctggaggggctgcaagtgttgggtggactatggggcggagagggaggagttgggtgggtgtcgccttcggttcgacgttgagactttggggtgagtgtgtgcaggggccgcggttccaccctcgggtgcccgagcacgccgggcttagaaggctttcctgccggagagaagcagcatgcgcatctgctgctcgttaaagagcccaggaggggttcttcactggcggtcccaggtcccgcgcgggcgtcttcggggcacggaaatggtgccggatgatgtgcgtgccaccgtgggggaaggtccggcgccttcagccttgagcacccgcggaggcgagtccccgaggccgctgcgcccgcagccgccttcccgctcccagcctccggggcagcatctccccgctggcctgccgcggctgcgtctcgcctccaccttcgggccggcccaatataaccctgcggcggctccgcgggggcggggcctgagcgcggacggcaaggggtgggggaacgaggtggccgaggtggtggcggctccccagttccccagctccccaacgggcgcgcaccaggcggaggccacactgcagcgcggcggcaaagtcgctggcgcaggttgtttgttttgggtcggccggccccgccttcctcctcccgccaatggggagcgcgcgcgccgctgtgggtttgcgcgtgtctgtgagtgtgcgtgtgtgcgcgcgcggggccgctccgccagccggctcctccgttcaggtgtgggccccagccccgggcagcccgcgagggctccctgcgccctggagttcggggacgcagtttaggcgagtgcgcctggttggggggacacgccacagttcccctagggggacacctgaagggactgggtctaggggagcagggactttgctcgggcctaagctgcacgcggcgtatgtgcttctgtagtagtgaaaacgatgctgcttacgaaagcaaacccctgtcgtcactgcagaggtgctgaacagaaattgcgcaggacacttgcagtgacctctttcgggagccttgtgctgtgccccttcctatgagctcctttcaaggaccatcttgtcttttcctcttgttttaatgaatgcactcctgggcttgaaattgtatgcgcctttttggatgacctttactcttgctcactaaatgggctccgactttcacttttctttgtcttactttacctttttctttacctggctggtgactcctgcgggaggacagcagcgtcctcctcttcccctggggcggctgtgtctggcgcagggtgctgggctgtgcctgcacttgtgtccctgcggaagcctcagatgccgccgagctccgccgcttggttcccgggatctgacagtcaacaggaacgacggagagggcgtgttcccgggggcgggggcaagaacaaaccggttcacggccatttctttccaatattcctttgggacttttgctgtgacctcactggcaccagtgtcggacaatctcgaaaggggggaccgttcctcaccccagggcgcccggggcgtgatccccacgcggcgtcattagtccagggagcgggcgcctcggccccgggaaggtgcacttccagcccgctgccctgccacgccgagtttcctcctttttcctgcctttgttgcacaaaaagcgacggagccgctagtaggtgggagctcacctttgatgtttattttattactttccaccatttgtgttgaaaacgtacacaatcctctcttatctttattcagggagttttgaagccattcacaatggggcgggcaacatgacagccccagccacagctctgttatttttgtatttggggaaggatcgcgttcggagattagactgactttattaagtatgcgcctcgggagccaggtggggaatggctgctttttgggagatgagcctttctggaggggtctgctcagctctagccttggagttgatggttcactagacctggagagggaagtgggatgagacaaatatgtatatctatatatatatagcgaggtaaagaggcttggatttggccagggataaa

SEQ ID NO: 585146 - DNA, 4001 bp, Homo sapiens
aaattagccgggcgtggtggcaggcgcctgtagtcccagctacttggaaggctgaggcaggagaatggcgtgaacccgggaggcggagcttgcagtgagccgagatcgcgccactgcactccagcctgggggacagagcgagactccgtctcaaaaaaaaaaaaaaaaaaaaatgagtacattttttgaaagacattcccagtctaaggtttcactggattcaggaagcaatgagatcagggccaatgacagtctccatttgcttcccaacccaccagaccccaagtatccattgtcaagactatgttttatccactttgtattcagtcactactagaataatctcctttaccctccccaactcaccaggcccactactgtctatgcctggcacttggaggggtggtaggtggatggatggatggatggatggatgggtgaataagtacataaaaactttcctcttttgttgcaatataattcatatttcattcaaataccaggataaagtctttatctcctcttcaaggagatgttgtcctttttcctatcaaaatttaccaaatgtctgtagctggccagtttctaatcataataaaaaccaaaagatatcataatttgggtagcatatctcaggatctgggaattaaaaaaaaatctatatcatgatgtcactgagaacattagtatcttctaagtgttgtcttctacattagccctgtatattcccatcagaatgaaagggattaggattagagctagggctagagttgatatattaccctggaatgtttcaaaagttttttttaaaaaaaagaatctgaagtttagatttgagaatatcattaagggaagtcttataatttaccttcaaacaaaatgcaattttattgctaaagtgaggcatgagttattttacagccaaagagaaggtacagtattaaacacatcatttgtttattttgaaaatacaccctggacctgtggatgtacatactgtaattgaagtcatctcaacaacaattactggccagtttcacactcacttagcgggggaggtgtgtttcaattagtggtttcttgccagtacttcctcatactttttaggcaactctttggacattagggggttgtagagaagtagaaaggaaaactcattacccagccctcagagagttcagaaattaagtataagtttgtactactcacggctctgcctgtaggcttctgtcctcagccacgtagttagaaggaatatagccttgtagttgctgactggagccatctcgtcttttctccaagtgtctggcaaaccaccagccctcatgcaaagtgtccagaacttgaagtttgtcacctgctcggaagctcaagtcctcagcagtccgagcctggtaatcaaacaaagccacaaagtagtggccatgcctctgtgactggggagagcaaagggcccctggattttcaatcacggttgacttgtctgcctccgtggacaaacaggggagatagggttctaggtactcccagagcctctgacagatgttgctcattgtgccttggtggggagaagaggagcagggcttctccctctccccttagtctctgcgatccaccttatcttccttcaccaggcaactttgaagtcagcaccaactcaccatacttcggagagtatgcaaagtcccgtttcagatcagtccagcagctgggttgcagcaagtcctacctggagagacttaccggcttgctttctgtggctggaggtgctaccccgaggcaaaactgagcaggagctgggcagctgctcactaggaaggtgtcttttcttcttatctgcttaagaatcccacaacaaaaataaaataaaattaaaagggctttatttagacaaatatctgagaacagaatggtgccatcttgccttttgtcccaataaaaagttagcaagaggaagctactaacccctggtaaaacctccacgtcttgctttcgccaggagctctccccctgtttcaagtctgttcctgtctttcgaccagtccggatctggacggctctctcctttttgctaatgaataaccaaccagcagaggctgttgcctttaacattctgagctatgaacagactgtaataatttccccttacttcctggtttctttctgtctgtgatctaaatggtattctgacctctttacccctcccatctcccacacccaagatagaccagatcctttaccaaactgttaaagcagccgctaaaatctatattccttttgtttcatcctggagaaacaggctagcccaggtagctttttgtcttgttatgttcccagcactgaaattcacggcagagatttttttccctgacaaataggagtagaattgttttgccaccactaggggaaatttaaaaaggcaaattaaagtatttaggtatttcttgtcagacacagagcaattggaaaagaaccatcaagtcactcccttttctcattaccaagaatagattttaatagcttcaaagaatagtcacagtctggaaaagtaagaaagcagctgactaaaatgctgagaacccaaaatgttgctttttcccacagacatttaatttcctatccttcaagtactatttgggaaacacacacacacacacacacacacacacacacacgctacacaccaactaggtgaccagtagagaaaaaaagagtagaacagaaaaagagctctttgcacactgctgtgggggctctttctgctaaactttgacctccagatctatgctagttcttactaacttggcaagaactcaggaactaatgagactgacatcaggacagccatctctagacaggcagtggtttttgcttgaccttccctagttcggagcagctgtctcacaaatatgtgccctggcaaaaacagccgggcaatgagtctggcagatcaacgtacggtcatttatactagtagacagcattgcaaacttgtttatgaagtgtcactgatctctctataagactttttttttatttctttcttaaaaacaatctttctaaatgttgtgagacccttgaacctggctaacctattcctagtacaagctcataacttctgttctttttcaaattgcaaggcatttagtaatcagaataatcaaactcaagaaaaaggaagaaagaaaggaagaaagaaagaaagaagaaagaaaagaaagaaaaagaaagaaaagaaagaaagaaggaaagaaagaaagaaagaaaagaaaagaaaagaaaaagaaaatcagagaaccatggcatcagcccaacctgctattactttgtgcaaaaatcagtccatagcagtggacagatcaattggttaaaataaaatcttgtgttatgctcccaagtttctccaattgtctttggagtcagagtacaaataacaagttgacagaagtataaaagccaaaagctgagccaaatttttgttgttgctgttgttgttttgttttataatgatatgagacctaaaatagactgtatatgtaatttcatattatatacaaaacagaaaatatataataccaaatgaccataaaggatattttgttccaaatacaataatggatgtaaaagcataggattctattaatgccccaacagaggcacagatgctgaagtcttccctgagacatctacatgatctaaaaatgaaaaaaaaaaaaagaaaagaaaagaaagaaagatttggaagcaacctgagagatgtattcaaacccaatttgtaagtggggttttagatttttgaattgtcggggttctaaattcagatatacctttactatagttatgacaaggcattctggaaaaagacaaagcagcagacctgcacaccacagtcattgagcaagtgagtgaaattcaaaaagcggccaaccatccaaagatgtcaggtgagcaatggcctgagaacgcagagctgaggggtggaaagagagaaggtttctttg

SEQ ID NO: 585147 - DNA, 4001 bp, Homo sapiens
ggcaacttgttctggggagagcttgggagaggtcagctcagccctgtcctccccaggcagcaagacagggggatattcagccaccgctggtcagcactgagcttcatctccatctgtccatgccccatgtagcctccctcggcttggctggggagagggggccagggcttgtctgtgctgccaacctcaagcccccactatagatgagaagccaccagtccttagtgagactggatacaggcgctgccactcacttcctggggcagcaaaaagtgcacatgaagcactttgggttctcacggctcttccatgcgacacaatccagctgcagggtctgtggagcccaggggaccggccccactcccctccacctgccgtctgcgtgtactagaactccaggtacgaattcacatagatccagggtcctgctactgtacagaggtttccagaagcccctggagccaactgccccccagaacagcacaatcggcattgtgcaggtgtggtgtgtgcatgtttacatgtgtgagtggtgcgtaactgcatgtgtgtggtgcgcacatgtgtacatgtgcgagtggtgtgtaactgtgtgcatgtgtgtggtgcatgcatgtgtacatgtgtgactggtgtgtgcatgtgtgtggtgtatgtatgtgtacatgtgagtagtgtgtaattgtgtgcatgtgtgtggtttgtgcatgtgtacatgtgagtggtgtgtaactgtgtgcatgtgtgtggtgcatgcatgtgtacatgtgtgactggtgtgtgtgcatgtgtgtggtgtatgtgtatgtgtgagtggtgtgtaattgtgggcatgtgtgtggtttgtgcatgtgtacatgtgactggtgtgtaactgtgtgcatgtgtgtggtgcatgcatgtgtacatgtgtgactggtgtgtgtgtgcatgtgtgtggtgtatgtatgtgtacgtgtgagtggtgtgtaattgtgggcatgtgtgtggtttgtgcatgtgtacatgtcagtggtgcgtaactgtgtgcatgtgtgtgctgcatgcatgtgaacaagtgtgagtggtgtgtaactgcacgtgtgtggcgtgtgcatgtgtacacgtgcaagtggtgtgtaactgtgtgcactgtgcatgtgtgtggtgtgtgcatgtgtacatggtgcgaatggtgtgtacctgcatgtgtgtggtgtgtgcatgtgtacatgtgagtggtgtgtaactgtgcattgtgcatggtgtgtgcatgtgtacatatgagagtggtgtataactgtgtacattatggatgtgtgtggtgtgcccacccccttgacctccagcagatgcggcccctgggcattcctgcaggtggggactgagcgatgcttacttctgaccacacagaggccaaagaactgcgcgtctctgatgctcgccacgttgcacacttgctggaaaagctcgcggccagtagccttcacctgcaaaagaggtggggaggggttcagggaggggccggcacctgtccccagggaggccacctcagcaaacgaggcccagcggggcaccaggtggacgacccagtcaggcatcccctgcaggtaacaggtctgggtctctcactctctcccaaagctaaacaccgctgcatgcccatcagagcacctgtgagtgccgggaagtgagggtggagggggtggggtgctctggacagtggatcagggctgccccctccatccctgtctgtctctggtgtgaggatttcccgagaccagtcagggacacacgatgcagcgtcaactccagggccgccctctgggctctgtcctcgcacggcacaaatgaatgcttggttccccatgagcgcgagcatcggtgtctcacatcatccatcgcccaactgatgcgagtgatcccaacagtgttcctacagctgagcctctcacggcagcctctaaacacccagcgtctggtgcgtgtccctgtttccggcgtcccgtgtccacatttccggtgcccggtgtccacatttccggcgtcccgtgtccacatttccggtgcccggtgtccacatttccggtgcccggtgtccacatttccggtgtcccgtgtccgcatttccggcgtctcgcatgtgacactacttcacgcctgttcagccccggcatggatgggattggcgggcatcccctgcagagctcttcctgagtcctgtctgttgcagcgctggggcccatccctggtcaccgggcagcagaggcagcgttctcaggcagaatcgcagggcgccaagcctgtgacggagggtgcaggacggttgccgtgcgctctgctctcagactctcccgaggaccctcacttggggctccaagaggaaacctcacagcagggcacagctggggcagctggatctgcaggaggccattttgcgattcttcatttgcatgtttcaagtcaaatgagtatccagcttactaatcctgagttaatcctgagttactgtaagactgacttccttattgatatggtttggctgtgtccccacccaaatcgcatcttgaattgtagttctcataatcttcctgtgctgtgagagtgagccggtgggaggtgactgaatcacgggggtggttcccccatccagttctcatgatagtgagagagttctcatgagatctgatggttttataaggcacttcccccttcgctgggcactcattctctctcctgccaccctgtgaagaggtgccttctgccatgactgtaagtttcctgaggcctccccagccatgtggaactgtgagtcaattaaacctctttcctttataaattaccaagtcttgggtatgtctttattagcagcgtgagaacagactaatatgattattgtctgcttaacttggtgaggggcaggccccacaatgacggtaacacagatcttcagtgagggtcttcccagcccatccctttcgaataactgggcttgacacatatttggttgaatacagggttcctgtctaactgcagacacaggtgtgcacacactccaatagagcgttccctgtctaactacagatacacacgagtatacaccccaatagagggttcctgtccaactgtagatacggatgcgtgcacaccccaacagagggttcctgtccaactgcagacacagatgcatgcacaccccaacagagggttcctctcctactgcagactcagatgcatgcacaccccaacagagggttgctgtcctactgcagacagagatgtgtgcacacaccaacagagggttcctctcctactgcagacacagatgcatgcacatctgatagagggttcctctcctactgcagacacagatgtgtgcacacctcaatagggggtttctgtccaactgcagacacagatgtgcacacactccgatgggggggggttcttgtctaactgcagacatagacgactgcaaaccccaatgaggggttcctgtccaactgcagacacagatgtgcacacaccctgtgggggggttcctgtctaactgcagacatagatgactgcacaacccagtgaggggttcctgtccaactgcagacacagatgtgcacacaccctgtgggggggttcctgtctaactgcagacatagatgactgcacaacccagtgaggggttcctgtccaactgcagacacagatgtgcgcacaccccgataggaagtggctctgtggttgccaacttgccaggcccagcaggggccacaggagttgcagaggcacttcagggagctccgtcaaaagcagatgagcacgattcacctgttcagaacaggcggttcactatgttctagctgcatgatccctcagttaaaatcttaccgtgaagttccgtgcaagaaacctaaaagttccagctcttatggggtagggggccaaagccccagcatcttccccacaacaggtcctcttatgacccctcccccagcccgaggcactgctggggaccccaggaaact

SEQ ID NO: 585148 - DNA, 4001 bp, Homo sapiens
tgcagacacagatgcatgcacatctgatagagggttcctctcctactgcagacacagatgtgtgcacacctcaatagggggtttctgtccaactgcagacacagatgtgcacacactccgatgggggggggttcttgtctaactgcagacatagacgactgcaaaccccaatgaggggttcctgtccaactgcagacacagatgtgcacacaccctgtgggggggttcctgtctaactgcagacatagatgactgcacaacccagtgaggggttcctgtccaactgcagacacagatgtgcacacaccctgtgggggggttcctgtctaactgcagacatagatgactgcacaacccagtgaggggttcctgtccaactgcagacacagatgtgcgcacaccccgataggaagtggctctgtggttgccaacttgccaggcccagcaggggccacaggagttgcagaggcacttcagggagctccgtcaaaagcagatgagcacgattcacctgttcagaacaggcggttcactatgttctagctgcatgatccctcagttaaaatcttaccgtgaagttccgtgcaagaaacctaaaagttccagctcttatggggtagggggccaaagccccagcatcttccccacaacaggtcctcttatgacccctcccccagcccgaggcactgctggggaccccaggaaactacaggacatcccccattagctcaactccagcttctcgttgctgggtggggacacagagtcttggggaagattttgccacaaacatagatgtgggcgtttacgtaaacacagaactctatcccgaagcagacaagagactcccagattcccaggggacttgaaccaggatattactagcaagtcatactccattccaggtagcaatgatacattagctatgcagaaagtcatcgttcttcaacaaaccactctcattttaattgccacattttcattatccacattaatcattaaaatgaaagtaccatctcaactcctgtcgccatgaactcaactaaaacaggtagacaaaatgggggaaagggaaaagaaaaggaaatagagaagcatagagatggtgacgtctgaacacaagacaggagctgctccttggaaaccggcttcctggcgctcttccctcagcgctccctcccgggaaggatgtgctgaaccataaacttatttctcacagcaacgtctatcagggatgtttccttcacaggcccagtgaaagggctggcccttgacacctcacagacacctggcctaagcagagtgaggcggtccagggactttccatacacaggctgtgtcctgaggctctgctcaccccatacccctgctcacccccacggccctgctcacccccacggctctgctcaccctcacagccctgctcacccccacggctctgctcaccctcacggccctgctcacccccacagccttgctcacccccacggccacccagggccctgctcacccccatggctctgctcacccccacagccctgctcacccctatggccacccagggccctcctcacccccatggctctgtttactcccaaggccatccagggccctgctcacccccacggccacccagggccctgctcacccccacggccacccggagccctgctcacccccacagctctgtttacccccacggccacccagggccctgctcacccccacggccagccgcagttgctcccggctgggcagcagcacgaggacatccctgtgttccgaggccatcgcgtccattcccagggtcggctcctgctgactgcatgcaggcctctcaggactgggttccatacatcgcgcccctgaaggagggaacgtgtcagggtttgtccgggcggggtctatgcccctccctctcgggggcaccgccatgctgtcgttactcggccctcccccgccatgggtcgcaggtgggtgctcagcacctcccagatcacagctgtgctttccgggacccgcccttgccgagcttctcactgggaagggaattgagagggaagcctgggctgggaatccagcatggccaagccaggacaagggtcagagctgcaaatagctgggtgtgtggagggcgccaggaatgcaaataaacaacctcaggctgggcacccgccatgcagcactcccatgcagggtagctcagcagccagcctcggtgtgggccccgtgagaaccaggctgggggagacaggacccaactcctccacctgacaacccctatctcctcagggtgcctgctccttcttctataatgtggagagggctatgcaaaccccatgggcacagatgccagagccagggctgctggggaagatggagcagcagcagggcaggacgaggagggcgggaggaaggcagcctgggtgggcaccctgccccacacacctcctgtggcatctgttatcgacctcaggaagcagcacagctgccgttcctggacaggttctgccaggagggaccctggctccctttaggggctggaaactgaggacacttccttccttgtccagggccagcaaatcccttcctgcctgcagcagctggaaggccaggaagggggtcctggcttgcgtggacagcagccgggtgcatcagcacgaggggtggggacatctcccgcagggcctggaacccctgaggccgctcagcagagatgagcaacgccttcgagctctttggcacagtgttaggtggggaagggaccccaggatcctgcctggccctgggaccacccagacctttgggcgctgcaggtcaggagaggcagttcccacgggcctgggctgtggaattctgtcctcagccgtgagctccatcagtttcctgccatggagtctgggatgctctgggaccttcctctagtaaggggtctggacctccggacgggccgttgttcatcttaggaaattcgcactccagccgccttaaggcctggcccggtgggtttaggaaattcgcactccagccgccctaaggcccggcccggtgggttgagaagatttaggaggcttaggcctcacctcccccggaccctggactgacactggctccctccctccctccctccgctcagatccagacccttcccagaccctcgaggccacacatgtgtgcccaagacagcagtggcggtctcttttctctccacagcaaacgtagagctgttcactatggaagatgtggggatccctttagctgagagcacaaaaagttttaaaaatggcaaaaaaaccacaaaaaaaaacagccccagagagcagaggctggatcctcatggccctgtgccactggcgcctgagcagctcgtccctgtgccgggtgccctcagccgctgcctggagtcacagtgccggcgtatcaggaagggcggcagcagctgcacctctcaggatgcctgggcgcaggacagtggcagagggcaggcaggggccagggttggggggtggcagaacaccaccggcacacacagcacagaggggacaacaggcaccaggacccctcggtggggagagccggggacacggtggggagttgtgctgggtgcactaatgatcaaagcgatggttccccacgtgtgtgcaggtgctggtgtgtgcgggcgctggtttgtgcgggcgctggtgtgtgtgggcgctggtgtgtgcgggtgctggtgtgtgtgggcgctggtgtgtgtgggcgctggtgtgtacaggtgaccgtgggccaatgagctccaaacatcattagtgagaagaaaaggaaaaggaatggaaactccacatttgtattgataaacacaataaatggattcttgtcaaagcaggacgtccctggccccagctccttccttcccacccagagtctcagggccacaccgttgaggttcagacctccagtgaaggccgccgtccatctgagtgccagggagagctgggcttgggaagcccccgttgtat

SEQ ID NO: 585149 - DNA, 4001 bp, Homo sapiens
gtaggattggctatccttctagaactcctgctgaatggtaaagctttgaacaaccaggtgacctgtaccctctgttcctcccaacttgggaaacgccataaaactgacccctatacacagctcttacctcacccaggccatcggggagctgaccgtgggaggggcatggggaagggttcccactttattccccccgtccttggtgggctgtcatggcaaacagtctgcagagaagtcacccggatccctctgggatacacctggggctcacctagcataggaaacagagacactgattaacaaaaccttctatcttcacccccaactgttaatgaaaactgacctaacagtccatcccacctgggtatctgttccagccctaatgggacaaaaacaccaatgaagaaagtaaaatcaagggcaaagggagcacaaatcccaagccccacgggccctgagagggacagacaccaagaacatcaataagtttgaagtctaagacgaccaaagaccttttaagtcactttagatctccctctgagtcctgttacaacaaacaccaaaaccatcaccttacctttgcagagaactttaactctacaaagagctttctcaaaaggacactgtgatatagtagagacagcactggtttaagactcaggaaaccaatatatcggtcagttttgttgctactaagtatctgggagacttaagtcaacgccccccccaactcccacctaaggccttagtttttgggggaaccatctataaactggggagcttctagcttaaataacttgcagaggtaaaaacgtaagacaaacttcactaaaattgacatgttcatcttccaagacaggctgcttcaatttcgcatttggaagcttgatagattttctgctccccaagctctgaaaggcctaattttaacataaatgttaacagtaagccaaaatttcaggatatctgagcccaaggtagacaagtcaacaagccaggactctgcagaccctggacatcccacattcctgctctggagaaacacttcccagggccccttgcaccctgcatccttggacaacttccaggtaaaaggaccccatccccttggtctggcttattttctggaaggaagaagcaggctcagggaggtgtgcacagactaaagataggttgctgggaaaatactggggcttgagccaccgacgggggcacggcgcgggcactgaaacgaagaactctagggtgcaagatgggggaggggctgaatttccctatcaccatctcttctccttaagatatcaggatgtatcagatagcccactgaggagggactgcattgagtggaaatggggagaggcctctggtctgggataggtatggatcaggggcaggagtgagaggggggtgtgggggctgaaaacgtatgaggacgtttggggaaacatgagcaagaattttggatgtgggcattttggatagtgcaaggagaatggggatatgagggatcctaggaatttccgggcagtggaagcatttgggggcatccaagagaaatggtgggtccgtgggcatagcaggagatttgttgagtgaatgagggggttctgagggctccaggagatgcgatgatgtgtccagggcggagagggtagaggtgggttgggggagccagaggctgcaggacaggctacaggactgtcaaggggaatttctacatgcccgtaaggaatgaggaggtctgggtgcgcgctgtccccggatccccgcccccagccccggtgctccgccgcctgcccgcccgcccggggcttcctagggagggagtggagactgcggcgcggcgcggcgcggcgcggcgcggcctcggtgaagccgcctcgtccccgccccgccgcgccccgactcacatcgccccgcggcccgggcggcgccgggccccgctcccgggtcccgctgcagcagccgccgcccgcccggagctaaggcctccccgccccgccccgccccgcggccgcggggtcggaggtcaccggcagcaccaacgagacgctgcgggctggcggacccgagcgggggcgaccggcacgcagcctagaaggtccctttggaggactttgcagtcgggagcagtgagcatgcgcagacgccagagggcgctcctggccaggggctgagcaagcccggaggggacagggcggagcctgcggcggaggcggggcgcggaggcggggctgaggacaccaaagttgggggtggtccggggagcggaaaggggacggagggttgggcgagaaacgaagggaaggggagagggtctgaagggacctgaaaggagaagggcaagacgatggaacctggaagagggttgaggggaggggaaggggccagggggaccactggggacaagggggagagaactgaagggaaacacgcggaggagcggggctgggagaccacagggagagtttggggagacctgggaactgcggagagacagggctgcgggcccggcgaggcgtttccattcagcgaatggttgaaaacccagcgtaaacgcggctcccggcgtctgctggatgcctgccgggcgcagtccgagccagagagcccttgcacctgcatggcagaggccatggagcccgcacatttccaccctgagatcccataaatgtggttttgttttccttttttttttcctccccccaatctgcagctccaggcccctccctgagccgcccctctccaccagccggggaggggcgggcgggggccgctggggcgtgggagaggaagggccgcgctattagggcgggcgggggcggacgggggcgggcgctgaagccttggggtggggaccgggtgaggggcctgacggcagagtcggtccagaactgcccggacagcgacgcacagcgagggtgagaccccagcggagtcctggtcccctcccctaaaatcccagcagccagaccgggaaccccagcggactcgggaaacaccgcgtcccagccccggaggcgggcccgccaagttccagaaaaactctggggatctatcgagagggcagttggcgggactgggcactccccttccttctccctcccactgtccccagaaatcttcccatccctccacctccccaagccctaagtcctctcgggctctgcccttcagggcagcgggtgttggggatgtccagctcctgagccctcttgcacggaggctctgcacggaggcaagacaaggggttcagctctgtcccttatctgaggtgggagggggaagggaattatggaaggaatccagctggcctgttagtaagggtgttccagtgctaggtggaggtggagtttggctgcctttggggagattggaagggtgaggaatagaggcctgatttctgagtgttgtttctgtgttggacaattctatgcaaactagagccaaaatggaagagggtgcaagtcccctcctggggccccagacgccccctcctttcttgctgcctggagcaggggcagtgctgttagtggctactcctggtgtgaacagcccatcctggccaccttccacaggaaacctgacctgaaggacagaagaggaaggaagcaggtgggtgtgaagccaggaaggagggaagggtggcacaggacatttgaagtgggagtggaggggcggtgctgaggagggttcagtgctgggaagcaatattaactgttacagtccaaaccctcacctcaaccccagtacgaatccctggcccagtcttagaggccagggatttgatgatgaccctcctgtgcccagctactttcagaatctatcccagctctcagaagccaggtccccctaaggcttcccttagcctctggtatgatcttgggcaagttaattaacttgtttcaactgtcaagtggaatgaaagagattacctcataagattattgtgaggatggactatattatgtaatattctagaagagtccttggcacagagt

SEQ ID NO: 585150 - DNA, 4001 bp, Homo sapiens
aagggttaaaatatgctattttggcacatttttaaaggtaaagaaactcgaaaaatagcaggtgcatgaagagcactttgccctttgtgctgtttcttaggagagaagatgaaattccagtatgaaaggcactctgtactagaaggaaaggcaacatcctaagcttcaaagacaagaagtagaatactgtacagaacttgctaaaatttattatttaagtctccccacataatttagtcacacaatgtcaatttaattcttggacccagcagagaccctaacagaatggaggtgtaatttttctacccctagagtagagcatggtaccatgtatactatgtaatgttaatataatatatagttcatactctgtattgtgtctactaaatatagtatgttaatttggatgtatactatttatgtagtatatagttgattcaaataaatactgtttaatgattccgttcttttacttaagaatatattatgtgtcccaaagtcctggaattacaggtatgagccaccgcggatcacctgaggtcaggagttcaagaccagcctggctaacatggcaaaaccccgtttctactaaaaaatacaaaaaaattggccaggcatggtggcgtgcgcctgtagtcccagctactcaggaggctaaggcgcgagaatcgtttgaacccgggcggcgaaggttgcagtgagccgagatggtgccactgcactccagcctgggtgacagaatgagactatgtctcaaaaaaaaaaaaaaaagaatatattatgtgtatgtttctatatatgcacacaaaatatttctgttttgaaggacttaatacttgtagcatttagtcagaaaagacatgtgcaacagtttaagaaattacatgcacattttcacatagatctcaaggtaaaatctaacgcacagatttttgtgtagcacctttcatacggcagtatgataactgggttgtgttaagagtaccattctagaacctctttaaaaagttcctagagccacacatgggtaacatgttaacattaagtagccaatggtgttcaatgaacagtcgtttcacatactcatgactatgttttaaccataacttcatggcagaacgactgtaaattggcaggtagcagcagagcaaccataggccattgtgcctgagtcaccgctcgtgtgatgcccctgcacaaactgatgaatgtctgtagtagctcgatgttgtagtgtcataactacagcttaatatgcgcaactatgaagaagctgaggagtcaggagtatctgaaaactcttacagtcacacggaagaaaaattccctgttcatccagcagaagcacttaggcaggaaaccacatattcgacacccggaagtgcgaaacgcgggtaacgcagtgggaggtgaaaccgacgagggtgcaggcagcaccaggcggcgaaccaggcccgctgggtggtggctggaggctgcgggtggggacaaaagcgcggcagacgagacaaaagggagcgcactcaccagaaccactcgctaccgaagctgggcacggaaaacactccccagtggatgaagatgccgaacttggcctggtcaaaccacgcgggcagctggcgggcgtccagggactcccaggtggggtcgaagcgcgtggcgctgtgggcagggcacggcggcggcggcagcagcagcaacagcaacagcagcaacgggaacgcgagcctggggagctcctggggccgcatgtcccggcgcaggccggctgtcctctctgcaggctcccgcggcctcgggagcgctgttcttccgtctctgccgctgagtatgccgcgccgcggtcacctgaccaagtcggacttggaaaccggccacccttccccctctggggcgggagtggccactctcccgggcgttccgaatgacctcaggagggctgcatcgctcagcataactaaggccagcattaccccaaagccagctgggacggctttgctaaggctctgtcctcttgaggggaaaatatgagtctgagtcagggccttgtggccagcgcctctgccctcaagcagacacgaccctgaccaagaaactgcccaagaagacaatgcccccagcccaccctggtggctgctccacacgtccgaagcgtgcacgagaaggtcaaggcaggaacttcagccgggtctcgccatgatggaacatggaaagcaacctagatccttctcggcctctgtatcagctcccaagatcctgcatgttagaaccgtggttgtcaaccttgaatttgtatcagatgaaattccaagagcttcagattcagcagttaggttggggcccaagaatttgcgtttctacccagttcctacttctaggatgttctgatgttgggccgggcgcggtggctcactcctgtaatcccaacactttgggaggccgaggcgggcggatcacaaggtcagaagatcgagaccatcctgactaacacggtgaaaccccgtccctactaaaaatacaaaaaattagcgggacgtggtggcggacgcctgtagtcccagttactcgggaggctgaggcaggagaatcgcttgaacccgggaggcagttacagtgagcagagacggtgccactgcactccagcctgggctacagagtgagactccatctcaaaaaaaaaaaaaaaaagaaagaaaacaaaattgtgatgtttctgattggtggtccaaactttcctgagaaccactgcattgaacaaggagatgatctgagacaggtgaaaccagtggaatgaatgtttaagaaacctgcaagcttgggaaaaaaggccagcaacttggaaagattaatcaaaaggatatttgggaagcttatcacctccacctcttgtttggtttgtttgtttgtttgtttgtttgtttgtttgtttgtttttgagacagagtctcgctctctcgcccaggcttgagtgcagtaacatgatctaggctcactgcagcctctgcctcccgggttcaaggattctcctgcctcagcctccagagtagctgggactacaggcacatgccactgtgccagactaatttttgtatttttcttttcttttttagtagagacagggtttcaccatgttggacaagctggtctcaaactcttgacctcaggtgatctgcccgccttggcctcccaaagtgctagaattacaggcatgagccaccaagcccagcctctcctccacctcgtaagtgttttcaaagtaaagccagaatcctcaactgcttctgcccccatgaaatcattacccttcaatgagccaattcaaatgctgcttcttttgtgaagctttctgccaccacccttccctcccagaatgttgtactttccctgatctgcttcataacacctccttccaagcacacataggatttcacgcatcctctagtagctaggtggtacaggtctgatttcccatcagactgtgagctttttgagggcattcataatgaccttcttttctgtagtgcctacaattacagcagaaaagcagcactcaaaatgtttgttgaagctctccagtgaactggggttctaattattgagtgaagaacttgacactaagtggctgttgcctgcattatcccaacccatctctgcagagagatgggagcagcagagggcgctgtcactgcaggtgtaggggcatttttcctctccatgacatgccagatggccccccggggccacagctccaccgtaagagtccccaattttgttttgtttttttacagtgagggtgttctagaggaaagggctcaacgaatccaattgcaatagctccagtttgtgataaagatgacaatttttttttatttgagacagagtctggttctgttgcccaggctggagtgcagtggcacagtgttgactcactgccacctccacccccggggattcaagcaattatcgtgtctcagcctcccgagtagctgggattacagacc

SEQ ID NO: 585151 - DNA, 4001 bp, Homo sapiens
atgaaaacaaaccaacaaaaattcctgacattggagaaggtattaaggcaatattaactaacaaattccctagatgatggctcaactttcccttcctatttcttatgtagcctgagacttgctcctttaaggtgatgaagcatacatctctctccaccaactgcaagagcaagaatggcactttaatttatattcccctcaaattatagtgataataataccaggaaatttatattgacacactgcatgcctcagtggggcaccttttaaagttcctaacatttatttctggatattcttatccgtattgcttagaacacaagccctgtgaccaagggttccatggagtacaatgccatgttgaaatgaatgccttttcatcatttctctaaaatattaaaccataaattttgtggggtagttttgtttttaagatttcaatacatgagaaattgagagcacaaattttattatttaaatgacccctcccgatgttcactccatcccccttgctcatattcattcatcgaacacaactctttattttctcgcactccaactagaaataataaaacggtaaacatggtttcagaagaaacgactactgttctaagaaaacttctacagcaataccgtctggtgctaagatactacacaactctggaagcacccaaatagtgcaggagcttcttggtacaatgttttctaatcctcctatatcgctcttttagccactacacctaaagaaaaataagagctttggcttattgcaatttcaaagaagattttaaagggtaagtttggtgctactctcatctccttcaagaaaaagcttcttatcctcaagagttgctgagcttttgatagtgttgttgctgaaagagattcaccacctaggcaagtcctccgttcttaacctggaagtaagaccaattccgcaggaacaggtaaaataggtgtatttcctgtactcagctaagacgcctctcaatgaacagaacaaacctaagcaatgcaaatagttctgcgctttaaaacaacaataacaaaaagtttgtttccaaagggtttggtttttgtctttattttttcacgcttgataatacccttaacagcccaggtgctgagtaacacacaaagtaactgtacagaaaccaggatcacagcgtgtctgtgtcaatttcctgaggtgactgtcagaaaatctggacaggcaccattgtgtagagggaatgaggtcagaattcactaaggaccattcaccctgggaaggaataggacgggacagtcgggctcgagagccaggctttgggaaaggagagaaggtgggtcagggaggactttgtggagaaggctttgtcagcgcgagatcgggtgaagggtggcagataggggcgtttgtgcactggcataaggtgggaacgcagggacagtaacagtagagatgaccctgtttggggtgaccagagggtcggggccatctactgctgctagtgtgggagcctgggggctggaaggtgaggcgggactgcgagctgcaggcagctgtccccaagacggagaggggttcaggttgccagcaggtggagttgaaatcaaacatccccttggggaccacagagcaacaccctccctggaccctctgcctggaggacggggaatcacagcagctggtttggggtgcctcccaaaccaaaagatgttctctccgcgccaagctttgacgcccgaccccctgcactctcccgcctactcaccggtcctaggggtaaagcgccatccggggcgctcgcgagggctgcgcggcgcaggaggcaggcagggccaggcggcggtggcggcgctgtcctaagagcgcgactggggctgggggacaccgaggcagcgacagcggcgggggcgcggggagctgcaggggagagcagtgaatctggagctgctgcgccgcgcgcgctctctgcccatctccggcttcgctgaagctgctacagctactgccgctggaggggagggaggcgagggggaggggaggaggcacgcggtagggagggacggaagagcaggaagggtggggggtgagcaagggaagagggggagatggtcgcccagagttgagggggtggggagggaggcgcgcaggagcccagcagaggttcccactaaatgagcttgggaggggaaatgtaagatgaggcgatgggtctctcccccgccctccttctaccctaccctccttcccccttcgcgccctttccttgggctcttcctctcgtggctcaggctgggggttacccaagcttggcagcagccgcggcttcagcgcgctggtgcgagtgctgagtccgggaggcagcctctacagctctccccgccaccggcctgtggcacctgtgcgcgcacactgccgcccgctccattgcggcggctcctggaccaggatccgcagcctgtcgccctccttctctcctctttctgggcagattatgatcctacatgtgcatccatgacatctgtatagtcccccattggtgtttgtttccctgggcgctctttggcactggctgtcccgccagaaggcgccagcagggagctcaatgccggcaaccatcgcctgccccttggagctgttgcctgggcaggggtggccttggttgtttaccgccggggttgaccagctaacgaggtaaaaaaagaaatttatacatatatcgttttaacccaattgcctcggaccgtgttctcaatgatctaggaaggttgtaagtgtgaagggcatagtgacagcccattaccttctgtcttggcttccttcctcccttttctcaacattctaaaaacctagggattgaaagatctctgaatctctttatcacagagcttttcatttccccctgcattttcctagggttggtcccgctttcgtagtgtggattttcgtttcctctacttgactctaaatcaatcctgtatattcgcaaactacaaagaggcgcatgcaaatagatactgtactgagggcagatacacgcgcgagatccagagggtgagttaacacacattcagtaaatataaaaacaagtggaacattattaactgatttctgtgagccgtaattttattttataattttcacgtggtaattggggatagacagggagcaagtagattatgtgtctaaaagatatgactagaaaaaaaagtctggtaaaactctcctcaaataacataacacataaagtgagctaattattcccagacattcccaggagggaaagagattctgattttgtttggctggctggttgtgttgctttaaaaaaaaatgaagtaatctttcagttggtggattcgtttttttaaaagcctaaaggatcatagtctctagaataaataaggtaggcatttcattttacataagtgtgtcttatataacaaatgttctcatattttaaaaagtgctctcttgactgtaaatgcaatgtggaaaaacattttcaatgcaataggccatacctaaatattgatgaaaaacctctagattttcctgtatacattcacatgaaggaaaaaacaatgttggagataaagtattacttgatgggctgggcggtatcaacttgctagactctgtcctgttgagtatatctgctaatgaaaatatttggttcaacatttacctaatgacctgactgagagaaccacctccttatttagggaaaaaatatctaattattcgaatacacctcccttttaaaaggcatgtgttactgtcttcagagatccagaggtgtaccatgcaaattcacccactgttattctttcaataaagaccatagaaataaaaggttggcaaagacttacaattcattcagctccctaagtcttctcagtggtgcctatactacagaggtgaacaataaattttgcaaatgccagcggctacttgggcagaggatggttaccaagaattaattaaatctctgttttctcatttctgttta

SEQ ID NO: 585152 - DNA, 4001 bp, Homo sapiens
aagcaggcaagaggcagtctgcagtggtcttccaaatgctaactctagaccgttttatccacgtccccaggtatttacttcaataaaagggtaaaacaacatcactgggcagacaggatttcatttcaaaagacttcagtacagtgccctcttagacttgagagaagaagccattcaggctgcctccctcttatcaaataacaatttaattctgattcagaaacaaaattcttgtgacccccacaccaatctactctaccccagctcttagtacttgttcccaaaaggacaggggaaagaacgaggggatggggaggctaccttaaaagtaaagcaactcttaagactgctgggataactgttcccttaaatctaagaaacactgcagctgccagtcaacactaccggtctctgaacacagcaaaatgccgacacctgccacccggcatccgggggttcttttattttttggtaaatgtggcaggaaagactcagagagatcaactgcttcatgggaaagaaagggaagccccagggaagagagacaagaagcatcgtgcctatcctagggtactttgtgtgtctcctctctatgcactgaaagggctctttgtgtcacactcacactcacacacccggcgagtctgtgtgatttattgggggaaggaggggcaagaagggtgattttattatccctcttcccagtgagtcccagcacatctctgctgggcccaagctcggtggcctccttctggcccagtcccctccgcctgtggccgcagagataacagaggggaggagcccaaacaaaaacagccatggatctagggaagtagagaggaaatccagcgagggagccggaaaggaaggagaaaagagctggagggagcagaggggtgggggacagaggaagaggagggaaggctccagcacaggggaaaggggaagggtgggtgggtggtggcacaggaagagtgaaggggaggatgggggaagtgcaagggaggtgccagaaataggcaggaggatgggttggagaaggcgaccgccgccgagggaggaggccgagaggtggaggagtggggcaggggttgggtggggagggaagcagcacggggcatcaattattaagtgattacatcatccctgacattaaaacaacacacacagccccagtccccgcggggggccccaaaaggagggcgggggcggagtctgggccagcctcgcccccaagccaattcccattttcacccggcgcccgcttgcgggcgaggaaatggggtccccatccccgcgctgcctcggggccgcaccccgcaggggtgtcctccggtgcaaccgcgggaagaccccaagcaccgactccccggcagccccgcggagcgccctggcggccaagggaccgcagcaccgggccctgcggcgggggcggcgtgcgcgggggcgccggcggccgggcttctccgcagcatccccgaggcctcccgcgacgcatccccgccgcctgcttacctgcgcggcgctgaggctccggagcccactcacatggtcctctccccgccctcctccggcgcggccgaggcggctccggggggtccccggcgggcccgggagccggtgggccttccgagagcaccgagggggcggcgccggggtgtccccggcccggcggccgaatccctccctggcgcgggcggcggccgccgggcggtgcggcgcgggcggcggctttgtgtgcgcccgggcggtcctcggtgcgctgggagaagcgcggcgcgcccgggcgggagaggacgcgccgctcgcacaacaacctcgcctctactctcgccgccgggcggcgggcgggtctcgaaggccttcggctcgcggcgacccctcctcctcgcccgcggcagccccctcctcgccggctccgctcctgacagatggcgcaactgcaacgacgcgccgccgccaccagcgcggctgctcgctgctactcttgctgatgctctgcccctccagctccggaggggagcgaggagggggcggggcgcgcctcgagagtgacaggcccggctgccctatcaaagagccccttgggagctgcgagccgcaaccattggcgcctggggcgtgggcgggacggcagtaggtggggccgccgagtgggttgagcgttactgtggcagcgggcatcccagggtgcgtgcggtgcagggtgtgcaagaaaatgcgaggttggaggaggaggtctgtgtgtttttaaggattgtgtggagttgtgaggtggcggagtagggcgggagaaagagcggagagtgtgaactgcagtttccgctttgcggaaggttgcagctgctgctgcagattggcacctgccattcccccaaaaccatgggaaactgcctcgagacagggctatcttgcctttctggtgtcttttcatttgagggtgagaggatgaaatggaaaattgggcggtgatagcagcgttttctttgatcaaactgaaaagagtacggagcaaagtagaatcctgtcctgaaacgtggaaacgcacaacaaataacaatgaggaggagaaggagattaggatcattttatcagtcccctatttctgcggacactcatttatattttttttctagcaaaagtctggaggaagtattactgaaatagggggaggggccaagcggcgactaaggaacctgaaatgacagagatttgttcgtacattccccgccccacccccaaaaaacctcgtttaattgtagtcattggttgtctttggtttctcataacattcaaacttctcatgtttttttccccttcactgaatctgagcttttgctcatatttcccttgatgaaataattgccggtttagtatacagttgggagtgcatcggtctttatttcctatccagcttttctatggcaggatgtaacttcataaaaagaaacactttggcttcctgattttctttataggtaattcctgtttactgaaagttctgctttaaggcatactcagaatcgctctccttaatgattttggcaagaaccctaccttccccctcagcaaatctaatgttctaagaaattataagtgaatcagcttctgcttctgtgctcaaaatctataatattgcctttccggcccactacttgtttttactgtagtttaaaaaaatctgtcccttttgctgacttttttctttttgtacacactactttttaagaaaagttgctaacatttattaaatgatctgcatcctatggaggaggaaactgaggaaaagaaaagttaagtaactaactcaaggtgacagtatacagaggttactggatttttttccttttccttaaacaaaatgacaaattaaaccatgtttaaattgtgtctggaaattccataatcccaagaaatggaaccatagctaggactaggatatttccatacaagagaaagccagcttcatttagccaagaattgcttatctcaagagcagaggctcttcgtcctcagggctagtccgcaatggctgctctgggtttatttggattgggatgcagaggcagttgggtagagcaatggttctcaaactttgacatgtatcagaaataactgaaggggcttgcttaaacatgaattgctgtgtttaaccacctgaggttctgatttagggggtttgggatggtgcccaagaatttgcacatttagcaagttcccaggtgatgttgatacagccaatctggagacagcaccttgaggaccatagttctagaattgggctgtccgaggaggtagccactagccacatgactgttaagtacttgaaatgtacttcagtattggaaatttggctactgcaaattaggatgtgctgtaaatgtaaaagatgtattagatatttcagatcaagcatgaaaaatggaatgtaaagtatcccattttaatattgattacatgttaaaatgatagtctaaatgtactgtgctaaataaaacatt

SEQ ID NO: 585153 - DNA, 4001 bp, Homo sapiens
ccagattcccttctttaaaaacaatttaaaaatgaagccaagccagccccactgtgtggaaggcaaggcacatgaagaccagcaccccactctctccttgcatcagctgacaagttctcactgagggcttttatgttccatgttccaggagctgaggggagaatcaaaggaggttacagagaaacacagacgttgttcttggccttacaggactgaaggcagtattgggagaaaggacatgcatatatattaaaaccaaataactcaaggcagaaaaatctgccaacatttgggagtactgtgttttaactttcaaattttataagggatcaggtagcctcttaaacaaagactcctcctgactacggtggagacccacatgctcaacacaagtggccctctctagtgactttaatgaatgatacctgcagacccaggggtccatatccagcactcgtgaatgaatgaacaaggacaatggctgtgtcagtagaattaacagtctgggctggcaaagcccttatgcttctcacggtaggcacaaggatgggggttgtgtttgcctctttttttctcctgcatcatcagaagacagatggccttagactgcctgtctgtgtctcttcaggcacctttgggaaggtgggaaggatgggtaaaggtacttagcacgtattcaacccatgcaaggcctgggttaaaaggaaagctagagtcaccacagcatgagggtgaacataaatacttcttctactgggcagagtgtgctatgctagcagaagagaagtagataatgtccaaaggctcagggtcaggctccttgatacaactacactgatgtgtgatgtgtgttgggtgcagagggaaaaaaaacttgctaatgccttagtagtgcctcctccctaggtgaaaaggtacctgctgccagatgggctgagagatactggattctttcaaacttttatataagacatctgctgccagatgaactgagagatgctgcattctttcaaacttttgcaataaacaaaataattctggaacaaataatgtgaaatatctagttaccatggttcacatactcagagaaaatttggatgactagggatgcatgacataacttacaaatatttcggaaaacatatgtctgagaacgtacgccagatattttacaaagtattagctaagtcagcaaatacacatggcagcagaatatagccttgtggtatgaaagacaaggaaacttccaaaaaaaaaaaaaaaagaaaggcaggctgaggattaggaagaagtgagtgggaagagggagtacattaatatctagagaactcaaaatacacacacccagacccagtcctggagcctctaattcaaaagactgggacatggctcaggcatccgtgttttgaaaaggctgccctagttcttctgtgccaaccagccaggtgaggctgagagtcattgacctacagtgcctcagtagaatgttgtagctcactaacccatatagaatcctcagaaagcagcaacttggggcaccttgcaaccctgtagccaagcattttgtttgtacatcaaactctggcttttcttacaacccctcatctagtagaggagacagattagaaacttacatgtgaaacccctagtcaaagggaagtgatgggaacccagatgttcaattgccaaaagatttaagggtggctgccccctctctgcactctgtgactttgggggcttacctgttcctcctctcgtacgcaaggtccccgtatgagacgaagagttcacacctccaaagacggtgagtccttggcccccggctgcgtggaagttgttgtagttggggatggaggtcacaccgaagctggggtagtgctgaggggtggggtctgtgccatagcggtacccagagctctggttcaggctgccgtccctctcctccgtcagttttgttgcttctttatccttacattgcacacagcccattatctaaattcctgccaaagacaaaaaagggggcacgtaagctgggatgctccctagttgctgggttgctctacagtaaacgaggagtaattgacaaggctcactgttggctatttcaggcctattagggggcatgaggaaaggcagtggctggggagatggttaggaggaagttcagttccttgaccccacaatcgcatttgttccccatatgttctggatgacagcatcatcacggagcacaatgttcaccatgcagcaactttcctcgaataaggcctgtatctcgtaaaattctgtaacagcatacacctgcctacagacggtccaatcatatttaccaattctgcctttagccatctaaaaaaaataatacatgctctgtagaatgagtctatgcaacattagaataaaaacttccatcagggcacaggaaatttaaggaagagggcacaggagtgttggataagccagaatacaaccttcaatcaagtcactagactgcttcactcatgggtaccacatcttcaggcacaaaactggtcaattttaagcactaagatgatgctaagtatcaaaactaagaactagttactggatgaaaaataaaatcggcagaacctaagaggtcagagtatatttgcaggatgtcatgatagtctacagtaatgaaatcacttaaagctgctaattaacttttcaaatttccattagcttttgacatccttcaaaaacattaaaaaaaaatcattcccatgttacagagttagtggcggattaaaaactcgagttgttgccaccccaccctcctcaaaccctcttctcccaggctcctcatctaagtaaatgggaccaccagtgtcccagttgctccagtcagcatcctgagaagcatcctcatttcctcctccttgtttacttcccactcttcctgtctcggctctcctattcaaacacgcccaacttctcagatcctcaaagactccattcccccacccgcttcgggccttggaacataaccttgaacactttttccccttcctctttgatatgtgacgtatccatgtcctagttaataaggcaccgcttcctctgcaaggcgttctccgactgccctgcccttccaggctgggttgtgctttctgaagtgctcccatggcatcctcatctccctccttctggcacccttggcgccatattaaaacagggcctgtttatttgtctcattgcccaatggactgcaagttccaggaaagcgggaccctgtctgttttcatcacagctacattgccagtgcctggaacaataaatagcaaccagatgagtgaagattctgtagcctattatgtttctcttttaccctctctgtattaaagccgatccctcctgtgactttgagatggagtctcactctgttgcccaggctggagtgcagtggagcgatcttggctcactacaacctctgcctcagcctcacaagtagctgggattacaggtgcctgccaccacacccagctaattttttgtatttttagtagagatggggtttcaccatgttggtcaggctggtcttgaactcctgacctcaggtgatccgcccgcctcggcctcccaaagtactggcattacaggcgtgaaccaccgtgacaggcccctcctgtgacttttatcagcagtgtaccttgcattttaaaatctactggtatgtgtgtgagaagtgaagaagattcagaaatacaagttggttaaatggtccccctttggacttgcaataccccaacaagccaacaggggtcaggtagaacaggccagtggaggtccctgccaaaaccgcaaactagcccatttgggaccaaagaatcacataagaaacacatgccatcatgtgtaataacatttattcactggggagggcacagctggcacaggatgggaagggcttgaggcagcaaaggagaaggcatgcttttctatactatcttgcaaaccaatgcaggaggtgccatatcaga

SEQ ID NO: 585154 - DNA, 4001 bp, Homo sapiens
gataagaggtttcagcaaacggctaagtattagtttaatatgaaaaattttatttctatccacgagcaacagtaagacaaagttattttaaaaaattgagcactgtgcttatatttcttgaccttcatctcctgctcttcaacaggcacctcaaccagataagcacaggataataaaaaaatttaagacaaacaagtaacctaattatattgtaaaactctgagaggcagggagtataatttcatggaagacctacaggattcctctctattctattcccatggaaaaatttcacttaaaaaaatgaggcgttgtagatggggttactttgaactgtggtgaatcacacttattcactggaaagacacataagcaggaagtccaggcctctgcaaatcaaactctgcctaaaaggaaaaatatggctgataccttctcttctacacagcttacaataaagtcagcaggaagtggccctccaaaatggcatcccacatcaggaaggagatggatgctatgaagggagacattggtcaagaggtaggcaaagctcttaagaaagctcttgaatgcttggttcttcatttacatgaagataatagggagagttacttctgttgaaatttcactacaacaaaacacaggatgtcatttaaattctaagaacttcttgatccaattgcgttccctgtactcttactgtatatccaggtatgtccatcggcatgggggcctggtcagctcatgtttttaacagtcttagagaaggaaactatggcacatacgatttcttttttccacagaggggttgacttattaccatttttaatgaagtgacaaaaaaaatgagataaaagggtagagaatgttctatattcacgtggatcttgctggacaactcactcaataaaaacatggttatctgaaaacactagattctgatgttgtttttaaaaatatgttaaaagcctaactcactggaaacatcaaaataagcaaagatagtagactgattttctgtttgattaaatatagtacatacctataatggaatagtatatagcactaaaatcatattgcaacataaatttagtgactaaaaaatattcacggtgcactgctaagttaaaacaaagtaggatataaaacattaagtccaatttgaaaccatgttttaaacattcctaaatttgcaccgggaaaggacattcaacaaaatactaatgatgtgcgtgactatctctgtgtgatgggttaataggtgacttttgttttgttctgtatctttaagtactttacactaggggtgtatattaatgtggacgttatttaaaaaaatccaccataatgaaaatgcctagaattcacatcatatacatttttggtggtcaccaaaacattcacaaaccaagtatagtttcatggcagtgaaaatacccaacaaaagccaagtgtcctgctgattgttagactggaggacgaccttttctcctgaactcctgttctccactgggcatttgccctggggcatggctcagtgcccccaggagacactgaaatggctcagtgccatcccaacaagatgtttccttcctttggcttactctcataccatcagcgggggacagtgcagactgcagcccagcatttaggacggcaggacaggaatgaaaattctgggcatgaacaaagctccacttaccacctccagaacgccgcttctctgattagcaactttctccgatctgaagcgtggcttcccagccttccacaccagtggcctatatcttttccaccaatctcccactgcccctcacacactctccagccaggatggaatgcacctccacataactgtccatgcagttcccacatcttgtccaccggccaggcccatgcgagtcttacccttcacgtaagcctcccttctcagctcctcagacctgcgctggtctccccctctctcagctccttggcttatacccaacacttgatcatttgcaggtgagacagtcacattgtttaactgtttcctgtgcatggcagggtctggtaagggttggggccaagaatctctttgattcttcccattgccttcttctggcttctggcacaggtctacaatatagtaggttctcaaaaccagaacatagatcttttaaggtggagtgatttcactggcacttttcctgacaatgattttgtcagcaatctcttccttctggtctgcctgtctgcctctctttttatgcttgtctcatccttaagagcaaagaatggcatttttcctgctcactcttctcagctcataaacaaatggcttcctctctactccagccctcgtgcagtggtgctaaccgaacggaggctgtccacaacggtgctgggtcctctcgcctgctcactcccaggcacccaggcactcggtgcccattctcatcaaggactgtggatcttttggttccccccctaggggttcttgcccttcaggactttggtgggctatgttccacattcatttactcacccactcattcagcacctagttccttagtgccttctgtgtgccaggcactgttatgtaaactcactgttgtatgtcttgtctccccacctacattgaaagctccccgacggcaacgattatctgctacgattatttaattgtcaccagagaatctaacactgtgttcagaaagtgaaaaatatttacctgactgaaaggagaaggagaaaaggaataaagcagaaagcttcagttttcattcgattattctctccgctgtggtttgactagagatggcgtaaaaagataaggcaaaactttgactctagcagactgagtacagccttcatttttttttttttctgggcctctgtccagaccaaatgagacagtgacgtatgtgaaaacattctttacgttgcagaatattttacaaatatgaagtgtcatcatcatcacgatatgcgtcacccataccgtactgtgaaaagtttgattccaaacaataagcaaccaaatcaccccattttgcaagctcctgcaaccagcagcataatacagccagaaaaaaaagctgacagcctgacaaaacccaaatggaaaattaaaatgagcaagaacagccacacacccaaagagagagcaaacccgcactgcttggaggaggaaatcctctaattgcctccacactcctgctcgcttccatctgcttgcatttaaggaaacccaactactgggctcctcgcagctgtagagaaaaagataggcatcctaagtgcctggatggctgcagcaggcagggaccgacaagaggacagaagatccacaggcaaggctcaacagcacatctaaaaacaaatttaatgtgtgttatgcaaaatggcaaaccagctcccctggctgtgaggtcacatgaaataataacggaactccttctcaggagaaaggcagcagtggcgtgtgtgggcaggaatgctgcagcgcgctcctcacacaaagaagcccatgggcctcccctcaagctgggagttgcacggagcccaggctgcaattaggtttcttgtggggaagtgactggagacataggcacccatgttcctcactgtggggtaactaaatcgcctttggcaaaacttcttaagtgcaattatagtttttagaaatgccaaccttttgattccagtctcactttgaccatttctcccctgctcttcctatctgaatctcaccagtcccattctccagtctgccctcggccttctccctttctggactgctgaccacctatgctcaggaccttactgtgcctccataatcagagggatcccctaaggtgcaaccaaattgtataatttaaaaaactccacatcttggagagcaggcagttcattgtgagatgatgaaactgtggtgcagagatgcaaagacacaagatgtgttcacatcaccagccagtggcagggacagggcctgacagcagatatctacaactcaa

SEQ ID NO: 585155 - DNA, 4001 bp, Homo sapiens
agggaggatgaaatgaactgtgcaggctgctagctctactacctccaaccgcacagagcaaaattgctcttatgtagtagtcattcaataaatgtatttgtgaattttggtatactggatttaaagtgctgacttgcaagcagtaatgctaagtttgcggcaggaaaaggaatagtcttgaagaggggaggggcttccgaggctactcaccacagcggctgggtgtgtccatatctgtccaggagccgttggccaggcacttgcggaccttgggccccaccacctcgcgctccccccggcacacatactcaatctcatagtccactggcaggaagttgatagccttcacctggtcccgagtcaggccccggtacctgatgcccccttcccagggcgggtgtatgatctggcaacctaaggggtgagtcggggaggcatacagagaggaatggtgggaaagaggaaaaggcaggctccccagtgggaggaaggggagagtagggcgtggtctgtgggcaggctggggacagaggaagagggatggggcactagagggtgggagtggggacaggtacagatcccctggctaaaggacagagagtaaagggccagggttaaagctgatgagagaacccacaagtggggagggaagggtgctgggtggaggtaagaaagaaaagtaattaagaaatcatgaagggtatgatatgtgggtggagcttttctttaaaaaaaaaggctaaatgaggatattcgagttgaattaggataggaggataaagggaggctaataagatcatctggacagcaaagtgggaccaagaaaagggagtaattgaggtagtaatgtggggctgggaaaggggattgaggcggagaaaatgcacaggaaggtggtatagtgtagcaatgtgggcagagaaaagaggtgctggatagtaacgtggggtgacagaaggaggtcagcagtagtaaagtcgggccgagcagaaggggttgccagaccgggatgatatgtgggactgatgggatagtgatgaggaccagaaatgaggagatgcagggaaagggaagtggagcgaaggagggccggaggtcgtcgaagaaggatgcaccttctgaggtggcgttgggggtctgcgccccgcccgcgcccggggggcggaggaagagtggcgccagtagcagcagcagcaacatctaagtgagaggcggccatgaggactggaccgagccccgccggcgcggcccgcacccggagactactcgacctcttgccggttgcctcgcaggctccgaccgggctcagcctggggaccaagagagcgccccgcggaggaggcgggggcggagccccgcgcggggtggggggagaggaggagagaaagcctgtccccaccctcctcctgcctccctcggcccccaaccctcccgggactccacctctcaccacctcctctcccccggcccccgcggctcgcagaagcctggcttacccacgctcccggcatcggccgcctcagcgctccccgattccatccccgcggttcctcctctcccccagccccgcttcccccagctgggccctgcgcccactgccccctcccccaccacgccgcgcgccccctctccgagccctgctaacccggggccctggctcttacctcggcgcgcgggcccggctccccggctctccccgggcctcaaggccccaggcccggccgctcctccccgctcccccctcccttctcctccacctttctcctcctcccgtccctcctcccctcgaatccaggctccagcctggccagggtctctcccctcctctctcgcttcccccaaaccccacccctgtctcttcttccccggggcggcggcagccacgggagcggggagcggggagccgggagggaaggaggcggcgccggggaccagggagagctcccgggcggagggaagaaggagggtgcaagggaaggcagggcggggggaagagaggggaagaccggggagagggcgcctcccacaacccgagccccgggagccgccccggatcccagccccgccctggaccgcccacagcgcggtggggcgggcggtggagaggcgcggggctgagaggtgggggagagggaggtgccctggtgcacacgcactcgtcggggggcgccggtcactgccgagggacctgcgggccaaacaactggaagctggggtgggggagagggaacccgagccaaaggcagaggagctggcgctgagacagggagtctgggatgaaggtggagaaagacggctgcacaaagagaaggcagccctagatccgggtgagaggagagaggcagaggcagatgcccaggagaactgcgaccggagggcgagaaagaagcctgggtcagaaggaggtgggggagggggactgaggaccacctaagcgcaagaagggttgggtgtagaagagatttctgggagactagagcagctccatggtccagcagcattgctactcgcctgctctgcagggaacgcgcagaacggattggaggcaaaaaacaaaacagggagggggacatcaaggagagaaattgaagtacgaagggagtaaaaggacaagagaaaagaacctcagggtggtttagaagccagtattacctgatgtactccagcagagcctagcaaacagtatttcttgaccaagggcaaactggaagctctaaagacagcaggtacagacctttttgacggctccagaagctcttggctataccttgaagtggaggggtgtgtgtgtgtgtgtgtgtgtgtgtgtgtgtgtgtgtgtgtgtgtgtgttgtgctgttgttgttcgtaggcctgagtttgggctgggagaggaaacagtgggctccttgttgggggggacaaaaaaaaagctgctttctggctggtcctagggggaaaaatggtaggaagaaaccaaacactgagagactgactagaattgagattctcaacctccaacccttttttacaataaatattttgtaatgacacttttactgtcctaaattgagattcatagatgaggctcacgcctgaaatcccagaactttgggaggccgaggcggactgatcacttgagctcaggagtttgagaccagcctggcctggccagcatggcgaaaccccatctctactaaaaatagaaaaattagcgtggtgtgatggtgtgcgcctgtaatcccagctgagacaccagaatcgcttgaacccgggaggcagaggttgcagtgagccaagatcgcaccactgcactccagcctgggtgacagagcaagactccatctcaaacaaaaagaaagggaaggagggagagaaagtcatagatgatataacctacctacatacacaactttaaacagaaagcaaaatgcttccctttctgtaacgtaaaggggaaatgaaagaaaagtaacttgcaataaaataacataaacagtattttaatgtgtgagtgccaaggcccgactaccctagaagtcctgatggagtaagcagatgcttccacctattcacagaaccacggggatgaaactgctaccaacacaggctgatccaggtgctgagttggtgactcaactacctccagcatgttgccatcaatgaagtgatttaacaaaatgttgaacaactcttggtagcaaagttaattttccctaattttacacacaactataattgcattcctagaaagttcactgtatatttaaaaaaaaattttaaaactgtattaagttataggctcagataattaaacacaggttttcactacgtgaatgtcctgggggacttttgagaatctgggtgaggaacaattcttcaacatgtaggtagtgctttgaagaatatcttacacctctgccccaaccataaatgtcaatagtgccccttcccttatcacctgaggttgggagttcgagaccagcctgaccagcgtggagaagccccaactctactaaaaa

SEQ ID NO: 585156 - DNA, 4001 bp, Homo sapiens
ctcacttctgtcccctcacacacctatcccagacacacacctatttctaggtgtatagtgatgttctaaaaatgaatataaatccttggatcaccccaaggttgatatttggtaagatcaccaaattctcaccttgtgtactctatttcaccctaacccaattccttaagtctctggggccacatgtcagtgaagataaatttgagatcttaaatctccttccctgtgtcacatccttccctgcacccccaattattcatgtaggggagaggggtgggaaaaaaaacctcattataagctatcccctaatacccctggacccaaatttgcttaccttctctctctccctcaactcacctccctaatccctacatcccatttcccttctcacatcctagaggccacaatgctataagggaagggaaggtcaggacccaagttccataaggtgccccaagatctctcattatccccacgctacctccttgcccctctcccccactgccattcttttctgttctcttctccttgtatgttgactcttcttcatccccatgctattgtgggggttcccatgtggatccccaatccaattcattttcccagtgcctctgcccacctcttgatcattagccttccccaatcaccatatgccatctatcccacagtctgggaatgctcaacagggttgggaatagaaggatgagaaggagtcaggtagggctcaccactaccttgctgttttgttaagataaataaactagagctctcaagtctctcaaaattttcctcattctgtccctattccttccagctccaacctacgccaagattttaccttgttaccatggtaaatgtaaacccccaatccagctccccacctctgacattccctccacccccaacccattccagggttagtttactccctcagaggatcagtgtctcctaataccttaaatccaccaccagtttctccaaaccccgacacttctgcgagactcccgcagcggggcagaagggtctgccttgcagcatgcttaaccatcttgagcccctagaccctcatcttggacctccagcccctgcgactctccccaagctcctgcacccccagcccatctcctgccagtcacacaagggaggggtctgcctcgcaatcccagagacgactcagacagatgggggcgcgtgcagctggctggccccctgccccgcaagcccccacctcccacccacccccatgtccagggctaccttgctgtcgtggtggatgagcttgagctcatagtccggcaggatgtccctgcggctattcacgtcctccagcgccatctccaccgcgggctggcaggcctggccccctggccagcccccgctcatgggaaacagtgccccgatgtacactgcgcgccgttctgaggaggggtgcggggggacccgcgagtgaggccgcgggagatggggggagtgggaggcccacaccggagccacccctgccgccatcacaaccagaagcggcagtggccaccccacccgggcaaaaggggccccgggccccatggcgtggggggcaggggtagctgttggggagcgttaggagctcaggggggacacttttcctggggagggctgctaagagggtgccggggaggcgcctccatccctgattttgtggggaggagggggcgagggccccggagaagcagggaaggttggcttcctacggcccccgcggctctcgccaccgtcgccgccaccgcggactctcctcgcggactgactgaccgacggaggggaggaggaggagcaggagggagatgtggggctgggagggggctctgacgtcacgggcggcgcgcggcagcggggggtgggggggcgggcgggagctggggaggcaggaagggggcggggagggaagcgagcgccgaggtgggagcgacagtcggaggggcggggaggggaggggggatgcaacctcgaggaggaaaggaacgaaagaggaagggagggatctcacttaaggggacccgaggggaggagaaatggggacggggcgtgccaggagggcggggtgggcggagggagccgcgggaggctgaagcacggaggaaccagggtaggaagggaaggatgcgagtgggacgggagagaaacggggctggcgcctgaggtctgaagtgggagtatgagtcgatacagtgaagcactgaggatgtgggggagaggaaacggttttggagggaacgagttgggtacggaagggaggctggtttgagggagtggtggggtcgtggaagggagcctggggctgggtagacagaagcctaagaaagggagacaggacatggaattgagaaaagacgagggaaggggtacacggaaggaaaagatgtggggaagagcgcgagaggcctggccagggttgggatgggtgggacaggctgagaaagtccattaggtgaaatcctaggaggcagcaggctggaaaaggttccagcgaaggtcgcaaggaaccccacaggggaaaacgtggtgggagctcagggtctcccagcaccctgccgccctctgctgggctctgcctgacaccggcgaggctcagtctgggaggaggtggagcccagggaagtgtagccaagcagggacaaggagagaccgcagcctcgtggaaaaccgggactggaggcaggaaacaggtagggagggaagggggtggccgcaaactggggtgggttggggaaggtgcgaaaggacgacgccccgtagcctaagggcagaatttcaggggggtggagggtgcagagtgaaggggagggcattgcagtgcgcgcggtaagggtttctcatctcacctgagtgtggcgttcgattcactggcagcaggaaagacggggatcagagaagagttaccactggcgcccagcttccctggcctgatccccagccccctcccacacctgtccatgctgaagaccggggagagcagaagcctgcgtttctgaggggagggtgcctggggataagaacaaggtgggtctgggggtaagggggtcaggacttattttcttcttcgatttttcataggacaacagaatttgagacgggaatgccaatagctaagtttggggcagatcttggttctgtggtgcctgaatattacaaaattgggagtctttaagaaaaaaaattacacatacaattggctttaagcaattgctgttaaaatcttatttctgcaatttttacaaaagcctgttaccatatgaacacatatccatcgagccctctatattattagagcacaggaagagggccctgtaggtgaggaaccttgaagtctaagtttcagtagtgtcataagtccacccctggatgggactctcaatttccagaataaaatggtaaactagaagcagaataactgagttatgtgaggaaagtaaagcccaaggatcttgaaagaatctaccagggtagaggaagtatgaggcatacaaatgggatgactgcatcccaggagagaagatggcagagagttcgggtgcctagaaaagggagagtttgtaaaattacgtggcaaaaaaaaaaaaaaaaaagtagacagacacaacactgattcccttagggaataatggaggttgtctaggaagtacagaaaaggacctgtcttcttcccaccccatccctgagttgttcttcatcttctgataatgctgcctccaattttaagtcttttaccctaatatgtttccacccccagagctccccttctcaatttttcttagtagaatgtttgatttatttctgagtctttacaataaatcaattatataaggaatggtgagggatgaattctagaagagggtgatgcatggaaatttctaagtttagagaaagggaaaattggagtatttaaacctgaagaaggtgagagaggtgagattcataaaggaaaagagaaaacgtgaggtctaagaatcgggagcaggaagatt

SEQ ID NO: 585157 - DNA, 4001 bp, Homo sapiens
accccattaatatatacaatcataatttgtcacttaaaatttaaatgttttaaataaattatttaaaagaaagtctatttcactctcttagacttcttaatcaccgatatttgcaaataggttgccactctaactctggcttgggaaaagtttttgatgaagaccaacagagtttgttgtcgttgttgttgcttttaatccctataagcacatttggatcaaataatctctacggctgcaccaatccacaagttccagtgtttgcccaagcaacttctgactctgatggtaatagggcacagtggcctcccttagcaccccagggctcaccatgaccactggatatttcagctcctagttttgtgatgttgttaagaacagcttgaaacaaatgctgtgagctacagctggctgtttgggagcccatgtgatgagggctccctccagccccagaaggaggacactgaggtgctagacacagccctcctcctaaccccaaactcccaaaagctagatatcttttcatattcactgatctctcagactctatttatatttacactcaaaagaaaggtgaagttcaatttgaagctaaggctaagaaaggaccaagaatcaacaacgccctactgtctccatttcctcatcagtacagagagcactggattaggttgtctccaagtctcctgtattattgactgatgccgggcaagcaggtgtgcatcccagatagacattgccagtgctgccgtcagaatggcccaggtgaggccgagtgctaaggggctggtggggaacctggtttcctgtgtaagctccctctgcaagtgctggcagacagggcaccatgcacctttggtgttgaccacaggcaagcacttgcctgcaggaggctccgtccctggccctcccaatttataggtagggaaccatctaataatgatccttctagtcacacagcttggagaaagctgctttcttttaaaatattaaaaaatgattcacaaatctaacagaaataattagagcagaatcattctcatgaaatacaggtcccattggtaatttgagaattcacagagttgttctaaccctaggacacagacagcaaacaattgcccttgatattttttttaaatgtgcatatattctattttccagaatctacctttcacccaggacaattcataaggaattttaaaaatgcactgataaaatgatctaatctagcatcattttaaaagaaaacgtaattctaactttctaaaaggggagcagcaggagaacaaagggaaggggaagaaaaaggcatccacacaaaacaccatacgctggaaatgatgctcagtttctagaagaacactgtaagctcactttgtgcatcctcttttcctaaatcctctatccctaaatgtccactcacctgcctttcttagacatctcgtggacttctcttccgggccagtgcattctgctttcagtggccaaaacccatccccaccacaaaagaaagatgccaaatctcatatttgggacagccaacatgggtttccaaattcaaacagctctctccagaaacagcaaaaaggaaaagattgttctttttctctcttaagacattattggtctgttcattattagaaggatgtttactcatgcaaaaaaaaaatcaacccacaggatgcaatctggagagcaggagaaagcaatttccactaaacctataaatcctcctacgtcagatgtcagggattttctgaactgaggttgaattcctgtgtcccagtggaacaattattttagccggtctaaattagttcatcgtcaaatgcagtaaaaatgttggtaaaagtcttattttctggtgcgtcgaataaaaggaagtaaaaatggaccaaagcaatttccaagaggagtaaggccagaggtgcggaactgctttctatgttcacgttaatgagctcctccctggatctattttaagcttacggccattattatttgctttagctgagggctggatttggacagcttcctgcccccacttcctgtggctgaatccctgaaaccccagggctcggtacctgcgtgggctgtctatatggctgagattgggagggcaactggggaagaggtttttttgtctttgtttggcgcagaaacaagtaaatttccttgtcagttgcattgttcttatcatgaaccttgctgcactgtccacatttgaaaaataccagtaataaattaactgtagcctcaagtctgtgttatttgtagacagtttttcttttgctttgatgcttactttaagactctgctataatctacaggccggatcttgtgtcttcatcaaaagacagtctcagagcctcgtggaagagaccgcattaggtactccaaactattgactcttcaaagctgagctgacatggttttggtaactttcagactgtaccggtaaactgagtcaggattcccataactctatagctgaaaagcggtttcacacaactgctaacccaagatccaatagaatgagaattaattacacaagactgaaaaaaaattgatgagagaaatttttttcgggttatttgaaatgcagttgttttaaggttctgttcccagatcgtaagaagccttttctttctcttcttgtgctatctgtaattcacaataagcttttaaattctgcttttataaaccagaatgaagtattcttaaattatatatgattctcactaacacgattcttcttatttgaattcagaaactcttacccagtctctctacatttcttggcaatatagttgtttgcataggtttagtaagaatctgtcctcccttttgccaaaatacaactggaagcatcaattatgcaatgaaagccttgccttgaatgccctatttgagaataatgttcatttaacgaggtgtgacaagccattttaaggaataaaggttggctgtacttacggaaccaatgcctataatgtcctctcaggaaacctgacgtaggtccagtttatagtgtccagtcttacagttagtaaggaaagtcacttctaggcaagtacttggaggtatttttctgaaacctctagaagaaaggaattcactcaaatctataggtactgcaggtaaaatttggtggagtttcttgggcttggtctcctaatcttagcaggatagaaaataatagacatggcggggcacggtggctcacgcctgtaatcccagcactttgggaggccaaggtgggaggatcacctgaggtcaggagttagagaccagcctggccaacatggtgaaaccctgtccctactaaaaatacaaaaattacctcggtgtggtggcgggcacctgtaatctcagctacttgggaggctgagacaggagaatcgcttgaacctgggaggtggaagttgtagtgagccgagatcgcaccactgcactccaacctgggcaataaggaatgaaactccgtcccaaaaaaagaaaagaaaataacagacacttttagaagtccaagctaagattccttatgataacttctaggcaggagctaatttggaatcattcaacaccgtatggctctaggttttgcaacgcaaacttcaaaggaggcatctatgatgcactgtagaagtaaccagccaaacctaaggagcccagcttttttctgtgatcaagaataatctttagaattatatataataacaaggagaaggaagatggtcaggaaaaatcgtcaaactttgaaatgagcaaaatagattactgggtgttctttcaatagaattctaagccttgtccagcgggtcctccagggattgtctgatcctatagggatgtatgactttgattgtctttaggctattttacaattctgtaatagtagatgttaacacgtagcaaactgatagtaacgcatagctttcctgtccatagctatgcaaattattccttttgtgctgtggagagtataaatctctataaat

SEQ ID NO: 585158 - DNA, 4001 bp, Homo sapiens
atttgatcctgtcattatgatgttagctggtgattttgctcgttagttgacacagtttcttcctagtctcgatggtctttacattttggcatgattttgcagcagctggtaccggttgttcctttccatgtttagcgcttccttcaggagctcttttagggcaggcctggtggtgacaaaatctctcagcatttgcttgtctgtaaagtattttatttctccttcacttatgaagcttagtttggctggatatgaaattctgcattgaaaattcttttctttaagaatgttgaatattggcccccactctcttctggcttgtagggtttctgcggagagatccgctgttagtctgatgggcttccctttgagggtaacccgacctttctctctggctgcccttaacattttttccttcatttcaactttggtgaatctgacaattatgtgtcttggagttgctcttctcgaggagtatctttgtggcattctctgtatttcctgaatctgaacgttggcctgccttgctagattggggaagttctcctggataatatcctgcagagtgttttccaacttggttccattctccccatcactgtcaggtacaccaatcagacgtagatttggtcttttcacatagtcccatatttcttggaggctttgctcatttctttttattcttttttctctaaacttcccttctcgcttcatttcattcatttcatcttccattgctgataccctttcttccagttgatcgcatcggctcctgaggcttctgcattcctcacgtagttctcgagccttggttttcagctccatcagctcctttaagcacttctctgtattggttattctagttatacattcttctaaatttttttcaaagttttcaacttctttgcctttggtttgaatgtcctcccgtagctcagagtaatttgatcatctgaagccttcttctctcagctcgtcaaagtcattctccatccagctttgttctgttgctggtgaggaactgcgttcctttggaggaggagaggcgctctgcgttttagagtttccagtttttctgttctgttttttccccatctttgtggttttatctacttttggtctttgatgatggtgatgtacagatgggttttcggtgtggatgtcctttctgtttgttagttttccttctaacagacaggaccctcagctgcaggtctgttggaataccctgccttgtgaggtgtcagtgtgcccctgcctgggggtgcctcccagttaggctgctcgggggtcaggggtcagggacccgcttgaggaggcagtctgccggttctcagatctccagctgcgtgctgggagaaccactgctctcttcaaagctgtcagacagggacatttaagtctgcagaggttactgctgtctttttgtttgtctgtgccctgcccccagaggtggagcctacagtggcaggcaggcctccttgagctgtggtgggctccacccagttcgagcttcccagctgctttgtttacctaagcaagcctgggcaatggcgggcacccctcccccagcctcgctgccgccttgcagtttgatctcagagtgctgtgctagcaatcagcgagattccatgggcgtaggaccctccgagccaggtgtgggatatagtctcgtggtgcgccgttttttaagccggtctgaaaagcgcaatattcgggtgggagtgacccgattttccaggtgcgtccatcacccctttctttgactcggaaagggaactccctgaccccttgcgcttcccaggtgaggcaatgcctcgccctgcttcggctcgcgcacggtgcgcgcacccactggcctgcgcccactgtctggcactccctagagagatgaacccggtacctcagatggaaatgcagaaatcacccgtcttctgcgtcgctcacgctgggagctgtagacgggagctgttcctattcggccatcttggctcctccctacaagggaatctttccttttgtttgcttttgcaaaaatcagttggctgtaagtatttgggtttatttctgggttctctattctgtttcattggtctatgtgcctatttttataccagtaccatgctgttttggtgactatggccttataatatagtttgaagtcaggtaatgtgatgcctccagatgttctttttgcttggtcttgctttgcacatgtgggctcttatttggttccatatgaattttaggattggtttttctagttctgtgaagaatgatggtgatattttgatgggatttgcattgaatttgtagattgcttttagcagtatggtcattttcacaatatagattctacccatcaatgagcatgggttgtatttccgtttgtttgtattgtctatgatttctttcagtggtgttttgtagttttccttgtagaggtctttcacctccttggttaggtatattcctaagtattttattttattttatttcattgcagctattgtaaaaggggttgagttcttgatttgattctcagcttggtcgctgctggtgtatagcagagctactgatttgtgcacattaattttgtatcctgaaactttgctgaattcatttatcagttttagaagcctttgggggagtctttagggttttctaggtatacaatcatatcatcagcaaacagtgacagtttgacttcctctttaccatttggataccctttatttctttctcttgtctgatcactctggctaggacttccagtactatgatgaatagaagtggtgagagtgggtatccttgtcttgttccagttctcagaggaatgctttcaacttttcccccattcaatattatgttagctatgggtttgtcatagatggcttttattacattgaggtatgtcccttgcatgctgattttgctgagggttttaatcatgaagggatgctagattttgtcaagtgctttttctgcatctattgagatgatcatgtgattttgtttttaattctgtttatgtgatgtatcacatttattgagttgcatatgttaaaccatccctggtatgatacccacttgtttatggtggattatctttttgatatgctgttagatttggttagctagtattttgttaaggatttttgcatttatgttcatcacggatattggtgtgtagttttcttttttgttatgtcctttcctggttttgatattagggtgatactagcttcatagaatgatttagggattattccctctttctctatcttgtggaatagtgccaataggattggtaccaattcttctttgaatgtctggtagaattcagctgtgaatccgtctggacctggactttttttggttggtatttttttttattaccatttcaatcccccttcttgttattggtctgttcagggtttctaattcttcctgatttaagctaggaggcttgtatctttccaggaatttatacatctcctctaggttttctagtttatgagtgtaaaggtgttcatagtagccttgaatgatgttttgtatttctgtggtatcagttgtaatatctcccatttcatttctaattgagcttatttggatcttctctcttcttttcttggttaatcttgctaatggtctatcaattttatttatcttttcaaagaatcagctttttgtttcatttatcttttgtatttttgtttgtttccatttcattcagttctgctctgatcttggttatttcttttcttctgctgggtttgggtttggtttgttcttgtttctctagttccttgaggtgtgattaaattgtctatttgtgctccttcagactctttgatgtaggcatttaaggctgtgaagtttcctcttaccaccgcctttgctatatcccagaggttttaataggttgtgtcactattatcattcagttcaaagaatttttaaatttccattttgatttccttgttgacccaatgatc

SEQ ID NO: 585159 - DNA, 4001 bp, Homo sapiens
aatttatccctctcttcaagattctcacagtgcctatttgcataacaaaggttctaaaagttctgctgtagagacatctgttgaaaatggtctaaaccagggttttccacgttttggtggccctggaaccccatttcactcaacagccattcacgtttcccaaaattagagttcaggggacttgctgggccgatgacatctgaggctccttccagtttaacagcctatggttctggcaacccaacccgcatgggttgttcagagcagggcctctgagggttttgatctgtttgccttccgctgagtaggactaggctccagagagagtaattataggctgggtgtggtggcttctgcctgtaatcctagcactttgggaggccaaggtgggtggatcacttgaggtcagaagtttgagaccagcctggccaacatggtgaaaccctgtctctactaaaaatacaaaaattagccaggcatgctggtgcacgcctgtaatcccagctactcgggaggctgaggcaggagaatcgcttgaacccgggaggtggaggttgcagtgagccaagattgcgccactgcactccagcctgggtgacagagagtccatctcaaaaaacaaacaaacaaataaacaaaagagagtaataacctctcccagagcagcagttgccactgggatactggaagtagaggctgtaactcttatttatattcagggttttttttttttttttctaaaaataagaaatcaattaaactttaacatacatatttataacagcacatgtatgtgatttgtaagtaaatatgcatgtattagaggtacagtttcaaaaacttgtcattgacagcagcgcatgttcaaaaatgtttggggactgacctagaaaatgtgcctcaagatattaatttatattcaaaaccactagtttatctgatgcttagtagaatggaaaataaatgtgtaacatgccacacatggtgtttatatcttagctgcttgttcttttcttatctccatgtctaacagtccttatgtctacttcaggcctggagtatgatgcttcgtatgtcaattcaaaataaacttcctaaggaacttagatttgtaatgtaatgattttgaatgcagatcctgggctattatttcttgggaatgtctccattacatcatgaaattgcattcactgttgttcacacatatatttctgataattaagcaaatttctgaacacctcttctaagattcaaaacagtaaaatgaaacccaatatcattataaagttattctctggcaaataatttaaggaagacaactcccgtatgcatttttttcttaatagttcaggctaggttcctatatacagttctccccaaaatacttgagtgtaattatttagcaggtcatcggttgtaaccctgagaaacaaagcagcacaatgtgatttgtacagagaatgattttacccactacgtctccaactatttatatctgcctcaaatcaaaatgctttggctgaacgcaggcatccgaaggaaggctcatcccagtctagttctgctctcaatgcttgtgacacatagagtatgtgtgcccagggagaggctgcgttcagtgaagtagctgggttctcattctcatagggcgatatctcaataggaccttagccccctggggagccatcccactgtgccactgctgctgctactatgcagggtaacctccctcctttcccacctatgactttaccttggcttgggcatttccacctgccctgtccatcgcttcctcttgggttttctgctctccacgagaaccatcaagcaaaacaagaacaaaatgagtcttgtaaaataaggcattttgtggacatctgtgaggcaaaaagctgctttccagtagcctgtggcagagcaaatcccccctggcttgaccattgatccatctgctgcctcctgacgggctgctctgaggggctgtgagggcaaggctggccaggctagttgtcccgatttactatttgatactgacgccccactcaccccctccactccgggccatgacacaaacaccaggctttgccctccctgctgattagtgattggccattagtcgagaagtttgtcctcatgaaattctgcttccactgaatcctagaatagctttggctaaagctgttatataaaaaattaaatctcttgaacatgccagctttgtgctgagattattggtccatcttctggctgcataaaaccagtctgtcccatccaccagggggtcagctcggattccaagtagatttgcagagaggacttggtggacatttagatgggtacataaatgtgttcaggaaatgctgagtaaacatgaatgacctgtttccttagggttgatttatttatggagctaagagaatatgctttgcctatgagcaaggatacttcctttctcacaaatatagatcaactttttccagtgaaaacatcaaagcataaaatacatttttagtttcaaggatgacattaatcatagaattcatgattatgtaagcttttcttcctaccataagcattaaattaactttggcctttaaccctaaaatgtataaaatcaatcataaattaggctttattcctatcctgggatatggaattaagcacattagaattgtagagatacatgtggttatgtctaacctactgaacaaaatagaatatgtttaaaaactactcattgcttgctatgtcctggcaatggaaaatttcatggtagaaacatagggagatgaggacagagatcaggaggtgggatagccgtaagtgaaacagaattgggattttactatgtataaatgacagaatcaaaagaagctctttgattcccttaagcaaagtgagatggcatgatctactttatttttgaaataattcctaattgggatcagtcgaatcagggaacttatgatgacaaaagagaataaggtcctgctctgagggaagcgaagaaggaagaagagaaaggaagacagaagagtgagatactcaagttagttctgcggtagcatacatttggtgcctgtgcagatagagtagaaggtgagagacagaaaagtcaacaataatatcaagaattctacggtggctcacacttgtaatcccagcactttggcagaggcaggtggattacctgaggtcagaagttcaagaccagcctggccaacgtggtgaaaccccatttctactaaaaatacaaaaattagccaggtgtggtggtacgtgcctgttaatcccagctattcaggaggctgaggcaggagaatcacttgaacctgggaggcagaggctgcagtgagccaagatcacaccactgcactccagcctgggcgacagagcatgactccgtctccaaaaaaaaaaaaaaaaaaaaaaaagctagagcatgagcctggagttcaggagaaagtctagttctatttctagactatagaaatagatctggagctgtagagaccaagtgaaagttttccctttgccccatggaggatcaccaaaaaatcaactgacaaaaggaagattaataggggaaaaggcatacagatttattaacatgcatggaggaaaatcacatcatgattacccaattacccagcatggtacagacatttatataccctttttcataaggaagagatgggggatgtaggcaattcttttgagggacagtaaatcattagggaggatgaatggacccaggaggaaagtgaggggtggaactacacaggaactaaagttgtcttatacagataaagtccaacaggtaatctcttaaagctgccctcagaagactagatgaaaagtctatctgggtgcagtgagaactcccagtctcttctcttctcagatggttgatttttcctggttattttgtgagatccctaggtagggggtcttaagtgcatttaaactttcttagatagggaaattccagagagtccctc

SEQ ID NO: 585160 - DNA, 4001 bp, Homo sapiens
ccaactacaccaggcacaaggctgggctctaggaaaacagaggtgaacaagcataatgtccctgcccaatttcgtcttacattttcctgtgacacacaatacaaaaatgaatatacaaaatggcagatgctgtaaagaaactatgaactttacagtaaaactgaagaatcatcaccaaaacacatgctgtgctttttctgttcaaagaagtgtgacaaaccactttttgtagaaatgtgaattactagtcatcatactttcctaatttaaaacagcacaatttcttcagctgtaggaggtagaatcccaatcttagaaaaaaaaaaaaaactaactttttgaaaggagatattctgcactggtgtaacagcacgtcagcacttaggccaagattgataacaacactggccaaaagataaacaatttacacaggtggcaagccatctaaggcaaaagctaaaaacaaaaacagagatggacttctcaagaagtcatttaatgtgtactgcatacacacgtaattttcaaaaacagaaagggaaggcacaaaaagttttggcagatgacactaaatcaacagttttaacattgctgcattccagatcattccaataaacaatggttcaacctactgagaatctagagacatttcatctctaggcagaacactggtttgtaaagtttagttgctggacctaggccatggaaagacacaagcaaatcctaatgttgaaactctaaatgcattcccacttagaattaaacaggaaagggaaggttcctcccccatgtaggaaactgagccgtaatttactggtttcaatttatagctatgaagtgtgtgtgttttggaggggagggaagatgagaagttggagaggtttaaggaaaagacacctgcatgaggtagggcagaagtggacatcctgaagacctgatttctaaaagcagcaggcctactaggaaaacttaaatctctttcatattgaccgcaaaagcgaattttgagcctgtaaggtggatcatggtagttgccggtctgcagatacactaggttgaagactcgcagcacctaatgtcactttttcatgctcacgccctcccagcgcccaatccgtgtttatggaatgaaggggaaaacccaaaagaatgaatgaacaagaaaggagtctagtcaggaggatggccctggacgcggactaggcgaaagcagggacgatgctcccggggccgggaggcgctcgaggacccccgggcgcagtggagaacgcggaccgcgatagggccgggggcgtagggcaagacaaaggcagcgcgggcggccagacacgggtgcccggcggggacggggaccgcgggcgctcacctcatcgccccacttgagaacgtccttgtgccggtccttgacggcgtggtagatgtgcaggaactggaggatcccgtgccgccgcacgtggtcggcatggcgcttggtttcctcccagctcagcggcgagccctgggacagcagccccatggccgccccctcctcctcctcctcctcctccgggctgacggcggtcgcccgctccgggcgcgagacggacactcagccgcccgcagaaggcggctgccgctccaccccgcgggggcgctctcgggccgcagtcggcggagggagggtcctgcccgctccggctccccggcggcggcccctggcgcccaggtgacagaccctgggtccgacgcaccgcgcggaggcgaaggcagaagaccgagagcaggcgggacggctctcggcccggcggcctcgccctccccgctgctcctcctcccgctccgatgcggcggcggcggaccccacggccgcgctgccgcggcggctcccgcttctctttgccggtctggtgcactggcttcttcctacttgtgaccaaaacctgcgccgccgcggagcatgcccagtctttgcgtccgctagctcgccgctcctgggcgcgatcctgcgctccaggttttatagactacgggcgaaggcggggagaggaggcggtgcagcggcggaggcgtggcctgaagcccggtgggaaccgcgggggctcaggaggcgtgtgcaagggtgattgggtcgcagttgaggggagcagctcgcgagaagggggcgtgcggtcggcctcgctttacgcaaacgcgacatatcaaaatgcattttttttcctaatcagaagagataaacttgggattcgggaagaaagttgattatttgaatcaatgacgaactcaccatattatgttttagttggacagggcctcacacttagagtgagagcggcagaatgtgttgagaaaagtattaacatggtagtgaagtgaaacagttcaactctaggctccatcacttactgactgtgagacttgggacgagttcttcccatatctgcataaaattagattaattctatcttttatagatgtcgtaattatgtgcatagtgtacatgtgtatagtgttggccaaaaaattgacctggttattaagaggaatcaatttgtcaacatgtgtaaatcattattccctactgtcttgattaactggtgacctatgttctctggatggcacggacaccatttattgcaaaaagtctccagacagaccatatgaggaaccatctccaaaagtttatcctccatctaaacctaaaattcatcccttaagtgatcaaaatgacgttcttgtgagcctaccgtggggtggggttgaagatagtgggaacacctagagttggccttatctcggagggaaaggagaggaaggaggtaccgtgcccccaagtgattgtttaataaatatgtgttgacagagcaatgacctgtcaggggaaaagtgaaggcaactagatcatacatgtacctacccagaaagtgtgtatttatcataccctcttccctcgcactacagagttaacatttagtaagcacttattaattgctaaatgagtgagtacatgatagcaggattctcttctcccacagccttcatattggatgtgcccctcacagggcttgggggcatgaatacccaaggtctggctgggatttccacaatggtgtgtgtgtgtgtctgtgtgtctgtgtgtgtgtgtctgtgtgtggtagggatgtttgaagctcaggagaagatgtttccatcctcatcacacaggtgggatagaaatcaaaccacattctaatttttccacagccttttcaacaacctcctttgccctcccaccaacctcaccagatctgtatatggttctggcactctgttgtttttcctgcttgaaattctccatctgacacactcatgttcatctcttgagtcacagttattcctctctgtgttttggttgcattcgtacattaatgatagagtcattttaaagatagctccacactaaatagtgaattcctctggggcacagatgacttatgccttttgtacctttaattctagaaaagtgcttggtatagagtgtgtgcttaataaatgttagcttctccgtgaaaagcaggtagtgggagagggggagaaacagtgtttcccatgtaggtaagacatccaaggatcattgggttattctcataatgtcatctgacattctcatagacctgcattgttcaacacgacagccatcagccacattggccaatgtacatttgaaatgtggctaacatgaccgagaaaccaaattttcattttaatttaatcaatttaaatgtaaatttaaaaactgatattccattcagttactggaaaacttttaagtaaatttgaaacaagttggaaatgtgaatccatttttgactgtaaattttatgaaatgtaattacagatcaagtatttccaatgaaaacttagtggcccagatgtgttgtgagtgtaagtcacacaccagattctaagacagtagaataaaaagatgtaaatatctcattaaaagttttatattgattacatagcgatatagcattttggaaatt

SEQ ID NO: 585161 - DNA, 4001 bp, Homo sapiens
gttcaagaccagcctgagaaacatgcagaaaccgtgtttatacaagaagtacaaatcactagctgggcatggtggtgcacacctgtagtcccagctactttgggaggctgaggtggaggattacccgagcccaggaggttgaggctgcagtgagccaagattgtgtcactgcatgccagcctgggtgacagagtgagaccttgtctcaaaaaataaataaatgaatgaatgaataaataaataaatgaatgaataaataaaagtttgttcaaatggcatttcttccctcacgagaaatagtgctctaatttctaactataattggttaaaggaggtttaccaagaaaaaaagaaagaaaatttgaagtgttctaccctgaggaaaaaaatgaataattttgcagatgaaagctacttgttagtacgatatgaagtgaaacatgttcacatgtataacatttcatttattggtactcttataaaaacaagagacataatgatgttatgtagagctatttaatagcgaactcaaactataaggtagattaatagtctaagctttggcgagacccatgaactcttttctttagtttttattgttttttttttttttttttttttaatggagtcttactcttatcacccaggctggagtgcagtggcgcaatctcagctcaccatagcctccacctctggggctccagtgattcttttacctcagcctcccaagtagctgggattacaggcacgcaccaccacacccagctaatttttgtattttcagtagagatggggtttcaccatgttgaccaggccggtcttgaactcctttcctcaggtgatccatacgtctctgtctcccaaagtgctgggattacaggcatgagccactgtgcccggcctgttctttagttatttagtgttatataatcctaatacttgtcaatcactgaactctaccaagggaaagtgtatgtatataaaagaccgttgacctgaacataagaatgaagttccttttttcttttttgtgtgtgctctagatgtccagagaaatttctctagtaacaaactatagaaatgatccctgaaagtatagtctttataaataaagttcttgaccattaaatgacaagctaatcagagtctcttcctgtctgttccacatacccatactgagctacaacctagtggttgcagagcacgaagtttctgttccccaactgaatgttgattttcaagactaaatcctcatggattttaagtaaaattctatgtttaggaaagaaacattgtgttactgaagaaatgatgccgcaaattgactctaattcaaaggacttaaataacaggtatagaagatgcagataccaagcagcagttccgtgtacttaccctgaacagtaacgatattgtctctgatggtgcaaattttgttataactaattggaatagatctactttttaaaaaccttggcaaataagattcatattttcaaaaatcaaaaacattgttataaagcctaggcaatatagacataattattttgtttttaaattaagggaagaataataaagaaaattttattacagaacaactatgttacattttagatttttctctcgatattaacatttgctaagcgaatgagcattaatttaatatttccctaaaagttaagaacaaaacatagaaaagaagaaaaaaccattttacagcccttaagtaaactctgttttcctcttctaggattgaaaaactacacttgtcaagactcctttttttaaagcaacttgcgcaaagtatattcaattttcatcatttctacagaaaaatgaactagaacaaatgaaaccctgtaggaatagagtggtcgttgccacatcccttacatttgcctctccacgggatttctggctttcttaccttctaacttcttacggagaagcagacagcactgtgtcgtgaaaatcttactgctggttcaagtcccagcaggctctggtcattttctgagcagacgctgttccctattccaggtcagggtacactatgctaatgagttctggcaatggtccaatcaaaatctagatgctctaggctctggataggtaagagcagcctgggagtcacttaaccagcctgattcttcccagaatgccagcaatgtgatgaatattctatgatgtgtctctgaacttccccctccctttatgttatgaggacatttgaactaaaatggacattgaaaagaacctcataaggaagtacagatgtttttcttcttgtgatgttacaggttgggccccaggcagacgattcacagtaggtcctaattctcccactatttacccggcaggtaatagttctctctcatgtgtgcaagagagagaagacagacagacagagatagagagatattatggtgaggaaatttactggaatagacagtggatagccaacatcctctataccagaaatactgaaatgctatcttaaccctagcaataatgtcccactaattctaagtgttctgatcccctaaaaatatacaattcttggccgggcgtggtggctcacacctgtaatcctagcactttgggaggccgatgtgggcggatcacaaggttgggagttcaaaaccagcctggccaagatggtgaaaccccgtctctactagaaatacaaaaattagccaggtgtggtggcgagcgcctgtaatcccagctatttgggagactgaggcagagaattgcttgaacccgggaagcggaggttgcgtgagctgagattgcgtcactgcagtcaagcctgggtgacagagcgaggctccatctcaaaaaaacaaaaacaaaacaaaacaaaacaacaaaaaaaaacgaacaaacaaaaaccaattatttcttctagagataccctcagtgctattcttccttttagagacatccgcagtacagcctaaatcagttcagttcatatgttttgttctaggtagtctgccaggccttggcaacacaagagagaatgaaagccattaagaagttcattctagtagaaaagatgattaaagctactaaataaggccgatttaatttgatgtatagaataaaagtaatataaatgagaaggctattaagctggagggaggagaaccaaaggaaacccaccaaaataatgctcgatgagccttttgaaggacaaatagatatttatcaaggcgtgaaggactggaagagggtgtttcggggagtgacaatatcctggacaacatgacgagggatcagtacctgtcaggaaggtccagactttcaaggatgaggcttaggaggcagagatgagaaggcgagaaggcaaaaggcttggaaagcctcatagttgcattcggcggcccctaatagatttctcattcgtctttcagttcatgaacaaattcctttcctgcctgaagtttaagaccctgcttcatctttttttttttttgaaacggagttttgctcttgttgcccaggctggagtgtaattgcactatctcggctcaccacaacctctgcctcccgagttcaggcgattctcctgcctcagcctcctgagtagctgggattacaggcgcacaccaccacgctcggctaattttgtatttttagtagagatggggtttctccatgttggtcaggctagtcttgaattcccgaactcaggtgatccacccgcctcggcctcccaaagtgctgggattacaggcgttagccaccacgcctgaccaaccctgcttgatcttattgtactttatctggccagtcttggtctcctctctgtaatccctttgttggtcaggaggacatttctccatccatcagatacattgtatcaggacaaagcctaaaattatgccagctggtgaaagaggatgtctacagggtctaggtccagaatcacaagcggagtaaagagtggatttagtgtcgacaggcaataagtcaatcactggcacacctgttgt

SEQ ID NO: 585162 - DNA, 4001 bp, Homo sapiens
tgtacatggacagaaacagaatgagatgcacttgctgtactgtggtccactttcatgaaaatggtaccatgtgactctaaagtaggcagactttaaaacaaaggagtgggccaggcacggtggctcacgcctgtaatcccagcactttgcgaggctaaggcgggtggatcagctgaggtcaggagttcgagaccagcctgaccaacatggagaaacccaatctctactaaaaatacaaaattagctgggcgtggtggcgcatgcttgtagtcccagctactcgggaagctgaggcaagagaatcgctggagcctgggggatggaggttgcagtgagctgagatcgtgtgattgcaccccagcctaggcaacaagagctaaaccccgcctcaaaaaacaaacaaacaacaacaaaaaaccccaacaaacaaacaaaaacaaaggagtaaaacacacctaacctactacaaatatatggatccaaaaaagtgctgacctctatgagaggcgacacaatgttgcaatgaattgttattcatctgaacacctatcagacacattttagttgcggacaaaatgacccatctcttttatccctgtgccacaacattgctggaagcccacatctgcaaatggcagggaagcaactctcattctacaccccccaccccctacagccaggacttcaacatcactcaattttggccctaaccagtgtgactaatgataattggtcattctctggaactggcttcaaaccacccacttcattcaccacttcatccaccccagtcattctttggacttggctccaaaccatttttgctttattgaaataaagcaaaatacaacaaattcaccctaaaagaatgatgatttgcttgtcattagagaagaagtaagttttgggtacaggtggccttgttggcatgactatggggcctccttcctctgagcagttagggaggtctgagcaaattgctcaagtcgggctacttgttttaaatttaggtcattagattcactttacagttgtacctcagttttgctgcatgagaagcagtggtatttacatctgcttagattttctccttagcttcctcatggatttaaagtaaatgaataaggagagaggcacctaatttctaccttggttaaagggaagtgaaaggacaggcgtcccgctctccccaagactgggaatgtggagcctgaccaacatttcctgctgctttgcttgtgatttcaggcaagcacaaggaaattgctgggagaagacacatttcttcttcttcttcttcttctttttttgagatggagttttgctcttgttgcccaggctggagttcaatggcgtgatcttggctcaccgcaacctctgcctctcgggttcaagcgattctcctgcctcagcctcccgagtagctgcgactttaggcatgcgccaccacgctgggctgattttgtatttttggtagagacggggtttctccatgttggtcaggctggtcttgaactcccgacctcagatgatccacccgcctcagcctcccaaagtgctgggattacaggtatgaaccacagcgcccggccaagaagacacatttctaaacccaactcagccttttgtagagtccagttttctttctacacttgagagggcctcagaaacccagaaattttgcgggtatgtgtgtgtgtgtgtgtgtgtgtgtgtgtgtgtgtgtgtgtgtgtgtgtgtgtatggtccgtccgcagactcttcaagaactcgaatgccattctccctccttcggatggacagcgccccgcgtgcccgcacacacccggttcacttacctgaggcatctgcggatcgttgatgtcccagctgagctgcatcccgtaggagcacacgccgaccgcttcctgcaccgcggccgccggcatctgcccaactcgctcgcgctttccgcccagggttctgaaaaatagaagaaaaaaggacaggtgcgccaggtgggttttttttcttctctttaaagaagaaagtggggtgtgtgaaggggaggtgcagagagagagaaagagagagaggctgtttagatatctggaagctggggacaatggttatggacccgggcggggccttgtccttggccgcggtgctgaacgttctccacccgaacggcagcatcgacctctggcagctgccccctcctttataaagatatacctccggggggctccgccctgtctcgcctacctcgctagcgcccacgctccaggggccggtcgccccctccaccacagtcccaggaacggaggtggaggttaaactcagccctggaagcaaatggaaactgcagccagagggtgggggtggagagggtaagtaggaatgtatcctttaagtttaaaaccttattattttcttcttttcttttcttcttttttgtctcactctgttgcccaggctagagtgcagtggcgccatctcagctaactgcaacctctgcctcccaggttcaagcgattctcctgcctcaacctcccgagtagctgggaatacaggtccgtgccaccaccctggctaatttttgtatttttagtagagacaggttttagccatgcgaaaccctgaccaagctggtcttgaactcctgacgatctgcccgcctgggcctcccaaagtgctgggattacaggcgtgagcaaccgcgaccggcctattttttttcttttttctaaacgcgtccagcttccctgatttcggaaaggggcttagatggaggctttccagcaaagtcccctgagagccaacactcaattccaggagagcatgggaaccgtgcgtgggcccctctgccgtccgcgtgcgccctagcctgaataaccgcgcccacgcctcctagttaggggtcagcccattttgggcctccactgccggctcttcccctaactattgtgagtgtctcgcagtcttggctctgctgtttgggacgtgccagggtgcgccaagcctccgcgtatgctcgcgagcccaggcgccttcacgctcccggggacttcggagggacctggccctgcaggaacggagtcctacaaagtgaacctggaggaggtggggggcggaaatgagcccggggtaggtgggagcctggggtaggtgggagcctggggaaggagggaaaggggagaggggaaaagtcccaaagaactcgctttctccactgctttggctccctctgggtctcagcttccttatctgtttatctgttaaataagaggttgtggttcggcgagctctcagttgccacccacccgaacacaaatctttttttttttttttttttttgagacggagtctcactctgtcttcccggctggagtgcagtggcgcaatctcggctcactgcaacctccgcctcccaggttcaaacgattctcctgcctcagcctcccgagtagctggaactacaggcgcgccatcgcgaccagctaattttgtattgttagtagagacagggttttaccaagttggccaggatggtctcgattttttgacttcgtgatcctcctgtctcggcctctcaaagtgctgggattaaaggcgtgagccaccgcgcccggcccacaactcttaaaaaaaaacttcactgatatagtcttggaaatatcacgacgaaattgaatttactccattacagtcttgggaggctttggaggactagagaatcgcggtggtgcggaggtgcgcaggacaatgtgggttctccggggctgggacgaaaccttcatcatctgagcagccgactcgcccagggctactccggcacatggagaccctcagtatatatatatataaaaaaaacaaaaaacaaaaaacaaacaaaacaaaacaaaaccgattgaagtgactaaagtcactctttgactaccccaaggccggattcttggcggccaggggaaagggcttctggaatttattgcccgcgtccttgttttgcagctgcacgcttc

SEQ ID NO: 585163 - DNA, 4001 bp, Homo sapiens
gagttggagaccagcctgggcaacatagcgagaccctgtctgcacaaaattttttttaaaaattagcccagtatggtggtgtgcacctgtagtcccagctactcaggagactgaagtgggaggattgctggagcccaggaggtccagggttcagtgagccatgatgttgcccctgcactccagcctgggccacagagtgagatccagtctcaaaaaaaaaaaagaacatctttctgcatttagaaaggactagggtgagaactatatatgttccagttttcatcttctacttcctaataaaaagtggctggttattctaaagccctttcaaatacgacacatttcttttgcatgaaatatggaattgtacgtacctggaatcctattgagtgtcacccagaaatgctcatcaggactgaaagtgtccttggaccactggagcaaatcaacagcccgtgggtcatgcagaacaaagttggcaaactctcttgatagagccacataggcagagccaaagtaaattgtgagattatgggggggaggcggtttcaacgctgttgttcttatcacataggaaagctctttgcccaggtgctcttggtggacatatttagtccgtccaattgcatgagctgggggcagcacccctggggtgatatttttacctttaaatcctttcagatactgaactatttccttgttggttttcagggggaagtcttgcccacaggtgttgataacgtacttccatgagacctcgaaggcagaaagatctctgatgcagttcaggtcagcctggagcctggagatccctccatagacaacgggttccatcttggaagccagaaaagcgtttgggaagcagcttaatagttgctctaccgcatctttaaattcagttgttgctttttcatccacatgaacacagtagatattttggggcatgtaaatagccctgaagagccttgcaaaggtgtcaaagtgatgatggatgaccattatatatgccaagggaaagtcagcttcttccttagataaaggggctgtgatgtagtggctctgggtcaagtattccttgcaagaagacttctcatggatcattagtttgtttttccacaggaaacgtgtttttccattgataaaagatgtgcaaacttgagtcagcctcaaagggtctgagatatttagcctttggaagcttggatctcccccaaaattgaacacagagaagacgataaaaataattacactagagacagaaattatgaagaggtaacgcattgataaaggcatgcctcaaagaagggtgaaatgtcaagagaccgtcaaaatctgtaagtcttttttccaaactcactcgtttctctgagttcttattttgcaacatactccactcactcctgccctgttggagacgctgggaatcgattccgtttcatcccgagagtccagctgctgtctctgtccctgtgccgatattacagccagatcccgcctctctcaaacctcctttgtttaaatccccgtggcaggttgctgaagcccagccttccctcctccctctgcctccccgtttgcatctgctagctgttttgctaaaactccggtaactctctttcccccggcagatttagtttcccatatctctttctttcatttcccatgccacccccgccccctggttactgccattcagggaatgagcgcagtgaaagccagagttgaagtgatgagctctggcaggcgtgccgcttcctgctagtcccctagcaggcggctggacttgccctctcttgttgttcgtggcaaggatccacagcctggcctctcagctcttccagcgcaacccacgggatagaaaatagcttctgttttccaacgtgctgtttcaggaaacgtgacacaagtgacatctcaaataaaagaaagcctcatccatcccagctccattgtaatgcttttttggccccaccccactgtttttcaaaacaagagcttactggaggaggagttcctgtcccagggggtctgaaattgctggggcgccttgggctcctgactctgaaacgaacccctctcctctcacttccagcttcggctgtggtgtttgtcttagaatactggggtcaaaagaagaagtcgtgagctacatccactgagttatatgagaccttagagcttcatgggaaataatttgaatcttggtcacaaatgatgctcagacaggggatttggtgggcattcaggctttaacccccccagagaacggcatcaaatgctcagaagtgtcatatgcctgcccagttaagcttatggaccacctaggaagtgggtgtttttatcccctatttgtaaatatagtggtgttctggccaaggagtatgaagctgttttacttggaaagttctcatcttcaactttccactttcccaccaactaatttttaatgaaatgtagattaatgcattttatttggtatcctcttaaaatggcttgcaaaacaccaacttaaccattgactgcctgcccatttcccctcactattcacctgacctaaacaactccgtgcctcaaccccaacacgttcactaccccaccccatgcagaaagaatgtcctttaatgcacattttcttccatttgaaaagtctctaccctgccatgaatggaattgataggacaacacgcggattccttgccttcacaatgggcaggaaagcaagtgctaccctcctgggattcaggggcaccctgaactccgaccaaatgacacatcatttcctgagcacactgtcgcttccattcttctaactttcattgtttacatttttcatgcgtttccagcttgtacattatttttctctctcccttaccaaagtctcctaaataaactctctatataacccacccctggatttttaggtcaagtagaaaacaatacaatgagaaagcagttcagtctaattcttagtgtcttctatggaatcgagcaaagagaatgatctaaaatttatgataaagaaaaattcaatcctaagtttttcttcttctgaataatacttttaaatattaggttattgtgtattctactcctaaacaaaagagagtaattcagtatcttctttggcaaagatttgtggcttagaatgaacattaaaatagttacagtttgacaaagcattcggtgcacataacttaatttgggcaacagagtctgtttacattattgtttccaactggccaataacatgggggtttggatttatacaaacttaggagacagacattaatagcattactatattaagaaatatagacactaaccaaattaggaatgttcgtaatacttccgtactcaatccagtacttcaaatggcattgtgtgttgaaaaatatagtcgattttcctcccagctcttttgtctgtccttgggccaattttctccactctcagattctggtattaaaaaatcttgacaggagaactttaaaaaaaatcccttattgcattagaggaagactgttacctttcttttctaataggctgtacaacctgcttatccagacaccatgcacttttttgctactgagactgaacaagtcagccctccaggcctgcctttaactatagctgaggacaaagttgacactagccagccatgccttgtcactcactttggatagaattattcccaaactagccaattaatcaggctagacatgttaacactcccctggggccatcttagaggctttctccatattccgttcatagtcttttattttgcagacattatttgaggtatgtttggtttttttcctttgaggcagtgtctgactctgtcacccaggctggagtgcagtggcaccatcatgtctcactgcggccttgacctcctggggtcaagcaatcctcctgcctcagcctcacaagtagctgggattacaggcatgtgccaccacgcccagctaatttttgtatttgtagaagagacgggattt

SEQ ID NO: 585164 - DNA, 4001 bp, Homo sapiens
tcctgcctcagcctcccgagcagctggggttacaggcatgtgccaccacacccggctaatttttgtattttctttttagtagagatggggtttcaccatgctggtaggctggtctcgaactcctgatctcaggtgatccgcctgactcggcctcccaaagtgctgggattacagtcatgagccacaccgcgcctggctgaaagctggtcttttcaagctcagtcaaataactttgaggcaatgcaagactgagcaaagttaaatagcagctcagttactaggcggagtcgaggccttaaaggcactttccgcctgcgtttgcacatgaaaagatatctgacaactccaggctttccaagccagggtctccgggagaagccagagctggagaacctcattcgttttaagtctaattttactgttgcagaaagttaccctggagttgaggattgagtgtattctataaatgggatattatgagaagctagaacagcagcccaatctccgtgcccgaggctttgtttgttgttttcacctttctggatggagttttgctcttaccctcccgacctctatcgctcagaaagtccttgataggattttgaagttacaggaaccaaaaattactgccataggtagaatacttccacaagggagacctcaagcttctgatcactaagaataattacatgaaagaatatagcctcccttcttccgataattgcaatatgctgttcaatcagaacagagtgcaaagaaacagatcctttacgctgtagggtccccagggcctgggattacagtctccctatttcttctggaaaaccacagcctacaggtaactaccctctatttggccaatctactaccaggtgcagaaagactatttacaagtgacgactctcaaaggcctacatttaaaaataaggaaaacagaaaagtagctttgagtttggcaaaacctgaatttacttagtagacctgtctttaatatcagaagatgggttttcatagaatggcaatatggatctactacttttctacatggcccagagcttcattttcaattttacctattatcaaatgaggttcatacctcacaggaatgttcatacctcacagcaactaattaaataaaatacatttcaggctgtggacggtggctcacgcctgtaatcccagcacttcaggaggctgaggcaggtggatcacatggagtcaggagtttgagaccagcctggccaacatgatgaaaccccatctctactaaagatacaaaaattagccgggcttggttgtgcatgcctgtagtcccagctactcaggaggctgaggcaggacccaggaggtgggggttgcagtaagctgagatcgcaccaccgtactctcgcctgggtgacagagtgagactatgtctggaaaaaaaaaaaaaaatttaaatgccagacagtaccaagtaccttatcaaattctggaaacattttcccttgcctgaaggaactgagaaacataaaccattaagtctgaagtgaacgttgttctttcctacaaagttaaaagttgtaactgagatacagaaggatactaatgatttagagacagatggaaaaccctcgtgcccagtaggcccatcatgtaatgaaacaacatacaaacatgctattctttgaaaaaaaaaaaacctttgaaaacagaaatctcatgaccaaatgactcattcaacattttttggtgtacttactttatgcccggcactgtgctaggttctggaaatataaaacatccacgcagcccatttgagtaccagcctattggaccttaaactgctgtcagcgatttaacagaggtaacacgagaagaccagctccccgcagtttcctccctccaccagtttcccagcacgctgacctccacctacctctctcagttcccaggagggtaagattgcccagaggcgtccagcagtgaacacagtaagcctgtttaaggtaaacgcagtttaaccctagcgttttaagtggaataacagaggctggaatgtgaaagtgggaaggtctgtttgctttcagtcccacccccaaggcctgccctaagagtctgagacaggagaacacacgtctacagagagcctgcctagagtctggattttttaagctgctggataccaggtgctacctgacaccagctcatcccctgcctctagagtcctggagggctttgagttgatcactttccactccaggaatgttataagaaaccgctcagaaaggtaactgccctgggtgtaactgggtttttcatgaggacactccaagatagacctcaggataattatttgggtgttttcctaagactaccctccattttgcccccttagaggctgctttttcaagaggggaagttttggattccctcacagacccctcgtgtttaaggttccactcttatgtttagttattggtaggaaatcttatagtctctgccccagggtaacctctaacagatttagatatgtgttctgctcaaatgctacccacactggggaaggggaatcctaaggtggcagcagaatttagtagaaaatgccctgggcattttcagaaggcaagttctctcctctctaatgcaagctgtatatcttgagcaagtcacttcctctctctgaacctctggcttttcctaggccaggcaaacgggctctttacataccctttcaggaatgaactgattcctgtcccaggaaacaagctagtcataccgtgcatttagccatatccctctcttctgccaaacactttgcagtcagaagcagcttataaaattcagtggggataaagcagggtatggtggtgtgcacctgcagtttcagctactagggaggctgaggcgggagggttgtttgagcccaggaattctgagaccagcctgggcaacatagtgagacatcaacttaaaaaaaaaaaaaaaaaaagaaaaaatccaactgagttaaaaaaaatttttttccagtcataaagccaggataaactgaagaaatagcaaatcaactttttttttttttttttttttttgtgacagagccttgctctgtcacccagtgcagtgtcacaatctcagctcactgcaccctctgcctcccaggttcaagcaattctcctgcctcagcctcctgagtagctgggactacaggcatccaccactatgcccgggtaatttttgtatttttagtacagaaagggtttcaccatgttgaccaggatgatcttgaactcctggactcaagtgatccacccctcttggcctcccaaagtgctaggattacaggcgtgagccaccacacccggcccaaatcaatgattatttttcttttctttttcgttttttttttttttgagaccgagttttgctcttgttgcccaggctggagggcaatggcacgatcttggctaaccgcagtctctgcctcctgggttcaagcaattctcctgtctcagcctccgagtagctgggattacaggcatgcgccaccatgccctgctaattttttgtatttttattaaagacggggtttctccatgttggtcaggatggtctcgaactcccgacctcaggtgatccacccaccttggcctcccaaagtgctgggattacaggtgtgagccactgcacctgtcgtctgttttctttttcttttcttttttttttgagatggagccttgctctgtcacccaggctggaatgcagtggtgcaatctcggctcactgctacctccgcctcctgggttgaagcaattctgtctcagcctcccaagtagctggattacagacgcctgccaccacgcccgactaatcttttgtatttttagtagagacggggtttctccatgttggtcaggctgatctcgaactcctgacctcaagtaatctgcccaccttggcctcctaaagtgctgggattacagatgtgagccaccccgcctggccaaatcaacaattcttaa

SEQ ID NO: 585165 - DNA, 4001 bp, Homo sapiens
atgggaaacagagtttagaaaagaaacccagtcctgaaccaacgagggagcttggtgctatcttctgcctcagctgcctggcataccttggacgctttcccaaattatcataaacaaccaaagactgcacagtatataaaaacaagaagctgcaaattggaatgtccaataaaaacctatgacttaaaaattgagaattctctttggatcatctgtagctagattctctctccgtatgttccaactctttgttacccactcctccaggctaaaatatcaggttagatttgtagaaacaagaagagctgagacctggctacttgttcagatcttaaaccagagatgtttcagccagaatggtgatttgtgaatatccgaagcagcttccaagattctaaaaccagtaagtacccctgtaacagctccatgaactttgagcaatgagactgcatcaatgaaagcgatgtctaacatccgtccgaaagaaacatcacctatttcaactcctaaattctagaatgcttattttaaaagtcaattttgtttgttacagctgtgtttatcaaggactacgaaaagtattaattcaaacaacagttaaaattcagcaactatgtaatcaaagttagttttgctggggcgactgcagccagcatttcttagatcactatatcacacatattgataagacaacagtcagcaatacactgttgctacaagcaaccaaactaatagttttctaagtatttaaatttatttcataataatttcaaatgagtcagttctctaggcgagcagaatgttagcaaactcaatctatcaatcagaatggaaattagtacctacctgaaaccctattaagtgtcacccagaaatgctcatcaggactataggtatcttttgaccattgtagtagatcaatggccctttggtcacgtagaacaaagtcgacaaagtctctggtaagcgccacataggcagtgccaaagtagatggtcagctgatgtggaggtgaagttttcaaaatattagtatttttcacaaaaaagccacctttatctgtatgctcttggtggacatatttagttcgcttaattgcatggtcaggaggcagcacccctggggtgatatttttccctttaaatcctttcagatgctgaactatctcccggttggttttcagggggaagtcttgtccacaggtgttgatgacgtacttccagggaacctcagaggcgacaaggtctttcagacagttcaggtcagcctggagtctggaaatgcctgcataaaccacagactctgtctttgaagcaatgaaagcattttggaagcaactcagtaactgcctcacagattccttatactcagctggggctttctcatccacgtgaacacagtagacattttggggcatatagatagccctaaagagcctttcaaaggtgtcaaagtccttatggatgaccatgacataggccaaagggaatgcagcctcttcttccgacaggggacttgtgatgtagtgattctgggtcaggtaatccttgcaagggacacttcgcaaaggtgatggtaatatattttcccacaaaaagactggcattttctctaaggcgtgattacaggcagttttcctaaaatacctttcactggaactgttcagcttctcataactttttggcgggctcaattggctactgtaaaatctcacaaaaatgaccacgctgagcagagtgaaagcaaaaaagcagtacctccaaaagttcattattttcacttccctggggaaacaatctcttcttttcagggaatgagaaatgatcggtgtgagaggttgaatttgcttctcttgccagtcttgaatttcgacagcttctccggagggctgcttgctttcctgaatcctttaatcctcctgtatcctctgcttcggtgtctcgtccatcctttttggatgtgcctggagatgcggtgcgtccctctctcactttggtctgcagttccccagggttgaatccctgctgtttgcaaaggctcagctaagcccagcccagtccagcctctaggaagcctcctcatttacatatgaaatgcaaattacgttctggaatgcaatgatgggtccttttcactggagccgagtttctcttgcttcaccctcaccgcctttcccttccatcaatctattctgatctgatctcccttctcacgctttctccaagccttctagaatcagaggctctgttttttctggctagccccacaacctgctggcagtccttaggagccacagcatttaaggatatcggctcctctggtttctttctcttcctgttctctgccacctcttttcattttagtgttatctgtacctctgggcacatacagacacagataatgaaaaatgaatgtgtgccaggcatggtggcacgcacgtgtagtctcagctactcaggaggttgaggcgggaggattgcttgagccaaggagatcaaggctgcagtgagctatgatggcagcactgcactccagcctgggcgacagtgagaccctgtctcttcaaacacttactttaaaaaatacatttgtaacatgactaagtagaagattatcagtggcagaaaaatataacaaggtagattaatttagattctaatgatgtgtcagaatatagcgcgcacacacacacacacacacacacacacacacacacacacacacacactgactatgggaagagggaacaaagaattacacccttgggggcacaggcaggacacaagggtggaaggaacctaggactgacattttacatgaaagagtcagtgttgatatcatatgatgaagtaaatgtggggaaaagaaagagagatcagattgttactgtgtctatgtagaaaacagaagacataagaaactccattttgttctgctttgagatgctgttaatctgtaacttttgtcccaaccttgtgctcacaaaaacatgtgctgtattgaatcaaggtttaatggatctagggctgtgcaggatgtgccttggtaaaaatgtgtttgcaggcagtatgctttgtaaaagtcatcgccattctccattctctattaactagagacacaatgcactgcggaaggccgcaggaacccctgcccaagaaagcctgggtattgtccaggtttccccccactgagacaacctgagatacggcctcgtgggaagggaaagaccttacagccccccagcccgacatccgtaaagggtctgtgctgaggaggattagtgaaagaagaaggcctcaatgcggttgagataagaggaaggcgtctgtctcccgcacgtccctgggaatggaatgacaaatgtaaaaccaaccatacattctactctaagagaaaatcgccttatggatacaggtgagacatcatggcagcaatactactctttactgcactgagatgtttatgtaaagttaaatataaatctagcctacgtgtacatttaggcccagcacttttccttaaacttatttatgacacagattcctttactcacatgtttttctgctgaccctctccccaccttcaccctatagccccaccacattcccctcgccaagataggaaaaatagtgatcaataaatactgagagaactcagagactcagagtaagtgagcaccggtgttggtcctcacttactaagcgccggtcccccagggcccacttttcttcctctgtactttgtctctgtgtcttatttcttttctcagtctctcatctccaccttgcaagaaatacccacaggagtggagaggcaggctcccttcatcaaacacacctaagtttgcatgccagagagaaatgtgatagtgttcccagagagcaaaagttgggtcccatttcacaaagagagcttcagataacttgagctgttgacacagtattatctacaatatgtggagtgactacctactggctctctttaaaagcctgacaacctca

SEQ ID NO: 585166 - DNA, 4001 bp, Homo sapiens
tttgacaggcctgtgaccagttatgagtgtggatcgaaggctacagacctgtcaccctcactgggcaagcaattcaaagtccaggcctttgctaaaaggacaatttaccaggatgagtcaaagtagctagtttcaattccaggcaaacactcgtatctatacactcccaacagccagatcagcctgataactgtttggggtttttcacttcctacgttctatgtgttgaaccttcaacagtgactgtaaagcaaaccaagacgaccaccccactgtgcactcgcaggggcaccctgcaaaagaaggagttaaaaaaagaaagaagaaagaagctcaaaacctaccctaaaaacatgaacaaaaccctattctgtcatcaccattactaaactaggtctattatgcctcttatcgctggttttgaagaggtaacagacatgtcttgttaattaaagtcacagggatatttgaaaaataagaacagaagaagtatccagaaatgtctaatttgtgtcacatctcttgaaaccagagcccccagacactttcatggccatggtcccagagacagccagaaaacaaggtcatccttgttccccaaattgccaccctcctgctctaggtttgctctgtgggtctgaacccaggacaggaactgccatctttatggtggagaaacgatgttaacaacatggtctttcagatatgaccagtcctaagctctccagtatacgcagggctcatcagggaccagttttgtacaaattgcactaatagaattataccataagatcgttataagatatttgatatgcaaagagccaatgtaaacaagggagttatccacccaacatacatgttccattaaacagaaaataaatattagcattcagttcaatggcattcagttcaaggccaaagaaacaggccacaaagggcagacacttaataaaattaactgacaattaaaactgacaatgtgggcagcctccttaggaattctatcagatgttgcatctgagtcaatagccaaatggcctgatgaaaatgcctttctatggagaaagagttttacattctgttcatagctcttcgaagacagaattaaaacacacgtatatttcacctaccctgaatccatacctatttttaacaaataaaacagtctttccaagactacataacttccggctggtttctggatgttgtctctgttccttcgcagctcctcccttctaatctgttctactattcgcttcatctggttataagctttgttcttgttataagctttgtgtttttcctcaccaatagaaacttcagctttcaaaggtgagctgctcattttcttggaattgtaagatcaagcaaccttcctgggattgttttaggttacgtgcaagaactgatgatgaacaaaacatgcccttctctttcccctgagcataggctgagaggctgctactctgtcctcagagattgttcagactgcctgggagttgaggggagcagggaccagatggtgaggcaccctgaactcatctccagcccacgggtcaacactgtgccttccgaaactattcctgaaggcgattagggagggccttttctcatgcaaagcatccatgcctctggagctactgcgcccatcctcctaaaaatttaaaatctattactccaaattggggcagaagacatttcccgggaggctgcagtcaaaagttaaaaccccctggttttaccaaatcagtctttactaacctatgacgcctctgaaaacattctaatacatcatcacccccatccaaccactcccaccgtccttgcctccagcgcagacgaaataattccagccgatggtaacatctgcaatctcacgctaaactaactcacagcagaaagaaacaaacgaccctagcagggcgccaccgctgctgaagggcaggtcctctatcgcacccaagaaaacccgacacacgtgtgcggccttttattcaggcgtttctgggcgcgcactcgcctctcccaggcgcgcgcgcgcacaaccctcctccacccccccatcccccccccccacacacacacacttggacactacacacacagctgaggagtaactttcctcttctcgcggagcaccctatcccctattatcggcatctgatcttcctagttcggatccccggaacacacgccttctccagcctgcaatctacacacgtggggaagcgcgtccaagtggtgccaggaggcaggagggaagcgcaaaggtggggaaggccggggacgaggaaggagggagctctgagtcggatctgggatctcagatccccggggcagcgtagatgcagggtaagcttctgggatgcggagagggaaaggcaggggggaaggaacctagagaaggttaaagggcgggggtgggacggaggatgcggggtaggggtcgctcacctagggttttgacagcgatctgtctggtgaggggcggcggcaggttaatgcacaccaagtccacgtcctgatgcagcagcacctcatcaatgcggctagtgtagaaggggacactcatctccttggccagctcctccgcttcttcctgcgtgcggccccacagcgccttcaccgcgaagccctcgtctttcagcagcgggatgatgacacgggccgtgaggctggtgccgaacacgcccaccccgggaagcatggctgctcagagccgcctggttctgcttctgctcggatctccagtccaacgcgcgcacacacccacctctagccagtcctgcaccccgctcctgtagccaatctagccgcggtgcgccagccgccgtgcaccgggcaaggcgcccgggtgcccagagcgcaccgagctgcaggcggagcaagctcggggcgcctcagaacggtgactgcggcagtgtccgccacgcggggctcgcgtccttcccggagtcggcggcagggacccccccagggcgccggaggcttcgaagccccctggagccccggctcaggctgcgctcccgcggcagcgccagtccgctgcgtgcgccccgccaaggccgctccatggccggctcatccccgcggccgcgccgccgcagcccgggaccggctctctcccgcgtcgtttgcgcagccggcgaatcgcacagacaaacgtctacaccctgccagagcacggaaccgctccgcgggggagtctcctttcttcctagctctccgttgggaatgaaataatcccgcggccgccaggaggccggctaaggatgcggcccggagcgcgccggactgggatcccgagctgcagcgcggcagcggcggccacgacccggcgccagcctcctcattctgctgccatgttcgctcgcctcgcggctcgggcggcctcggccccaggccggctcaggctctgggatcccgcggggacgagggcggagttggcgagtttggctgtcagcggccggtgttcctgcaccgccctcgctgcagcgccgcgcgccattggccgccgcgcgccgcccccgcccccgccgccgccagctccgggtgcgcgctgcgcccgggccccgggagcccagcccggctcctccccggccccgcccaggccgcctcgcccgcctcctgcccctccgcttcttccctttctttgccctcaccatctccttctcttccctgcttcactccaaaccccgccccaaccaagcaaatacatctatctaggcaggacgcgccctaataggttagtcgcctgtcccttggaagagagcagtgggcgccttggcctggggtaggtgaggggacccggcgaggtgcgaacagccgataataataacctcggctcccggagcgtttcttgcgtgctgagcatcatactaacgcctttccaggtattgtcccttttagtcctcgcagcaacctaaggttattgtaaacccattttaccagtgatgtgaatgagccgcaatgaaggctaagggacttgcgcaaggtgacat

SEQ ID NO: 585167 - DNA, 4001 bp, Homo sapiens
gaggctgctactctgtcctcagagattgttcagactgcctgggagttgaggggagcagggaccagatggtgaggcaccctgaactcatctccagcccacgggtcaacactgtgccttccgaaactattcctgaaggcgattagggagggccttttctcatgcaaagcatccatgcctctggagctactgcgcccatcctcctaaaaatttaaaatctattactccaaattggggcagaagacatttcccgggaggctgcagtcaaaagttaaaaccccctggttttaccaaatcagtctttactaacctatgacgcctctgaaaacattctaatacatcatcacccccatccaaccactcccaccgtccttgcctccagcgcagacgaaataattccagccgatggtaacatctgcaatctcacgctaaactaactcacagcagaaagaaacaaacgaccctagcagggcgccaccgctgctgaagggcaggtcctctatcgcacccaagaaaacccgacacacgtgtgcggccttttattcaggcgtttctgggcgcgcactcgcctctcccaggcgcgcgcgcgcacaaccctcctccacccccccatcccccccccccacacacacacacttggacactacacacacagctgaggagtaactttcctcttctcgcggagcaccctatcccctattatcggcatctgatcttcctagttcggatccccggaacacacgccttctccagcctgcaatctacacacgtggggaagcgcgtccaagtggtgccaggaggcaggagggaagcgcaaaggtggggaaggccggggacgaggaaggagggagctctgagtcggatctgggatctcagatccccggggcagcgtagatgcagggtaagcttctgggatgcggagagggaaaggcaggggggaaggaacctagagaaggttaaagggcgggggtgggacggaggatgcggggtaggggtcgctcacctagggttttgacagcgatctgtctggtgaggggcggcggcaggttaatgcacaccaagtccacgtcctgatgcagcagcacctcatcaatgcggctagtgtagaaggggacactcatctccttggccagctcctccgcttcttcctgcgtgcggccccacagcgccttcaccgcgaagccctcgtctttcagcagcgggatgatgacacgggccgtgaggctggtgccgaacacgcccaccccgggaagcatggctgctcagagccgcctggttctgcttctgctcggatctccagtccaacgcgcgcacacacccacctctagccagtcctgcaccccgctcctgtagccaatctagccgcggtgcgccagccgccgtgcaccgggcaaggcgcccgggtgcccagagcgcaccgagctgcaggcggagcaagctcggggcgcctcagaacggtgactgcggcagtgtccgccacgcggggctcgcgtccttcccggagtcggcggcagggacccccccagggcgccggaggcttcgaagccccctggagccccggctcaggctgcgctcccgcggcagcgccagtccgctgcgtgcgccccgccaaggccgctccatggccggctcatccccgcggccgcgccgccgcagcccgggaccggctctctcccgcgtcgtttgcgcagccggcgaatcgcacagacaaacgtctacaccctgccagagcacggaaccgctccgcgggggagtctcctttcttcctagctctccgttgggaatgaaataatcccgcggccgccaggaggccggctaaggatgcggcccggagcgcgccggactgggatcccgagctgcagcgcggcagcggcggccacgacccggcgccagcctcctcattctgctgccatgttcgctcgcctcgcggctcgggcggcctcggccccaggccggctcaggctctgggatcccgcggggacgagggcggagttggcgagtttggctgtcagcggccggtgttcctgcaccgccctcgctgcagcgccgcgcgccattggccgccgcgcgccgcccccgcccccgccgccgccagctccgggtgcgcgctgcgcccgggccccgggagcccagcccggctcctccccggccccgcccaggccgcctcgcccgcctcctgcccctccgcttcttccctttctttgccctcaccatctccttctcttccctgcttcactccaaaccccgccccaaccaagcaaatacatctatctaggcaggacgcgccctaataggttagtcgcctgtcccttggaagagagcagtgggcgccttggcctggggtaggtgaggggacccggcgaggtgcgaacagccgataataataacctcggctcccggagcgtttcttgcgtgctgagcatcatactaacgcctttccaggtattgtcccttttagtcctcgcagcaacctaaggttattgtaaacccattttaccagtgatgtgaatgagccgcaatgaaggctaagggacttgcgcaaggtgacatatataagcaacaggcctgcgattggaatccaggccccagagtctgggcacggaaccgcagacttctacggtctccttccaagctagcctgctccaatcgcgcgcccccgctccggccgcgcacgcacggttcagccgccttcttccaagacagtccagtcttggcgggctcccatctgcctcccacctcccccgcccctaggcccatgcccgcccccgcgtagacgctgtggtgtgtacggccgcagcggggcagggggtctccgaggccgctgcggcacgtgcgtctcgtgtctagtttcgagacggatacgtcgccctggccacatgccacgcccgcctcttgcttcggctcctgttgccgtcgccacttaccgcagcctttacttctcccagcttgcccccacctccaccaccctgcacccttcccaggccctcgagggggcactgaggaggactggccaaggctggccccgcacctctggagccatggggactctgcgtctgtctggttttccgccatatccttggcacctggcacactgccttgccctgtatgtagtaggcgctcaataaacatttgctaaataaatgtatgcatattcatcgaatgcccgcttcgcacccatttggtgccgggagaggggactaaaaagtgaaaggcacgtcttctagctgaaggtctctggagaggtcatgggtcaggtcatgttcatctcctgtcttcagcactgggctcaatgtagcacatggtctgccgcaacacgagtggaaaacgtgatacttgcaagagtttaaaacaacttgtaacaactggcagtgaggcggggcgcgtggagagagcaggataccaaaaaagctgtgtgtggcaatgcggggtggaggctgacctagggcattagaagaaaggcacaaaggacacagtgctgggtggctggcagcagcctggggaggactgagagacaaagaggggtgttgccctcaatactaacaggcttcttttgagcaggggttttgtaagaaccaaggcaggaacgcctatctgggcacaggggcaggcagtggtgtcagacccaaggggctggatacatcacaggcttgtcacatgtcagagatggccaggctttcagggagcagaggatgtgcagtagtggtcggagcacagctagagccactggcgttgacttctggctctgccatttactagctgtgggaccttgagcaaatcacttctctgcggcatagtttcatctataaaatgggtgggtaataatggtatataccacaaggggttttacaggatcgtattcactaatacttacaaagtcctgagaataaggcatggtgcatagtaagttctatataaatgttaaataaataaatatagagaatgggtctgttaccaatgtcatttcttgatgagagagaccattgtacagtgaagcaatatctaag

SEQ ID NO: 585168 - DNA, 4001 bp, Homo sapiens
gaacccacaaatgttctcggaacaaggaaccagtaaagtacagacatctggccccaggattttgctggctccagggacgtcactataaacccactaacactaattgctttcacgtctgctcccatttctagtggaaataaaatgcctctctggctaatggaaaatgaaacgccgtttgctgtttgtttaccacattacataagagctttctgtagcacccctcctcccctggcccctgccctgaaaccctctgaaggacagcttgtgcaaagcctgcaagcgctctacaaatacaaggtaacacggcttcagaaagggcgcctgtattcacgttaggactgtacaactccttaatcctaaacagacgggaggggagggcagaaagaagagagcgagagcacaatcgagagtgagaagagaagaattctatttgctttaaattcatgcttccaggaatattttccatctccttacttgatgctaagtgcaaagatctagagtagctcatcaaacctcaacttctaaattcaatttccctgacaaagaaggggaaataaaggtccagctgaaactggggtttaagaaagtggactctcatccattgggcctttaaagtgtctgacagtaggtgattgggaggccttctttgacagtcctgttctggttggctgcctgtgtttatccccatgttggcattttgtacacagtgtgatagcaaatataaagacctctggctgtccttcctctgcccttgtcagttctctccttctccagcagcagaaccactcatttcagctggacccatggttgccaagaataaaaaactccatttcccagtctcccttgccattaagtgtggccatgtgactaagttctggccaatgggatgtgaatggaagagctgtgtaaactttccatggtgcaccctccatttcccttttcctgtgtgacaagcataaggctatattgggccatgaaggcaaagacaatactctagggatggtggcgccaagacagaggatcctggatcccaaacactatagagctgccagactgcttacagagcgactgctatgggaggaagaactttttattttggatctgggttactgcagctgaaattgtatgcttgggatctatttgctgaagagaagaaaggaggatacccttaaaatagatgaccccaccatttggctttcacattgaaaagtcagcctcagctcttcctacttttcttattgatgaagaatcttacacccctaccagctcccgggcctcaaagactacatcttcctccttgcctttctttgtccccattttcttctgtatgctgcctactcccaggctggcacagagcagcactccttgaccagaatggcccagacagttggaataaaggatgacattaaaatagagccctttgttatgtctctagggagtgtcttcaaaacaccctgttacaatggccgagaaaattgcctgagatggccaagttcaaagggcttatctttgaatcaaaagcgggaatggggttttgtgcaaatgtcatcttctgcccagttctgagtttctatgtagcaaacttggagtaaagttaagatcaaatggggctcagaggatcagctattacaataggcctcagtcagatggcttttcttgagccactggatttcatcagaagagaattgcaaacacaaaccctttgtttaatgtagacggtgatgaaataaatagggtgactccatctcaaccaccctcctccctgtactcacccaaccaactgactctcggagattgcccaaccaaagagcagaagttcacagaatatctcttcttgggtcagcacccaaaggtgggagcacttggctttgctcccagaaaactataatctggtgaaggcatgtgagaaatgtgcccttccctactgcatactgcagaagaacgtggctgagagcccggccacggtagcatctatcctccacatagagtctttatgaagtgacaccttctctctccagctcaggcaatagcctctgcctgatcagaacacaattgaatgtggccttgggccagactatggcaggcaaaggttaatttcctttccttcttagagcaggacctagttccaattgcctcgctttgcctaactcaattttccgcacaatatagcaagctccttatcttgggcagtgaggtagaagcttccccttgttcctccttatggtttccagtggaactttgaggaggggcacattttgcttaaaaaacagcattaattgtgaagcgagaatagcttttctactgatggctgcttttctagcaaaaatgtctgcctgcaaggacctccccatgtgacctggcagggagaaaagataatgaggagctcaggtgaacaactcaggacctgaggaaagtaggccagtgagtcaaaataaaatccagccaggagcaaacagaagagttaatgaacaggagatcacctgatgcccgggcccctctacctttagcgatttcatgtccgaaggtactctgtgctcacccgggtaacacagctttgttaagagaatagtcaggctgatagatttgttcacttctatagtcgcttatcttggaattactccattgtttttagaaaaatgacagttcattttctaaaaattaacacaggccagtgtggtggctcacgcctgtaatcccagcactttgggaggtggaggtgggtggatcactttgaggtcaggagtttgataccagcctggctaacatggtgaaaccccctctctactaaaaatacaaaattagccaggtatggtggcatgtgcctgtaatcccaagtacttgcaaggctgaggcaggacaattgcttgaaccagggaggtggaggttgcagtgagctgagattgtgccattgccctccagcctgggtgacagagtgagactccatcagaaaggaaagaaagaaagaaagaaagaaagaaagaaagaaagaaagaaagaaagaaagaaagaaagagaggaaagaaagaaaggaaagagagagagagagagaaagaaagaaagaaagagaaagaaggaaagagagagagaggaaggaaggaaggagagaaagagagaaagagagagagagagggaaagatagagagacagagaggaaggaaggaagaaaggaaggaaggaagaaaggaaggaaggagagaaagagagagagagaaagagagaaagagacagaggaaggaaggaaggaaggaaggaaggaaaaaaacaatgaaataaaagagacaaatcctaagaagaaaatgaaatgcctccaaacccaccatccgtcaagtaaccatcatgagattaggggactgcaattttagttacgtctttatgcacagagagatagtaggaaggatagatttacaagcagaaataatttaaagggagtataacacatagtttatttaataaagaggattccactatttgaacttaacagataagaaagaaactgaattgcagccgggcacggtggctcacgcctgtaatcccaacactttggaagcccgagatgggcagatcacgaggttgggagattgagaccatcctagctaacacagtgaaaccccgtctctactaaaaatacaaaaaaattagccaggcatggtggcacacacctgtagtcccagctactccaggaggctgaggcaggagaatggtgtaaacccgggaggcagaggttgcagtgagccaagatcgtgccactgcactctagcctgggcgacagagcggggctccatttcaaaaaaaaaaaaaaaaaagaaagaaagaaactgaattgaaataggatctgctactgaatttctaaaatgatacggatttttagttttttttttttttttttttagattggcagggtaaacctctaaggccaactgaggtaaacatcatcagaaaagcaggtaacatagggaaataaagccccagatgatgcacaaatgttttgtttggcactctgg

SEQ ID NO: 585169 - DNA, 4001 bp, Homo sapiens
ttgtgaaaagccccttcaagaatcttataagtgataatatcccagatatatcatcaaaacttcatcagtacttcagagtaataatcacttagaaatactacatgttgtcttccccaaatatgttttacttcctttcacattttcagtttttaatgttttacttcctttcacattttcagtttttggttgaacaagcttcttaatagattattttataggattttccacacttcctactcaacaaaatattgactcaactaagaaaaccacctcaatgatttggtccacaagaatcaagaatgtattacctctccaaaatctgtcttattcattccaaactatgacttgtggttttgtatttaacctaggatttttcaagaattttcctgtaatactcaatgaaaaataacttctatttttaaattaataagatggataatgctgcaaattatatcagtgttttaaagatgtatggggcttattatcctactaaatgttctgagattttaaaattcattgttttccacatttctttaccaacagacattttcctcattataagacctatttagataatgtcaaacaagcattctaaaaaatataatatgggaaatgttggtacaacatatcaaatagtataattttagttctaacaatgttaagaagttatttccctccttcatgcaacctggtgtcaagttaatttagaagtaaaagatgaaaataagaggccattgccttttcaactgaggtcataatgagtctgtaatgtattttgtgagcttcattatattgctgcctgatctataaaaattaaagtttcctatatttctctttatcacaaaaaagaactaaagaaatattaacaatctttataaaaataagaaaatattttaggaataattacaaaaagcaaaattatggaacaatggaaaaatattacttaaacaaaagaaaaactgaaaatataagggatttctctccttcttaacttgtttccttgacttgatatgactctccttttatgttcgatacaatttaaagtaaacttctttgctttctggcccataattatgcctttattcaagtatatattagcttaaacataaaatgccatatttttaaaattacaatctagctacagttacaattattccttttctgaattcagtttatagattctaccaaatgctaaagaagatataaaatattctccagtcacacatctagcaaatagattcatggattctacattaaataaaaataaattatttttcatcaacatcttataatacattcatcggatccaatacaagagaagtaagtccacacttgagttctaggtcataaaaattaatgaaaatatgaagcattctgatatggtgttaagtggttttacttcactaaattacttctagttagcaaatattaacactgtaggtaaattgaatgttttaaattaatcttatttttgtttaatttcaaagcaaaataaataaaatagataacagtttgaaatttttcatcttataacttgtaaatagatactggaaggttttatttttatttctaaaaggttctaacacatgtgtgaattccattaatcctaataagtaactcaaagtcattgggtcattctatacaataaaacagaaacaagctgagagattaatacaattttcacatgctgcattatctatagagttagaaataagtgagtaaaagtgagtgtacatttttgcaagaagaataaaccatgttaaagcataaatttgtaatttacttggtacttcatattataagcccctgttaagcttaagtgtgatggtattcagtttacaaagaattagtattatgaataattcagataaaccagaagcaccattcacttacccaagaaaataaacactatcatgctggacaactcacggcagttcacctggaaaaaaaggcagatgcgtttcttctgacaactttcttaagagtaactgtccagaataaggcttcagcctctgtgtttgcttcctaaaggcattaccaattcaagtcagcttcctatatcatcatttcctccccagtgtttcctaagttgtgaactgttctaattatattcaaattcgattattctcctgagggtgctggtcttgaatattaggatattatgcctctaagaaagcccatgagccaaatactaagagaaatgatacataatctgcacgttcatgaaaaaggtttattttccttaactaaaatacaacactacgtaaaagcctcccaaatatgacccaaaattttcaaagacacttgagcatactcagtctccacttgtttaattagcctcattaaggcaatttcatgtcatttgaggatatagaaaagctaaaaacgcataatagccctggaaaatgtatgcaaaatcgaagttctactagaattagcctgatataactcaaacatactgggaagctgcttcccaaacaaagaatgttgtattacatgtgccacaaaccccagtatgcttaaaaattatgccacttcagctacagtatctgataccttccaagtacagctacagtgtaaaaaacatactcttctcagtgatgcagaaattctatgttccactggaaagataatcatctacatttgtgtgcatcacttgacaactattttttttcctagtttcaatgaagggacttatttatcttatgccttggtttggctacgcccttcctcatgtaaacctacagcacatcatctttcttggggtgtcatgagacttctatttctaaatcacctggaggcctttctagaatgaatgcttaaaaaataaaatgctgctttggcaagaaattaagaagagatagggatgggagagaagtatttgtgcagttacaccattgagtttttgattgcatattgttcatgtttattttataccagtagagaagttatactatattttgttttcagcaggcataatgaaaaaacacagactctagagtccaacaaacaaaaattataacactgcttttctctatagatctagatgagtgacttagcattggaagttattcactcctttgtaaaatgtgtcaattgtattaattcttgctgtaatataaggtatgtatatgaggggcttatatcacaaaaaaattgattatattacattcactgacttaattattacataatagaaggattataatatcataaaattaatcaatcttttcttcttttcaagggattgagtcactaaactttcctaatgacttctaccaagacaagcttagatataagccaacttaaaaggacttaaactaggacagagttggttactaccatagttgaagagtccgtgggaagaattaatttcaggtgtgttttaaactgttttctctgggtctaagttgtttgtttcctcctgtctcttacctgcattcttctctaccagttctattcccagaaaggctatttccttctggtgggaagatggctgtgaagcccttggcaaacatccttctctcttagaaagcagggtagaaagtgtcattcttttactattaaagttgcagaattaagtcacatcagttctagatgtgtcaagtgccaatcaattttacaaaaggaacttaccccatgtccagtatcatagatacaggttgtcagtgtagttggcccttttcaaagcacagaatctgatggtgcagaaggtgtgcatcacgaaggaaaattatggtattagaagaagcagctgaagggatcttggggcagcaaaaaccacatgcttagtaatgtatctaagtgctgagtttaagaagagcaaccacaaggaaaataaacttatgaaacaaaggaagagaataacataattttctgttcaaggaaggcgatatagttatgactttctagagtgcagtgatccacagaacctgaatataagaccctgtgaatggtgctaatctttgccagacaagtacagctgcttcggtctataactt

SEQ ID NO: 585170 - DNA, 4001 bp, Homo sapiens
ctttcctattggaaatgtttcacaataagacgttgagaagacttagatcaagggacttcagtttcccacagacacagtccaggtaatgagattctctttctagttgttcagcactcatttaatctgtgaaactttttgttgttgagacaggctcttgctatgttaaccaggcttatcatccaacacccaactcttggtctcaggcaatcctctggctttggattcccagtagctgggattacaggcgtgagccactgcacccagcgtaatatgtgaatttccgagtttagatctggactttctgaaagtgaaatgaaggcccaagaagggagaactgaaatagtaaaatcatcactaagagccagccgacaatgcagtgtattttaagcctgcagtcaaaatgtatttttcgcagattatatagacgtaaacatctcattgacacataggtgtcaattatgaatctttaaaacttgaaaaataggaaaataatgtccgtatttccagaactttttagaactatttcacttttatttggtcccttggtgcctgtccatcacattcctattgtttaaccagatgcaactgtggtccacatataatttcagatataggtggttcttatggcaggcaatgtcgtggcttcttggaatgccctgcagaactgagacatgctcatcatttttgtacccacgtggggtaatgtcattatcctaaaacgttaacacttggtttttttgtttttgtttgtttgttttgttttgagctccctcacccaggctggaatgcagtggcacgatctcggctcactgcaacctctgcctcccgggttcaagcaattctcctgtctccgcctcccgagtagctgggactacaggcacctgcaaccacgcccagctaatttttctatttttagtagagacggggtttcaccttgttggtcaaagtgacacttaccgtgcccttcgcctttgtatttagagtgttcatattcaagtcttgactaggaagaggtgtaccgacatagtttcttgtcattctcagaacacttgctctttaaaatattcaaacttttccctaccattctactgaaaaaaggctgatactggcctaggtaggcacgactctacggcaggaatggtgagcatcagccacgttttaatgttaggatgcctcgattctcccacctcagctggcatcagaagcacctgcaggactctccaacccggactgctgggccccgcccccagaggccgggctgagtccccaggggatgcggacaccgccgatcgcgccccgccgtgagaacttctcctccaacatccgacaaaaacattacgtcgcgcgagggccaggtctctccctctgcccacctgagcccggcggagccccgcagcctcggaacggcggaccctcgcgatcgcaggccgagcaggcacaagtggcctggaaatgcgcgaagtgggcaacttccacacttcccgagcacacaaacattccttgcccaagcgctggctctaccccgggaaggcgccattacgaaggcctgatcaccggcaaccgcgcgcttcgacggcaaagccccgtcaggtcgcgcgccggcttgggccgccggagagtcggtgtggagtggctcgaggctcactcacagcgacgcagccccagtgggtccctttcctcttacctcggcctcccacgccgcccccatttcctggggtgcttctccccacacctccttcgggggcccggacccccgcccctgcccgccggtgggatgtgggaagcgtcactgtggacagcccgggcctcccggagagtcggagtcgtaaagcggccagccaggcccgccctgccctacctgtggggctccggacagcggcggcggctcgggggcgcccgtcgtcagccagccggaggcgggtagcgccacgaacagcaggagccggagggcgagcgaccccggtggagcgccctccatcttggacaacccgggcagagggcagccgcggccgggaggtgagggcggagccggcccgcgggcgggacggagcttcggcgggagggacggggaggggcggggagagacggggaggggcgggacgggccctcccctccccgggcggccgcggagaggcgcggggacgctccgagatccggctcgccagggaaaggcgtttgcgcacgcgcagcgccgcgcggcgtcgaggggcggagtgaaatcttggaaggtacggcccctcattagacccgccctcaggattggacaggactccaactggagcgatgtaaatgtcctcgtaaccattatttttaaaattagtatttacacacatgcatgtgtctgtgtgtgcacatgtacatgtacctatacgatgaaaacaacggtaatatttcagaaaactgttatacattaaaaatgaaacatcgcatttacaggggaagtttttattaagtgggtaattccccacccttggctgcacgtgggactctcccgggcagctttaaaaagtactggggtcttcctgaacaccccactttccagcctgggctgcggctcgggccctggtggttttttaattttctcgggtgattcattgtggggccaaggttgaggatgcgccatgcttactgttcagcattctgccgacccctggaggcggcgcggggacagcgctcagctggaaggaagccagcgcacctgggctgtcagtgcctttttggtcagtatcgtaactctaaagtgaaagtgttagacttttcttccaccttgcagatttaaaaaaaaaaaaaagttacggaaccctgtaaagcagagtagcaagaaattcaagcattttagattaacaggattgcatgttgattgagaaaaacttggaaacttggccattcaggcagaataagagtaatatttagtcttcctttgaaataaaacttttgacatgaaataaaacttttgacatgaaaaaggaaacaagaatctatttctctctttgagccccctttactcctttgaacaccctcctcccacaggcctgctgaccgccaccgccccctcccccggccccgccccagaataaattataaacgttttggctaaagactcctttcaactaactccgggcttactctgagattccccacgccattgttaagctacaagtgatttcacagcgaagccccacacacttctgggttccatctgcaaacttggccttttcctttttttcctactgctggaattaaaaatgaatttggagatgggcgtggtcatttgtgcctgtactcccagctatgcagcaaacgcaggcaggaggatcgcctgagtctattaaaaaaaaaaaaaaaaaaaggaatctagaagccgggtgcagtggctcacgcctgtaatcccaacactttaggaggccgaggcgggtggatcacttgaggtcaggagttcgagaatagcctggccaacatggtgaaaccccatctctactaaaaatacaaaaattatccaggcatactggcacgcacctgtaattccagctactagggaggctgaggcaggagaatcgcttgaacccaggaggcgaaggttgcagtgagccaagatcgcgccattgcactccagcctgcgcggtggagcgagactccgtctccaaaaaaaaaaaaaagaatctggaagtcagaaaacatgacatgtggatctgtataatttgaattagtaatataaggttacaaagtacgtctatatgaaaagataataggtaaagttgaggctctctgttttcttacaaagcctttcccatggtctaactgtccattattctttattgtttatctgtctcgtcagatagatgtgagctccaggaagagggtggccaaaccttaaagcaaacagcttgctagagtaagccctcagtgggggtttgttggacaaataatgtctaagtggttgacagtattatttaataatcaaaaattttactgttttgtatgaaatggttctctttaggcca

SEQ ID NO: 585171 - DNA, 4001 bp, Homo sapiens
aggctgacttgccccggacgcgtcatcagcttcccgagggtctctcctccctgccctttccccttgagccgccccgcctcattctcgggaagtttcaggaacttccaggggagttgcaagtgcaatttaagcacaattcccaaggtattcaggttttcttaccaacgcggagatagtgggattcagcaagtttaagaggaaaaaagaaaaagaaaaaaaaaaagggctggtgtgagagggatgggaaattagattgacaactttaattaaatcaaccatttgttctaccatttggcacccagcccatctctcctcctatccctcccaccccgcaccccgggttcctttgcagtgacgaactcggacctgagttcgatttgacttgtgaggatttgggggaaacgtcccaagaccgagctggttcgggcagcgaaggcgcgggaaggatcccggcagacgctaagatggcaggaggcgccccgcgcccgtccggcccacggcctccgcaaagctttcatttttatttgcttttcagcattcactggtgcaaatacttccactgcagggtcacgtcaagaatctaaactaattattttagtttgtagatttacacagaacagaaaatctttaccgggcacaaaaatgcatggctgcatttctgatgaacagaatgggtgttaccaataaaagtattttaaaaattgaacccttttaaacaacgcattagcgttatctttgccctaggagctccaactccaaagaactgccccagagttctgaattctgttacaggttcgagcagagggaaggtgcggggcggcgggtgttggcggggggagctcccaaagcgctgtttaagaaagtttttttcctgctctttctaggagctcccgttttaggagacggttttggaaaagtaccctggcatacactcttttttaaacgtctgatctctaatgctctgtaactagccaccacccattcaagagatttcatctcctaaactgccaacgtggtcgagtaaaagctgtctctcctgagggtctcaaatctttccatagcggttgctaacacaaagtaacaatttactgttgatttttaaagcataatattaatactcttgaattttatacctttttgtttaatggggaaaattctaggaaggaaccacgtggaagtcaagtaaccacgatgttttaacaaagcacttcgtcacaaaagaagttggctttgcaaagctatagaacatcaatcaagatttccatatgaaaaaagcactttattctatgaagtgtagaatactataggaagcacgctaagcaaatttgcactttgatttttccgatgtagtcagtcaaatcccccaacccaggcgcctaaccgccccccccccacccaacaaatgatagcacctagactattactgattacaaaaaaaaaacaaaataaaatgatactctaaaatgaaaaaccaaacatccagtaaactaatcctttattctaatcggaaaggtttgaaccttttcacctgttgcaatgttaatagaaacttttttaacagtcaaaatatatatttggtacaataaattttaactttaaaactatagaaacactttcaaatccatcaatccatttacagtatcataattcaaaattacatttaacacattttaaaactttagaaaagttttacttgtagaaaaagaaactaataggtaacgtgttctcattttttaaaaacttactcttttgcttaaaagtagtgaagtcacgccaagtgattgaactccttggaggatgaagtaaaatgaaaaggcaagttcaggcactcagacctgtctatttaaagtttaaaactccgctgctgtttggtactttcctcacgccttccccctaatgaaagaaaagtgctgatacctcgtaaaagcttttttgtaacttggagcacagagcttttaaaagtttcaagccactgactcaactgggaggaggggctagaagaaaggggagggcaaagggaaaggctgggaggaggtagggaggaggctggtaaatgtggaagggctggggggagaagaggcaaagagcagcagtgggatcaggataaagttgtagtttaaatttgctgatgaggaaaaataaaaaagcattagggacatgaacgcctctacttggagttgctcctcacacataagaatcattgattacactgcttgcttcaccagaagaccagggataatgggggaaaaaggtgtatatttttattacaacattgtctaaaatttttaaagtagcttacaataaataaaaatggtggggaagcatataaccagttcaagcttgtttcacattgaccaaggtgtgtgaagttagaggtaggtgtgagtgacctgtttgatgatctaattcccttcctttaaatgtaagcaaggacaattaacaaagggaatggtggagatgggagagagatttcaaaaattgacatagatgaagaaaagtccatacccaatccatctttcaaccccttgactgctttgaatttttactttctttcagtttagcaaaaggctgtgtgtgtatatacattttttacatatatagcatgttttgtttgcctatgaaatcttgatatctgacctctaccatgtctccagaaaactaagaatttatattaaggccctatttatgccaagacactaaaacccaaatctgtagtgaaatgtgaggattttaaaaatacagactatggttgcattaagtaggttcccaaactattcagccctccttaaaatcagttccccctctcaagcccactagagagttttctgcccaacgacagtaaagctgagcatatcatctttatgtgcttccctatccccttccaaatgctctccctcttcagggctctgcattagggtttataatggcctgagtcatgtggcctcaatcttagagcaggcagctcctctgagggcttcccaaatgccataacacagtgttgtggtaggacaattcctcataaacaggcttcagtgatgctcctgaggttggacaggaaatttcttggccagtattctctggagggaaagcaaactcatctggccttcctattcctaacacttttctcactcaggcaaataccagaaaaaagaaggatgccaaatatattctggtagacaccgttccctaattaaactttcactgaaatgactaatataacatcttttgaaatgttgcaggtttttttttttcttttctgagacggagtttcgctcttgttgcccaaactagagtgcagtggcgccatctctgctcaccgcaacctccgccttccggcttcaagtgattctcctgcctcagcctcctgggtggctgggattacaggcctccgcctcccaaagtgctgggatcacaggcgtgagccgccgcgctgggcccaaatgttgcaattttaaggaacaattttgcttttacttgttggctatcctatttccaagagtacatttttctttaaattaagaaaggggaaaaacaatcttctggaagtagaaattgtaacctgactttcgagtcttcaggttcagcaacctataaatgttgttttggtcttgtatttatattgttctttaaataaatctattgttttgtcttaactaaaaattatttcattggacttagaacatattcatgaaaatgatttattctttttatcgtaagaaaatacatgtcttcttttcaaaaaagtatgcttcatttaatttacataacaatttatttttgtaaaattatttatcaactacaattataaaaaacattaccatgatgctaattcagaataagttacatgaaagaaaagttgtcattgactgttttataataggatttttaaagcaaaaaaaattgtgtttatttctgttatgttttgttaggtctatagatgaatgttgatgtttaaatattcttgtaaagtattcttttctttttaatctattacctatgtg

SEQ ID NO: 585172 - DNA, 4001 bp, Homo sapiens
cacacagctcctcagacagcactgctatgtctcactcttaggctttacctgcactgctccctctaccaggacagcttctttcatgtgccccagtccttccggttttggaaaaacttgccacatctttcaagattcagctcaaggtaacttcaactatgaacttttcctgacccatccatatgatcactccctcctttgctcactcattcccactaacgtgacgccttacacttgatatatttacattttacctgcctaaattttactcctacatcctgagtcctttgatgtcagagactgtattttacccatttacatgcccagcacttataagagcgattgatataataagatttttctaagtctattttatgaattgaatttaactgaatgtatcgaatgaataattttatctctccataaataatctccccctccatctgcctctctgtcaacacaaacatacatacacaccccaggaagaaagaaaggaaaaagaaagcatccagaatggaacagctcttgtgatagttccatgatcggtagggctgcctgtcttaccattgatgttctgtgcccagtgactgaaggcagaggtgaggggctgttttcccagtgaggaaaatccaagcaggagctattccgagaaccagagcttcctgagtcactgtgcagatgtcgcttttcagacaacaatctggacagaaagctggccttgcgactgcctgggcgagatctgtctatccagaccccactctctctcatgctgccttcactgtctctgcagtgactatgaagatctgtgagaggctcacctgagggttctgggtcctgggactgctcccaggttcctactgcaaaggatggacagtttctaggagccgtagttgtacctagccaggactgagacattgtattctgcaggccaaatgaggaatggtctgattgctgtcccaggtgctgatttccagcactgccagcccagggacacgggctgtgaacatggagctgtccgctatgctgatccttctcagaccagtcctttttcccattggaagggtctacttcaagttgccttggctgtgggatttgccacatggttttagactttggcacattaactcgaatgacttgctgttgattgttagcttgaagtggagagattctttcaggcaatgaagagcaaatcatacactgctgggccacagaatatttcttcaaatggaatggagggcctgtttcatcctcaatgccctcactgctggatttcttataaagtgtcctcataatttttctgatgcctagatgaaatatttccagtatattgagtaacaaggaaatggctgcaatgctgtgcataaaaagcatgaaaattgtcttctcagtgggcctggatacaaagcaatccaccgcattggggcaaggaggttgagtgcatttgtaaagggggtgcatttgaaacccatagagaatatattggcctatcatgaatcctacttccagcacagatctggtcaagatgtgtaagacataagtacgcagcagacatcctttcagagggactttatggatcctcttctgctcctctaacctcctcagttccctatctattctttgctgctcctccaagtcaagatctggattctccatctgggctctaaggtgtgactttttcctctgcctgtctttctcaaaggccctgagcctataaagtgcatggcccatatagaccaaagaaggagaagacacaaagatgatctgtaaaacccagaacctgatcaaagagatagggaatgcatcatcataacagatattgttgcaacctggctgccgggtgttgcaggcaaatgctgactgttcatcatcccagacatcctcagcagccacacgaagtaccagcattcggaagatgaagaggatggtcagccagattttccccactatggttgagtgggagtgaacttcctctaggatgccacccaataagttccagtcccccatggttaaagactaatgtctgaaatatacagaaaacactgaggttaatagcacccatggtggtaatatatagacacaagctcaaaaatacagcaggttcttttgtatgtcagcaaaattatgaaggatcttccagccctaatatttatagcccatgcttaaaataggacatttccaaatatattaatttttgaaaaaacactaaatacccctcacaatttcagcagtttacttcttcctattctcttttactctcccccacaaagctgcctgttattctagtatacaaataggtctccatatttgtacaattcattctaattgcacaattgtattcatttttctatccacatgagatacgctacttaccatacatctgacatgatcgtaaaggagtctcaattcctcaggaagtgttccctacccatcccaagttgtagttatttttccctttcctgaatcctcacaacactattattaatattaatcacctgggactgtgcctaaatgagttttgtgatggttgtgttccccttcctggaaaggtacaccccttgcagatagagactctttctaaagcatgttggtcatcgcacacacaaggcgtcaatatataatagtcaatggaattgtcttttcactttaaaattctgttccttgaccctatcaccaaaataaccatcaataggcaaaataaagtagatcctcatgatatattatccagggctttcactgcaagacaaagtataggtaaagaaaatacaaatcagtcaaaccctcaggaactggctcatatcagggtagcagtaaagattaggcagacacagaaacaataccagcaataacacataattacatccattaagccacatctggaacatcatgttttcatggaatttttgctaacttagaagaaaagtgaatataaactgcttctctagcaagcttaggatctgggaaacaatacaggtatagctgacatgaacaggttacttggtttatcctgaaaaactaatgtttttcaaggttcaataaggttaaaatacttagtaggttaaagctttctaagatatggaagacttccagataagaaagatacagaggaaaaataggaaagtattattaagttaaaatagataatgaggctggacgtggtggctcatgcctgtaatcctagcactttgggaggctgaggtgggtggatcacctgaggtcaggaggtcgagatcagcctggccaacatggtgaaatcccgtctctactaaaaataggaaaactagccggtgtggtggcacgcgcctgtaatcccagctactcaggaggctgaggcaggagaatcacctgaacccagggggcagagattgcagtgagctgagatcacgccacttcactccagcctgggcaaaagagtgaaactctgtttcaaaaaaaaaaagataatgaaacaattctctccttccataattcattcattcagtaatatttgctaacatcttgctattggctgggcgcagtggctcatgcctgtaatcccaacactttgggaggctgaggcgggcggatgatgaggtcaggagattgaacacagcctggccaacatagtgaaaccccgtctatactaaaaataccaaaattagccaggtgtggtgctgtgcgcctataatcccagctactcaggaggctgaagcaggagaatcgcttgaacctgggaggcggaggttgcactgagccaaggtcatgccactgtactccagcctgggcaatagagcaagactctgcctcaaaaaaataaataaaataaaataaaataaatcaaaccttgctatcgcttaggcattgggctagatgccaggaattcaataacaaaatatatttggtcccagacctcacagtacttgatcactaaggactcccactaacctataaaatgaatcaatactgataatacaaaaatgaatatcaaccaaaagaaaaagagagaaaaacctggaattcttagattt

SEQ ID NO: 585173 - DNA, 4001 bp, Homo sapiens
tattgttatgtgtgaatttgatcctgtcattatgttagctcgttattttgctcgttagttgatacagtttcttcctagtctcaatggtctttacattttggcaatggatggtacaggttgttcctttccatgtttagtgcttccttcaggagctcttttagggcaggcctgctggtcacaaaatctctcagcatttgcttgtctgtaaagtattttatttctccttcacttatgaagcttagtttggctggatatgaaattctgggttgaaaattcttttctttaagaatgttgaatattggcccccactctcttctggcttgtagagtttctgccaagagatccgctgttagtctgatgggcttccctttgtgggtaacccgacctttctctctggctgcccttaacattttttccttcatttcaactttggtgaatctgacaattatgtgtcttggagttgctcttctcgaggagtatctttgtggcgttctctgtatttcctgaatctgaatgttggcctgccttgctagattggggaagttctcctggataatatcctgcagagtgttttccaacttggttccattctccccgtcactttcaggtacaccaatcagacgtagatttggtcttttcacatagtcccatatttcttggaggctttgcttgtttctttttattcttttttctctaaacttcccttctcgcttcatttcattcacttcatcttccatcactgataccctttcttccagttgatcgcatcagctcctgaggcttctgcattcttcacgtagttcttgagccttggttttcagctccatcagctcctttaagcacttctcagtattggttattctagttatacattcttctaaacttttttcaaagttttcaacttctttgcctttggtttgaatttcctcccgtagctcggaataatttgatcgtgtgaagccttctctcagctcgtcaaagtcattctccgtccaactttgttccgttgctcgtgaggaactgcgttcctttggaggaggagaggcactctgctttttagagtttccagtttttctgctctgttttttccccatctttgtggttttatctactttttgtctttgttgatggtgatgtacagatgggtttttggtgtggatgtcctttctgtttgttagttttccttctaacagacaggaccgtaagcttcaggtctgttggagtacccggccgtgtgaggtatcagtctgcccctgctggaggctgcctcccagttaggctgctcgggggtcaggggtcagggacccacttgaggaggcagtctgcctgttctcagatctccagctgcgtgctgggagaaccactgctctcttcaaagctgtcagacagggacatttaagtctgcagaggatactgctgtctttttgtttgtctgtgccctgcccccagaggtggagcctacagaggcaggcaggcctccttgagctgtggtgggctccacccagttcgagcttcccagctgctttgtttacctaagcaagcctgggcaatggcgggcgcccctcccccagcctcactgccgccttgcagtttgatctcagactgctgtgctagcaatcagccagactccgtgggcgtaggaccctccgaaccacgtgcgggatataatctcgtggtgcgccattttttaagcccgtcggaaaagcgcaggattcgggtgggagtgacccgattttccatgtgccgtctgtcacccttttctttgactaggagagggaactccctgaccccttgcacttcccgagtgaggcaatgcctcgccctgcttcggctctcacatggtgcgcgcacccacttacctgcgcccagtgtctggcactccctagtgagatgaacccggtacctcgactggaaatgcagaaatcacccatcttctgcgttgctcactctgggagctgtagaccggagctgttcctattcagccatcttggctcctcccctcttgttttgtttttagacagagtttcgctctgtcgcccaggctggagtgcagtggcacgatctcggctcactgcaaccttcacctcctgggttcaggcgattattctgcctcagcctcccgaggagctgggattacaggcccgcaccaccacacccagctaatttttgtatttttagtagagacggggtttcaccatattggctacgctagtttcaaactcctgacctcaagtgatcctgacctcaagcaatctacccgcttcggcctcccagagtgctgggattgcaggcgtgagccaccctgcccggcaggaaagatacttttttagaaagtatgttttaccttaaaaacaacatatatataatcaatttttaaaacttaagtgattataattttttttcttaaatattgtaatatacatgcaaaggccttttatcaattcaagagtaagatggggtgaggtggtgaaatattggtgggctggtaattgggagacctaggtgatcgcaccctcctggtaaggacatctccttgggtctgggtttctcagaaaggggtttagaagggggagttagactaaatggtgagtatgaaagtagctaccattcattgaacatctgcatcttttaaaatgtgtcatcttaattaatgcacacatttagtacctatctatgcaatagatagtattgctccttttataaaggtagaaactgagaatcagagttgtcacttaaagacacacagcttataagtagcaaagtgagaatctgaggttatgctatgtttcccctcaagccatgaagtcctctgattctatcccaaacttgtttaaactaatttaaattatttttaaggttttctgccccaaagttcaagttagtttcttaagtattaagataatgtggcatgtgaaactataaaaaagtgtattatactttcattaaaatattttgcccattttataattctctgtcttttaaaggaaatgctttcattattaataaggttcctgctcgttaacattttatgattctggtcattttgttttgtcttctattgaggtgcttatttctaaaatgtatgtttgaagattaagtgtttccctcaaagtaattcttatattctttatatcttagtctaatttgcatgtacaatatattaataggtagtcaagtattctggaataactccctgagcaagaattttgctaaagaagggaaaatcattcaaaaatgactagtcctgactctcggtgtaggaccatctgtacagcctctcacattgtgtgttattaatttcaggggcttactattcttacactttgagatgtaaatgactctcatggagttgggtaaacgggcagtcctttatctttgcttcttcctttttccattgcacgcttccgtcacaggaggatggacagaagaaaaaggtaaagaacattttaccagagagaaacaaatgaagcaaataccccttagtttagaccttttttacaggcacctgtgaaatgttctactctcctctatttttttttttaagaaaagataaataacagtttcttaatcatgcatggaaaagggaacaagaagtgggtgatggaaaaatgaagaagaaataagagtggggcagattgcacagccaggggtgcctgattaattattttgcaggtaggcccgcacacaaattaatcacaaaattacttagccaagagcagtgtaatgccaggttcccagcatccttgctaatctatgtgtatgtatgttttatgtcattactgttttaacacagtaaatgaggtttttaaatgcagcttaaaaataaatagatcctcaaagtgataataactagagattggtcaatatcatatgtaagtaaatgagtgacagctgcagtggaaacaaaaagtaagagaagaaggtggagaaactagtgggaagactaagaaagttctgatggaagtgtgctggacattaactggttttgtcttaggtgagtg

SEQ ID NO: 585174 - DNA, 4001 bp, Homo sapiens
gtcctccctgggcaaatcactcaacacctctatgtgcctgagtgtccttatttgtaaaatgaagatcataattatgccttcttcatagggttgttgttaggattaaattaaacaatgtacttaaaataccaagccagggcctggcacactcaatatataccagctattattatgtattccattttatgtctcccatggccaaaaattactgatctcaaaattaattactccgaatcatcaagagaaatttagatactgtggaatgtaaattaagctgcaaggacatttacttagtatattttataaagatatccctggaatcctttttatttgaaaaccccattacataaaacccctagttatctgggaaaatactttacactgagtgactcaatttacattatatgaaaaaaccaggtattaatattaagggatatacaagtgagatgggcatgacggaatttttttaccttcccccttaattttgcaatgactaacatttttcctaagccaagtaccaggtgctagtcaaaagttttagcaatgagatgtgtctgactctttgccctgaaggtaaagaacaagcagggaccagagtcatggaccacttatctaccccttttaaaggtctgcacgaagcacatattcaatcttcaaggaatttacaaatgatgtagtcaaataaataaatacaaaggtgtttacagacactgatgacttcactggaataaacagcggttactgtgcctgaatttttttttttttttttttttagacagagtctcactctgtcgcccaggctggagtgcagtggcacgatctcagctcactgcaagctccgcctcccgggttcatgccattctcctgcctcagcctcccgagtagctgggactacaggcacccgccaccacgcccagctcatttttttgtatttttagtagagacggggtttcaccgtgttaggatggtctctacctcttgacctcgtgatccgcccgccttggcctcccaaagtgctgggattacaggcgtgagccaccgcgcccgccaactgtgtctgatcttaacaaggcaaccgaaacaccacacctgagtgagttacactgattcttacccagtaaagacatgttcggtaagtgaaagcctttgtatgcaacaggtcatttctcttactgggtcattactgtaaaacgagagggtaagagaaggaatttctaagattcctttcagatccaaactctatgattctgtaatctctcctgggccccacgaagatgaggaaggcaagaagggctgttgtgacccacagcaaaggccaagcaagcaaaagtgaaattctgggcgcggttaaacttagagcgatcaaattagtttgcaggagttaagactgcagtcagggtggtaaggaaaaacgaggctgggcaggactggtacaggacaggcatctttgaacctatttctgggagttctgaaactactgttctcgtgggccttggcgactgatttgggaaagctgaccctgggttggcctggcttccagccaccgtcgcaacataaacaagccaattcaaaacagggtcgcagtctttgaaactagctgaggcaacagatcccctccacacttcgcgggccccacgatcgccccatcaaacaccattatccctcttcccatcacactcccgtccgcccgaggccggcggacctgcagcggcggcgggatggggttggatagaatgcggcccggtcccggcccagcggagctgggggagccgttcccttcggtcctgtgcccaccttggtactggggtccgcgtcggagcagcaactgagggcggcctcgtccgtgaggccgccggacgggggctgcggttctgccatggctgcgctgcagtatcacagacgacgggacccaaggaacggaggagtcacccacactacgcctcggccctgtgccgccttaactaggaatggcgcgatggcgccgcgggcgggagaccgctgacttccagccaatcgctgcgcggagagcaagttgactctctgctgattgggtcccagtgagtcagcgcctccacccacaggactatgcctcagactacaactcccaaggagccttgcgcataaaggaggcaaactcatacaaaaaaaaaaaaaaaaatgcaggctgggcagagtggtttctctgttacttaatgagctaattttgtttgtttaactaaagtttggtaaccattcatacctcagggctgcaatttggtagaaaattggaatctgatggaaactgaaaactgtaagttgttcttttaaaattgtaaggattcagaggtttctcagtttacgcagcgcagagtaattaaaacaattgttgagtcgaaaacctatgttcaagtcttggttccgctatatattagcgctagaaacttgcaataattactgaccctctctgagcttcctaacaggatttgttgagaattaaataagttttcttttcctttttcttttttcttttctttctttctttcttttttttttttttttaatttttttaacagtgtctcgctctgtcgcccaggctggagtgcagtggtgtgctctcagcttactgcagtcactgctgcctcgacttccggggctctagctgtcctctggcctcagcctcccgattagctgagactacaggctgcaaaaccaagaccagttaatttttgtatttttttgagatgggggtttcaccatgttgcccaggctggtctcaactcctgggctgaagtgaccctcccgcctcagcctcccaaagtgctgggattacaggtgtagccactgtgcccagcctaaatgagatttaagtcatggtttgcctacttaggttccaaatgtccataacttgcagtactttttacattaatatatattttgtgttcactggaaggcttagtcatcactgtgtcttcaatgattggctcataatagtagatgctcattaaatacttcctgttgttaaaagaataaatgggaatgactggtgctcacctaaccaaaatgaggttgggcagggatgtatatggcactagccacctggccaccaccaagatgtccccgtctctcatctcagcttttttctgcatcgcagcttcagtttgtcagacaccagctccataagactagaaatttggcagctgttctctcactaggagtgggagtaaactctccctctggattttatccagccagcctggattttatcaaattggaaaatccaagaaggagctgtgattggcctggcctaggacctgtgcttactcctgtgattgaagcactgcgattggcaacctggattaggaccacctgattggagtttggggaggatctgttagttccctaaaagaagagcgatgatgttcttatgagaagggaggattgccaggcaaactgaaccatggatgtccactgcaaaatgataggcaggataaggatttcagcagaaatgttgtgcatacctcatactaacttactgaggatatttcatcaaaacacagtctattagaactgcaggacttctatatggaactagaccttaaaccttttaaactcgggaattggagcaatacacaaactctccatatactgtgtgttaccactgaattattgaaaagacccccaaattgtcttcttttgcattaattttcttttttagatggagtcttcctctgtcgcccaggctggaatgcagtggtgtgatcttggctcactgcaacctccacctcctgggttcaagcgattctcctgcctgagcctcccaagtagctgggattacaggcacctgccaccatgctggctaatttttgtatttttagtagagacacggtttcaccatgttggccaggctggtctcaaactcctgacctcaggtgatccgcccacctcggcctcccaaagtgctgggattacaggcatgagccactgttcccagcccttttgcactaatctttctggtgagcttc

SEQ ID NO: 585175 - DNA, 4001 bp, Homo sapiens
aggggagtaactctaacccttttgacttcatagacagaaaacaaaatgcaaaatacactattttttagtcttataagcacgcatgatgttgtgtcataattgttgcaatctatccttaacacctcctgtgactcagatctctgtggcagctcagtttcccatgacaagagcaccccctcaaagctcccctccctgctaggacctgtcccctcctatccttctctaccaccccaatcctgttatgcccccaggatgcccagcttttgccttaggcctggggctaaggagtaaaatcggatcagaggaaagtgtgggttcaggagcctgacacttctgggaataaggcctctgggaagacagctcacagaaactttcctcttccctttgctttcttcccttcattcaaaccagacctgtaaacctggcctggaggaggatggaaccaggaagcagagcctccacccctatcccaacccagtccgtaagaggagggaacgatgggcaagaaccacatcttgggtctgcagccctggcccctgaaagatcccagccgcaccaggaaaaccaaggcctggctgggggcgctgtgaggaaggtgtcttggaagggggaggttgtctcctggggctcaggacagcagctgggctggggaacaggggcagggagaggatgcgtctggaaaataatctgggggctgaaaaatgtgctggcatcttagctgagaggtatgtctgtccacatctggggtttccgccgaggtggagtctgccctcaccaaggcaatggttctgggacaaacttcaaggttcgttcaggtccactccccacagatctcagttctttaggtctgggggtagcagtgggaggtgataggaagaacctgtttcctgacccaggacaggccacccaagtctatgtctcctctctgctcaagcaagtcccagcatctttggacagctcccctcttcaaaagcagctgaccactgtccctagcccaggatcccagggcaggaaaagcaacaagggcaagagagaggggctgcggtggtccacctgtggcctgctctctggtggcaccaaggagcccaggtgttcttgcgtgtcccagtatgccttctcttggggcctgctgtcagtgcaggatgagaatgggaggtcagcagagtgggtgagtgggggcgcctggctgcttccaggggggcactgagccttctgcctgtttgctacagaggctggtaggggacggggggtaggttccatctgggaggtcactgggaaggacaagctgccaccgcagggccccaggagccatgaatcaaaggctgtgctgggggctgatgagaaagggagaggagccgggtctccgcaccctggccctctcagctcctcccagggtcttctcagggtctttgagcaggtggattgtctggggaggcactgcgggagaggggtctgggtcagactgtggggcagagggagtccgggaggatgccgggctgtgccagggccgctgacacggtttagaaggagttgggaaagtgctggggacaaaggagaagcggagcagaagtcagcgcagggcggccgcggggcagcgggtgcccgggcagagggacccgggtggcgaggaagagggcgcctcgctggggttggggggaatcctctgtagtccaagccctcacctgggccttccagcccaggggcaccaagtctccagtccctactccccccgaggctttcggatgcccccgccagcggtctcggagtttcgttcaagtcccggggccctccaccaggacactgcgcctgcagcccgcagagccacccgcctcccccggtgtcgtcggggtccctggatctcacctgggggcgggggccggccctgcccaccatcccgagcagcagcagcgcaaggcgcagcgggccgggggcgccggccatggcggggagttcaggactgggccatcgctgccacctgcggaaccgcgtgcggagactgatcccgggctggtggcgggcggtgggggaggagccggcgaggggccgccctgcccgcgggaggggcctggcagggtcccggttcttccggccgccagagacccctgggcccgccccgccgcacccctctgccggtcccgggccaggagatagcgggcactgctctccgagcgagcgcggctgggaatcaggaagcgcaggaggcggccaccagctctgagcgccgacagtgcgcctggccggctttcagcgacaagccaggccctcctcccaccctggcaccccggacctcctcccgggtctcccagctgaggaaagctacagcaacccccgcccattcagggtccctcaaaggaaactgaggcctgaggaatggacgggacttgtccaaggtcacacggcttggcaggccactcctggaaagtatcctcagagccaggggtgactaataagaacttttttttcccaggattaccccttcccaggtcctcttctcattcccatgttctgtcctgaaggcaggcccaggatagtcaaggttgggggtggggagactgacaaatggatccacagaactctgacagtcgcaagggtctagaggttcccctctacctggaaacttcagcattgcagggcagggagggatgaggctggggtctgcctttctggaagcttccctgccacctcttgcagctccagcctcctgctcttgtaacctgtgtatgtgtgataatgtgtgtccatggttgttcctgccttctttatctctctccctgcttcgcttcttggggactctggatctttcctgtctgtttccactcccacccctaaacactgcagggccctcaggttcccttcttacacccaacaagtggaaagagaatgctaagagggcactgactgtatcttccctaatgctcttgagaagtggggatgggaaaagaggatcccccaccaaagaaccttgatgccactcttaggaaagatgagttgtggcagagcccagcctcggacctgccgtggggcatgtcgactaaagggacaggaagtttgtgaaagtagctactcctggggagagaactgaacttctcaaagtcctgaggaaggctggacctgcctgagcccagggaaggagacagccagtgggaggggcccctggcttccattcaccaggagagactctcctctccagcaagctctggttccaccacctgagactcgtttattccctcccctcccaagaggtcagtctagcagggaccttctaggtatcacttaggattaggttgttcacctgggagtgacagaaaatcccaccccaaacaacaatggcataaccaagggctctctcatgtaaagcaaggccagaggttcagcccaaggttggagtggctgctccctgatcatcagggtgcctgggtcttctagcttccaccatcctttggtccaagatttccacctcatgatccaaggtggctgctccagccacgatatccaaattccaaccagcaggaaggaggaatgggaaggagatgggtgcacctccacccataaagacacatcttgaaagtggcagccatcaattccacacctcttgctcagaacttagtcacataggcactgctagctgcaaaggagggtgggaaaagcaccctctattccaggcaaccatgggcaaggttaaatactgggcttttatactctagaagaaggcaaattttaaaaaagatactggaagtgagttttaggcactgctatatcaagtttagggtggagagaggagaaaggaagagatagagaagctattcagacagaactggggtctttatcatgaatttgtcagcctccagattacattgattcagcaagtatctatcgaaaacctaccatgtgccagacaccattctaggtcctggggatacaattggtgatgctgtccctatcttcagagagattatattctaatacaggagggaaacattaaataattattggagtcattt

SEQ ID NO: 585176 - DNA, 4001 bp, Homo sapiens
gcatcaatcagacagaaaccattcaatcattgcatttagtttccaatactcacactagagttggcgaaaattgaatttgaattggctgcagaatatcctgcattagtcaagtcatcattgctctgcaaagatacaaattcaataggtggttactactttaactgtaaagcagaaacaaaatagatgtctgtggtattctatgcattacttacagatttattactaggtccatgtagaaaatagttcaatgcttgtgggtctctagaaaagagaggaaaaaaagagataaaacaacaaacaaatatactatctatatttagaactaatttttactagagtagaaagaaaatgatttattacctgagtaaaatcctctccctattttaaaactattagtaggtttttttttttttaatcttgtttttgttttgatgttgtgccatttcctattattattcacttctgcctcctgggatttattaggaaataaatttaataaataattacttgctgagcacagtggctcatgcctgtaatcccagcactttgggaggctgaggcaggaggatcacttcagtctaggagttggagaccagcttgtacaacatggcaaaaccctgtctctacaaaaaaaaaaaaacacaaaaaattagccaggcatggtggtgtgtgactgtagtccccgctacttgggaggctgaggtgggaggatcgtgtgggcctgggaggtggaggctacagtgagctgagattgtgctgctgcactttagcctgggtgacagagtgagaccctgtctcaaaaggaaaaaaaaaaaaagaattactgaattacaacccctatgttaatcatgtctctgtttctctactaaacctatgattattatttaatttttatttaaaatacctatcaggtgttatatgctattaggttgtcttagtgttcagcaaacctcacacatttgatttacccaggttttggaataagcatcttacccaataagatcaaggagacacgagtcatcatcatcatccatgacaactataaagaaaagggagaggaaaacaggtttcagtaaagcagattaaagacagtagtatcaatgcaatacaaaagtatgccttacacttttctggataaataactgtaattcacgtgagttttcctctgcttaatattaatgtaattttaaaaattttgaggtcatttgagagataaagtattcaatttaaactttttattgaaaacaaacctttaacttataagtcaaaaaagaatctagacaaatcaaagatagttggcagcaacctccctcacatgcagattcccccaaggggctataaaccatgaacagtaacttcctcaaaatgtacaataaacaaggggagaaataatatttatgttttagaaaagatctcatagacatagaggtcttttaattttgtgactcaatgttcctaaacatggtgagcaacctacattttttgccatattctggctatctttaggaagataggaaaatggttcttcctgcatttagagagagaagagggggcaccctagccgcaggcagtctctgcaggctctggccggccggtcccacattctccttttgcagcagcaccacccctgttcaactccaaacaatctacatcctaacactagaatccttaaagtagagaatctcaaccaaaaaagttcaccctagctccaggccccgagatccctctctcccccaccagcgacagtgtcaagcttagccagtgaaatgactatgcttgggctgaaacaacaacaactgcacagattccaagagcagctctccccacagactgggaaacttacactagtgatccgacacctggcacacagcttcacacccttttgagccatgtgtggaataatttacatcacggaatgccagggccaagagttctggagcagttggaaagggcagttgtgaacggcagttggacgtaggaatgaaatcctgaaaagatgcccagaagagggacacgcccgaaggcagaagggacagtctctactaaatgtttttcctctgttaaaactgcatctcttctccagttccctcagacttcccactctaacagtcacaaggccaaactagtataaaatgtactcctgctacatggaaggtaacttgctttcctcaggaagagtctggaaggggtaagtacccccactgggatctgccagtgatcttccccttggcggctgaattcattcagatgctgaatgatctgggagattacaaaccctgtgagtagaatccagtggagaggagaaatgatggttgagaaaggaggaagaagcagtgggaaaagataccaaaaggtgactcccaaggctgaaactgacaagggcagctggctaagtgaaatctgctttttagaactcaacttggagtcactcatgggcacactcacatgactatactagtgtaacatgactgtggaggagtgaagatgggacagaaaggaaaagcaggaaaatgatcatcacgtagatacagaaaaatctgtgtgaaggtcttcccttaaatcctgacgacatttagtgagataaaattgtattaaccatggctcatcagcataccataggcttgtctctcaggcatcataatcatatggaaaaaattagccaattatgacatacattaagcctataaaggagatattacttttttaacatgaccgcttaaattgaattcccctgtatcctttgtgaattcattttttttaagtgtccgtctctggaacaaactaattaataaaaatgtaagtgaaaaatagcctataccaaagaaaaacacttccacaactctcccagcttccctccttacttgacacacttgcctagttcctctacttgatgaggtgccctaagggttaaacaagccctgaggcaggaagtcaacaccagtcactccattgaggtgttactaccactagcactttcaagcacagagaacagctgctacccctaagtttagagtgacaaactacttgagtagtgcaaacagaacacttttataatattgaatgagattaaaagccattgtgcaaccttctctaccaaacaaaacagggagtcaaacacttggcttgaaagaaggctccctgggaatatctaccccctatcagcagcatcaggaactgccagacaggccttctcctctggtcccagtaggtacaactctaggagcctttacagtcaggggcaccctgagaattctgctttttaaagggtcacactcttttctcaccttaaacagtttcaaattaaaagagatgacccttagccctgtattctctagcttcaaataatgccaaaatgtagtcataatatagcctaatccaggggttcctttcaccagatgacctatggtccatcaaagtaaatttaccagagcaaaattgtaaaattgtctatgattttaaaatgagaagataggccgggcatggtggcacatgcctgtaatcccagcactttgggaggccgaggtgggtggatcacctgaggtcaggagttcgagatcagcctggccaacacggtgaaacccgtctctactaaaaatacaaaaaattagccaggcatggtggcacttgcctgtagtcccagctactcgggaggctaaggcaggagaattgcttgaacctgggaggcagaggttgcagtgagccgagatcatgccactgcactccagcctgggtgacagagagagattctgtctcaaaaaataaaattaaaaataaaaataaaaataaataaaacgagaagataatctgaagatcagtcactaatgacctaaaagtgaagaattctgttttctctggaaagattctccatttacttctggactcctgttgaggctcttttcacattcaagtaacaaccctggaatccctagatgggtggctgaccccaggtggattttatgaggctaaggggaaatccctggatgagtgattggaaactattt

SEQ ID NO: 585177 - DNA, 4001 bp, Homo sapiens
ggatgtgcattcagggaggtttcacatcaccaagattcctatcccagaaaagcagatgttcatagctctgggaatggaatgcgacccttgtggatagcctataaatggacgaatgaggggtgcctgtccatatggataagatagggctataacacgctcatcttgccacagctcttctaggcctctttagggttaagacatatttccttctgaggatttctggtctaactagttgtctagcttcacatcctgtttctatggattgtttgtaaccagcttttgctgcaactgttactgctgattaatatcctgctaatcataggttatggaaagactgtgtttctgttttaaggctctgttagaaattactgatgcacacactatattgtaaattcttatctctgtatactgtacttctgcatacagatattatgttaaagaattacttcatccccatgtgaccatctcacctcataatcaaatgaccctaaatccctcactaacctaccgctgccctcactaaacttaataataaatgctggtatagtcagtgcattggcggcaccgcgggacctgctttcactatcttgtgtgagtctcttatttctcgacctgccaatccacctaggaacaaagagagagccccgttgcattgcgggctgctggccagctcccgcgatacacaccaccaacgcctggctagttttttttatatttttagtagagatggggggtttcaccatgttggctaggctgatctcaaactcctgacctcatgtgatccacctgccttggccccccaaagtgctgggattacaggtgtgagccaccctgcctggcctccagcttcttaatagcaaaacctctacttaattggcttcaacttacccttctagactatactcatgcaactcacaaattactcagggtgacaaactaaaatcagagacattcccccatgggttcatgcagagaggacactacaattaatctacatttgacaataccctttcagtaaacagtgattcatttcataaggatctttcattaaatagaaatttttttaatgccacaaggtagagcagaaattctcattgatgcagaaaatattttctacacatttttgtaacatgttagagagtcataatgacgattaactctgaaagctacaagagcagaatgtcatatccttaccacttgattagtactgtccataatcagtatgttctggaattggaagttaaaggttggtaactcctttaaccaaattataaccaatagactcactgtttgaaagtatttgtcaagaaaaagaattatgctcatgtaagttttagaaactgaagtttctttgggggcatttgagtgtttataagcacagagcaagcatctaaaatattttattcattaatatttatcataacaatgaaagcatgacactctcctgggagacttttaagtcttataagcaataaaacataagatctctgtttttgtaatgtaatacaatatttacaatataatggtgggcatttgttaatgaggaaatacatttttttaagcacttggaatccaatgctagtaattatttttcatatgttaggatttttgttcagagaggttgctctagttgtgcccatatcacaatgcaaacaaatttatacttggtaatacttattttcctcacatcaaaatttaagagtaaaaattttcctcatatcaaaatttaggagttaaaaaaaccccaaacaaaaacacgccaagaaacaaaacaaaatatatctttccttgaaacctaattacaatgtattcgttctgtataaggttggatttcatctcttctctatttttcccatccctttctgcaattataaactatgacttgaaatgtattatattaatgaataaatgtttacctgctgggagttcagtccagaactgagggttttcagctgtgtatcagtccagtagcccttttatataaatggtaagtttattcttcaaggctacctctctaattagcccttagtggaaacaggagggagagaaaaaaaaaaaagtgcccacacctgtagacggggaggagtttatgatggtgatcaggtgaaaatcatctcacatagagcacaggcatttccactccatctcttcctttttatcacatttagccttatggtgtaaaagccaatgaatactaatcttgatttagagataggtattttctagccataaaacctgtctattaatcagtatctcatgaaggagaataaaaagaagaggagcccaggcaaatggtagtacgataagaaagtaatataaaggtattgaccctttagttatttttttatatattctgaagaaaatgattttgctgccctaaacttccaaggctgaaagggggtaatctctacagaggatacataagtacatgagagtaatttcaagaattttaattacttcagcctattcttttaaatgaaaagtcattcagagtttactcacttctttcaaaagactgcaattttaaccaccatgtaagtatttacttggacatctcagcactcaatatctacatcttgaaataatatgcaacacaaatgtctcaacggcatatgcagagtgcttcagtttgaatgtggttagatgggaggattctgtttaccacatttaggtctcataaaatggtaaggtagggcattcttcactagaggacactgagctttgtaatacaatgggcagctagtagttgacagcaaatggagaaattgtattagatgtcaattactagatgtcaaaataagagtttttgatcttgctgtatacattgataacttcttttttaaaagatgttactgagaacaaagtatacctactcttggacctaaggagcctatataaatatagttttctaaatattaactgagtaaaatatattttttaaaagttaagctttttttttatttgcaaaacaggaactcctttagacagtaagtgcaatatcctaggggaaactttaaaaagtttggggtctggttatttataaactctgagacatgtaaaagtctccccaaatttagattacgtcttgtttccaagtgcatttaaaacagaaatttgagctctttgttctttataaaacatcagaactaattggaactaatttttgcctgaagaaaaaaataataaaaaggcaaaacattccttttcctggaaagtatggttgaaggtaattaaatttgagatatgtatatatattaggctaaggcaaacttttaactctgagattaacggaaaaaggaggaaaaaaggagattcccaatgtaagattaatttaaaggaattgtcttctgaaaacccaggtgaacaaatccgcaatacatattatcactttactcagaaaaatacatcagattgtactttgctgtaataggggttactcattagattcactagccccttctacttgtagtttatcagaaaactcctaagaaaaggttcaattattttttcacttccttgttctatcatttactatctgtgtgatctcaagttatttagcctccctgtgccgcagtttcttcacctgcaggatggagataataatgaatgttatgaggtttaattcccatagggtttccattaagattaaacattggcataaatacatgtatataggtaatggcattggactagtacctggcatgtagcaagcactcaataaatgtcagccatttttctcattgctatgactgtcttatatccctgttgtactatttgaaaacttacagtaattttaaggacaactctagggggtagaaatggggcaaaattggctaaggcacatttatttctattagtttaaaaatgtatacatatgtaacaaacctgcacgttgtgcacatgtaccctagaacttaaagtattaaaaaaaatgaacaacttaattttaaaaatgtgctctattgtagttctaatgaattcagaaaatgtccctcttttat

SEQ ID NO: 585178 - DNA, 4001 bp, Homo sapiens
ggattccaaccctcgatcccaatacattataattattgagtaaaaccatgagactgaggaccaagatatagatgaattacaggctacgaacagtaactaatcatgtgaccttgggcggtctcactcattcaataaatatgtattaagcatcttctgtgtgcaaggttctgtgcttagatgctggaggctcagagttcctgaatttcaaaaaatataatcaaatacacaatctacttcaaaaggctgaggggatggatgataaaatgcttacaaaagtactttttaaaaaggataagagaatgtttgaataccattctttcctgctaagatatcttcaggtctcgcatagaaaagtttagaactccatgcttaaattcacccatttcatcttttttaatgggtgaatttcatcttttttaaactatgcttgcagagtatctaaatcaaggataaagaccatgctaaattttttaaaactttattttttcatcttaagtattgttgagacaatcaaagaatagccacaaacaggaatagaatttaatggtgcctagttttttttgttttgttttgttttgttttgttttttaaattgagacggagtcttgctctgtcacctgggctggagtgtggtggtgcgatctcggctcactacaacctccacctcctgggttcaagtgattctcctgcctcaggatcccgagtagctaggactgcaggcacgtgccaccatgccaggctaactttttgtatttttagtagagacgggattgcaccatgttggccaggctgatctcgaactcctgacctcaagtgatctgcccatcttggcctcccaaagtgctagcattataggcatgatccaccatgcctggccgaatggtgcctagtttctaaaggctcaaccacaaatatgaaatataggaaacaggataagacatgcacctgggaaggcagaagccttcaggacttggggccaggtctacagccactgtggggcatcagggctctctaggcaggccacacagaccacaccagaggaactatctcatcatctgaaggggaaggggggtgagggtagctatttgaaacacagtgcaaagtaataattttaaagatctcttgagaagtcttatggttggatgatttggggatctatgaaataatcacatttttgcttcttgaaaaaggagatgttttatttattaatgtaagttaacttacaatatattaactcaaaaagagaacagcacatgttatgcaatataacaacagtaaattgaaaaattgaaggtggataaaaatattattaacctttaaaagtctcagcaatttaagcagtctaaagaataacaaaaatatggttcctgtcactgttgagctcaaagaggaaattcttttccaagaagacatatgccacctcggacttgaggtagaaaagttactatgtaaaaactgttaagcaaaagagacatcagacccactactctgcagatattcctgagggagttgtgtcgacagaaaaaagagagcagcattactatacctcagcttgggaagaaccaagaagcagaggttgtatcatttcactcaatgaattgcccctctccaatttaactttccagtcatgctcacactgtcattacccaagcctcacagaacagagctcctgagaaatgagcatgctttggttttaatacacgtacaaaggcagatacactgcccctctcatgttaccataaataaaatatccaataacaatttctattaacaataagagtaattattatttttatagctaacatttatatagcccttaaaacatgttgtaagcaccttatgcatgaacccacgtaagttcatgaacccacataaacagccctatcaggcttgtggcactatgattagccccattttataaggtaatactattttctcaccattttacacatgaggaaccagaggcaatggtaacgctcccaacaaactgcctgtgtacaaaactggatcacacaaaagtgcctcagagcacagatgctttactgtcaagaggctgaagacagcagatgtgactacagctaaatgcacactgacaacatgtaattctggtgtccagccccccttctacaaccagggatgactgcctccccacatcagttacttttgctgattgacaaatagtaccaaaacaggacagattctgattcactatatttattaattatatattagcaattttctaaacaaatggtttagaaaaacccatttttcttaaaaaaaatttttttttcttaatattttatctcactgtggaaagaattccaagcacttaagacaatgcagcaatggttaaaaacagactttgatgtcagaaatttggttcttcccagctgcattacttcagctaagttgtttcacatgtttgtgaagtgagcagtgtttcatgaagtcgagcaaagattaaagcatgaagttcctaacccagtgtctggtaaaccaacttaacttggaggaaattcggggttgggtgggaataaaccaggaaggaagcagagcaaagctcatagaaaccacctactggcttaacttaggcaaggtgtagagacaacctgatctgctggttggggtaggaggggagggcatgtgaagagtgcaaggaagcaagaaaggtgggaaagaatagccatatggagagatccttcatctcacactccctctcagaaactctccccagacaatcctggggagtaaagtgggaattggcccagaagtaattgcttccttccctgcagaagacacctttcagtgctagggcagtcctgcacacaggttatagtgcagggccaaggagggagaagggtcaggtaaaaggcctggcactgaggggacacctcgaaaagatgtggccatcaaggcaagcaggttaggaaagcaacctaagcaggcagcagtgacaaaggaagagagctcttttaggaaagggatggtctcagaaaatttgtaggcagatggggaagagagaaacaggaaagggcaggaaataaatggagctggatccagtaagaaaagtctttggtaccaagaacgcagttggaacgccagccttggtaagcaggaggcatgttttcctgttcagagactaagaagaaggggaccattaaaccacagagagattatgaagggatgaaggtacttcacctaagggcagacttaatctcaatgaagtgggaaaaagattttgttaaagcagatgggtctgcagtacgtataatctggagagatcaggaaagtagactgggtttggggtagtaactatgaagacaaaaacaactagacaatcagatgaataaaaacatagctggccgtcatcctgatatcaaaatttggcagaaaaacaacgaaaaaataaaacttcaggccaatatccctgataaacagacataaaatcctcaacaaaatactggcaaactgaatctagcagcacatcaaaaagtttattcaccacgatcaagtaggctttatttctgaaatgccagattggttcaacatacacaaatcaatatatatgattcaccacataaagagaattaaaaacaaaaaccacatgatcatctcaatagacacagaaaaagttttcgataaaatccaacatcctttcgtgataaaaaccctcaaaacactaggcatcaaaggaacgtgcctaaaaataataagaaccatgtatgatcagatgacagcccacatcatactcaacaggcaaaagctggaagcattccccttcagaactggaacaagacagtcccaaaagaaaataaatcatcctaccaaaaagacatgcatacttgaatattcaccgcagcattattcacaatagtaaagacatagaatcaacgcaggtgctcatcaacagtggactagataaagaaaacgtggtatctatacaccatggaatactattcagccataaaaaagaacaaaattgtgtcctttgcagcaacatg

SEQ ID NO: 585179 - DNA, 4001 bp, Homo sapiens
aaggattcaatttctcaacctcagatccttgccctcttactagttttcaaactcagatccacctcttactagttttcaaactcttgtctattatgattaccttaagcaaagcaagatgcatgaataaccagcagtaaatcaggtattcaatacttgaaattgtgtaatattctgtgactgtgcatctggccaatttcaacttctccttctttttttttttttttttttttttttttttttttgaggcaggatctcactctcttgccccaggctggagtacagtggtaccatcattgctcactgcagcagcctcagactcccggactcaagtgatcctcctgcctcagcctcctgagtagctagcactacaggtgagcaccaacatgcctgcctcattttttaaatttttttgtagagacaacgtctcaatatgttgcccaggctggtctcaaactcctggcctcacctcgagcaatccttccacctctgcacaccgaagtgctgagatttcaagtatgagccgctgcctcctgcccacttagccctttctaacactagagaactttgagagtggtttcaataccaactggacacttcccagcggtttaacctcaggcaaatcaaactcccatgcctcagtttccacatatatagagataataaaagtacctcctcaaagagtttgttatgagaactaaatgagttaatgttaggcaagcgactggaacatgatagacacaatatgtattagccattatcacctttatctcagtgttatattggccaccacccagagatacccaggagcacacacatcacattctttctacagcaatatgtgggcacgattacttcatgaccactgaatctaaaacagcacagcttggtaagacacagcggtcggatcccacctactgcaacacctctaagaggcgaccctcacaaaccagccatgcttagcctgagacattccgaagacctcctcttgattaccttactcgacgaacttattcctttgaaaatggaactagccgcacttttggaccagtgtgcctcggatacacttccaaatgtgtcaacctgaatctcagaagttggcgtgattttaaaaagttttttaagttctttttcctaaacatgtcctagtaggtgactccacagcattactttctttcatgttctcttttctatctggaaatccggtgataggggacgaaaccagcaaagcaccctttttcttgcttcccaaacgttagcaggtaagcgccccttgagccgagacacatcaagaagacctcacccgcaagttcattgatcaccggttcttttccctttccggcactaggagctgcgaagcacgacatgggcttggaggaagagacgctgcggtcacctgaggggcaggtgagagcgggcggtcctgcccgggtgtgagcgcgacatcccgcgcggcacacacgctcacagcccccagagaaagaccagaggcgctcgatgtatcccgcacaccccacacgcaacacactaactgcaccgtaccttccgtcccacctcccggcagcagaccccttccgggacgccgagagggctgttcctggagagaccgcagcccacgagtagcggcgcgtagggagagcacgcgtgcccaggctgcctcggccggcgcgcccccgcccccgcactcacctggcctgtgataccggtgatgagcgccacgttcctgggcttgcccatctcgccgtccccggagccccgggcgctggggcagcgtgccggtgcgtgtgccatgtcccgcggcgggcgtgcggtcggcggcagggcggagcgcggcagagggcaggcgcggtgccggcaggaacgcgggggtgtgcagcacgaagcgcctctccaggctgcgggcagggagggagagcgcaccgcgcgaccggccgccacagtctgacaggggcgcacgggaggccgtgcagggagggccgggggcgggccgagccggccaaggcgggcccgacgggccaagcagcggggctgcggcctgactggcgcagcgtcattcgcgtcagccggcgacgctgtagcaggccccgcccctccgccgacggccaccgcgcgggaggggcggggcctgccgccgccaccgcctcagggaagaggaaggaggccgcggcttcgcgtcccgcctctcgcctggctggccgtggggggcctggacgcagtggcctcccgaatctcccaggaccctaatatcgcccgaggatgctgggaggaacgctgagccgacctctccgttaggctgaaggtctgaattttcaaacccaggggtcacagggccggggtcatggactttgataaataattcctggaaacctgttgcagtgccctttgagaagcccggtttatggtacctgaagggcagtagcgtacaaggcccgtaaacgggggtcacagatgtgggagtgactaactaggctggctctcgctcttctggcctttcctgaggctcggaaccagtaacgaggttccaaatagctgaattcaaagttttctcttctgaggactgccagtgcacaagaaagtccctagccccacccgtatgcggcataaggaaatgttgaaaagactgcccgggtcaataaacctggacgtggcagatttcaaagaaagtaattcaaacacaggtggggtcccggcttacatctgttggatttggctgccatttggcagctgctcgttggacagggagaggagaggaggtgactcagagccgggagggcagcaggtgtgtgtgcctaagcagttggctgcaatccaggacacagacggaaacttcccggtctccgttgctctgcttctctgtccacattcctctccctaatcgataacttcagatcatcatttcaaatcacagagttactagggctgtgcccaatataacgtgcaagagtatgtatagcagacctggaaccccaaaatcagaaaagctcaggattacatttaaaacctccctctcgcgctcctcgaggtccgttaggaatatttcttagctatagatagactggtctggtttcacacctggcctctcctctgcgttctatgaggagaatggctcaacaaacatctgatggtgcctctgagtgatgaagagaccctgaagctgaggagagggaacacttccattgagaggaacatgctataagctagaaatgtctgtgaaatatacgggaatatgctaaaactatactcattttcatgtaaatacgctttaaattaatgcatgagccaattatttaacattttccttaaaaaaatcactgagcaagccgggcgcagtggctcacgcctgtaatcccagcactttgggaagctgcggcaggtggatcacctgaggtcaggagttcaagaccagcctggccaacacggtgaaaacccgtctctactaaaaatacaaaaaattagccaggcgtggtggtgggcacctgtaatcccagctactctggaggctgaggcagaagaatcgcttgaacccgggaggaggaggttgcagtgagccgagatcttgccattgcgttccagcctgggcaagaagagcaaaactccatctcaaaaaaaaaaaaaaaaaatcactgagcaaaactgatacttatgggagatatgacacatttatcctgtagttttgagacctcctatcacacaaacactggaagttgacaccagtcaatttcctgtcacaccaccaaacacctgccctagaagtgtgtgacagtagaagaaaaatggaaaaaaaatcaacattattagggcctgaaaatatttataaaatgatgggaaatggtaggtcagaggaagcttgaagaataaaggctatttctctagagaacttttctgaagacaggtggtaggtctgctacagcaacgtaccatccatagggtgacaaacgatagaaatttatttcctcacagttctggagactggaagtttaggatcaagggctgatttcttctga

SEQ ID NO: 585180 - DNA, 4001 bp, Homo sapiens
gtcaccagaaaaagcaaaataaacagatactagggtatgcccaggtccatcctaaagagcagcatcttaactttcctgattcaaagacagatttaaggtataataaactgggctctgacaataacttaacacagacttaatatctggtcaaatgagatcatgcatttacatttgtaggaaatgtttaaccagtaacatgaactgaaggactaacaagcaagaaagagggaaaaggtagaaagggatctatgtaatgcggttgactagaccactgggccaaactcagcatctgaactgctgctccactgcccactgcccactgcccactacccattggcccctgccgtgtctgcgcctgtgcctcgtcgatagatgtccctaatttttgtggccatgcctttactcagtgcagtggcttctaacattaatacattttaccttgtgtcctggcgcgtgcacacacatgtgcaaacaaaaaagcttaggaaaggccgggcgtggtggctcacatctgtaatcccagcactttgggaggtcgaggcaggcggatcacctgcatgatcaccaaagtgctggaaggtcgaggcaagcggatcacctgaggtcagaagttcgaaaccagcctggccaatatggtgaaactccatctctaccaaaaatacaaaaattagccggacgtggtggtgctcgtctgtagtcccagctactcgggaggctgaggcaggagtatcgcttgaacccgacaggtggaggtggcagtgagccgagatcctgccactgcactccagcctgggcaacagagcgagactccgtctcaaaaaaaaaaaaagcttagaaaacaaaacaatctaatttgtgcgggcatcctgctattttctactctatttcatgttaagaaaatggtgttcgggccccagtaaacagaccctacgcaatgttcttcaaactgcgggtcgcgggccgtgatctcgaaattagtgagtcatgagcaacactgcttagaaaaatgcaactgaacagaatggaattgaagagacgagaaacattgcttccatcacgtctcatttggttagatagctgtgtcctaggttgcgacgtaaaacgtaccttagtgtgaaaaaagctgaaagccacttagcattctaatccttcacaagtttcccacgcctgtcagcgaccttgcaacccttacttgttattctccagttcctttaatagctagattaaaaaccctggcacaggacagggtccatgcgaaacccgtatcaacaacgccagtatccgtttaatgggagacgcagaattcagccacctctttccatgagccaaatttgcagatccctcagatcaggaccagccacttaactgccaagaggatggatgcttcgcctcatccccacagctggcaagcccaggctgagtcccttacccgcgttgcagtccccaagcccggacccagccaacttgtcccggaggcccagcgccaggctagggggcgggcagtgtggccccgcgcgtccgagcctaccaaccgcggcgcgcgcctcgggaactgcgccagccagccaataggaagcgcggaagtgagagcgcgccaaaaccgacccagccaatggggcagtccctcgactcacctcccaaccccgccccggctcccgcgaccgttcaacaaccccttcgcccttacccaggccgcggccctgcagctgtcaaagtaggacgcggcttcagaggttggccggagggaaagcgagtcgtctagaggctgtgcgccttgcgcccctgcgtacccacttcctgccgcctcttgcccacttactgggtggagacgctcaatcctcgtagcgaacgcacgtagctatggctgcagcacctcgcaaaaggccacagctcacctacgctgatccccacggtcgctggagtgcccggcgcgctctgcagtaaagccctgctaactccgctcgcccgctccgaacaaccacgtgaccaactgacgcagacgaggggcggggcctctggatcccgcgaatcgcctcttccctcggccccgccccttcctgcgcctgcgcggtcaacggtagcgagtacttgaggaccgtgggggttttctgcgggctgggaggcctgtgccctttgaccctcccctccgaccctgctcttggaacttccttaaaatgcaaagttttagccctttacgaaagggagaaagatttgcctccattagtcgttagcaccagaagaacaaaatattgtatgtgcatatatattaatatgtagtacacgacatatatttgtgtaaagccctggctccacggactcgtagttgtattaggggcttttatattttggctttttgtgttttgactatggtgtggtgcggtaggaattgttcaggagacaaccgattatcagttaatcctgcagctattcattgagcgccttatacgtgccaattactactgttctaggcactgaaattacaactgctgttgcaatttgaaggagcagaaacaccttggtaataattacgtctagccttttccttcttttttttttttttaattgaaacggagtctcgctctgtcacccaggctggagtgcagtggcgcgatctcggctcactgcaagctccgcctcccgggttcaagcgattctcctgcctcagcctcccgagtagctgggactacagacaaagggagaccctgtctcaaaaaaaaattaattttaaaatattttaaaaataaaaagcagaaggaaggcgttatcgagtacaaataagggacatattaccaaatgcaatgtatggatctcgtctgaactaaacactgtatttaaaaaaatacccaagggaaatttgaacactgactgaatattttgggatggtaagatatgagttgtttaaggttacctgatgagcaatgggttaaaaaaagagattagttgtaatgacaatattgtgggttttattgtaatagcttctacctataaatggtaattacagatgaaattttataccatatattttatttgaaataattattgagagaagcaagggaaaaggtataaatcaagctttctcagtatgggctctattgacattttagactgggcaaattgttcgtggtgggggctgtcctgggcattgtatgctgtttagcagtatccctggcctctaccctctagctaccaggagtacatcccaattgtgaagaccaaaaatgtctgcagaccttgtcagataaccttccgcagggcaaaatcatccccagttgagaaccactggtgcgaataaaacagtattggccttgtgttgataactgctgaggctagtatggatgagtacatgaagattttttattcactccctctacttttatatctgtttgggattttcaataataatttttttttttgagacggagtcttgcactgtcaccagggctggagtgcaatggtgcaacctcggcttactgcaacctctgccccccccgggttcaagcgattctcctgcctcagcctcccaagtagctgggattacaggtgcccgccaccacacccagctaattttttgtagttttagtagagacagggtttcactatgttggccaggctggtcttgaactcctgatcgtgtgatctgcccaccttggcctcccaaagtgctgggattacaggcgtgaaccactgcacctggccaataataaaatttttaaaatattaatttaaaaaggattaaatgatgggataaggaggtagaaatactggaaaatgtttagccataaaaatttcagcaaccactaggcaccatggctcatgcctgtaatcccagcactttgggaggctgaggctggcggatcaccctgaggtcaggagttcaagaccaacctggccaacatggtgaaaccctgtctctactaaaaatacaaaaattatccaggcatggtggcatgcgtctgtaatcccagctactcaggaggcagaggcaggagaatagcttgaac

SEQ ID NO: 585181 - DNA, 4001 bp, Homo sapiens
tgactaactcaaggcttacagaaattatagccaggctaaatttggataaattatgtcaaaatacttttagccccatgctttctacaaaaaaaaattaaagttattcaatcacatacctttatattctctttgatttcttcttgtttctgcttcatactgggattcattatgtagatggtgaagcacagaagactagtaattaaaaaacaatatggtttgcacccccgaaggtggagtctaggtttaaaatacttacaatcataaaaattatactattgtacagtagaactattattttttctctcttaatccaaactcagccctgtcaatgactaaggtgactaaagttaatgactcttgatatctatattttacatatatacacacataataattatagctgaaaaaatgaaattaatgtattttaaaccaatttctaaaactggtttaaaatttctaaacatattgtcctggattaaatagtcaccagaaaaagcaaaataaacagatactagggtatgcccaggtccatcctaaagagcagcatcttaactttcctgattcaaagacagatttaaggtataataaactgggctctgacaataacttaacacagacttaatatctggtcaaatgagatcatgcatttacatttgtaggaaatgtttaaccagtaacatgaactgaaggactaacaagcaagaaagagggaaaaggtagaaagggatctatgtaatgcggttgactagaccactgggccaaactcagcatctgaactgctgctccactgcccactgcccactgcccactacccattggcccctgccgtgtctgcgcctgtgcctcgtcgatagatgtccctaatttttgtggccatgcctttactcagtgcagtggcttctaacattaatacattttaccttgtgtcctggcgcgtgcacacacatgtgcaaacaaaaaagcttaggaaaggccgggcgtggtggctcacatctgtaatcccagcactttgggaggtcgaggcaggcggatcacctgcatgatcaccaaagtgctggaaggtcgaggcaagcggatcacctgaggtcagaagttcgaaaccagcctggccaatatggtgaaactccatctctaccaaaaatacaaaaattagccggacgtggtggtgctcgtctgtagtcccagctactcgggaggctgaggcaggagtatcgcttgaacccgacaggtggaggtggcagtgagccgagatcctgccactgcactccagcctgggcaacagagcgagactccgtctcaaaaaaaaaaaaagcttagaaaacaaaacaatctaatttgtgcgggcatcctgctattttctactctatttcatgttaagaaaatggtgttcgggccccagtaaacagaccctacgcaatgttcttcaaactgcgggtcgcgggccgtgatctcgaaattagtgagtcatgagcaacactgcttagaaaaatgcaactgaacagaatggaattgaagagacgagaaacattgcttccatcacgtctcatttggttagatagctgtgtcctaggttgcgacgtaaaacgtaccttagtgtgaaaaaagctgaaagccacttagcattctaatccttcacaagtttcccacgcctgtcagcgaccttgcaacccttacttgttattctccagttcctttaatagctagattaaaaaccctggcacaggacagggtccatgcgaaacccgtatcaacaacgccagtatccgtttaatgggagacgcagaattcagccacctctttccatgagccaaatttgcagatccctcagatcaggaccagccacttaactgccaagaggatggatgcttcgcctcatccccacagctggcaagcccaggctgagtcccttacccgcgttgcagtccccaagcccggacccagccaacttgtcccggaggcccagcgccaggctagggggcgggcagtgtggccccgcgcgtccgagcctaccaaccgcggcgcgcgcctcgggaactgcgccagccagccaataggaagcgcggaagtgagagcgcgccaaaaccgacccagccaatggggcagtccctcgactcacctcccaaccccgccccggctcccgcgaccgttcaacaaccccttcgcccttacccaggccgcggccctgcagctgtcaaagtaggacgcggcttcagaggttggccggagggaaagcgagtcgtctagaggctgtgcgccttgcgcccctgcgtacccacttcctgccgcctcttgcccacttactgggtggagacgctcaatcctcgtagcgaacgcacgtagctatggctgcagcacctcgcaaaaggccacagctcacctacgctgatccccacggtcgctggagtgcccggcgcgctctgcagtaaagccctgctaactccgctcgcccgctccgaacaaccacgtgaccaactgacgcagacgaggggcggggcctctggatcccgcgaatcgcctcttccctcggccccgccccttcctgcgcctgcgcggtcaacggtagcgagtacttgaggaccgtgggggttttctgcgggctgggaggcctgtgccctttgaccctcccctccgaccctgctcttggaacttccttaaaatgcaaagttttagccctttacgaaagggagaaagatttgcctccattagtcgttagcaccagaagaacaaaatattgtatgtgcatatatattaatatgtagtacacgacatatatttgtgtaaagccctggctccacggactcgtagttgtattaggggcttttatattttggctttttgtgttttgactatggtgtggtgcggtaggaattgttcaggagacaaccgattatcagttaatcctgcagctattcattgagcgccttatacgtgccaattactactgttctaggcactgaaattacaactgctgttgcaatttgaaggagcagaaacaccttggtaataattacgtctagccttttccttcttttttttttttttaattgaaacggagtctcgctctgtcacccaggctggagtgcagtggcgcgatctcggctcactgcaagctccgcctcccgggttcaagcgattctcctgcctcagcctcccgagtagctgggactacagacaaagggagaccctgtctcaaaaaaaaattaattttaaaatattttaaaaataaaaagcagaaggaaggcgttatcgagtacaaataagggacatattaccaaatgcaatgtatggatctcgtctgaactaaacactgtatttaaaaaaatacccaagggaaatttgaacactgactgaatattttgggatggtaagatatgagttgtttaaggttacctgatgagcaatgggttaaaaaaagagattagttgtaatgacaatattgtgggttttattgtaatagcttctacctataaatggtaattacagatgaaattttataccatatattttatttgaaataattattgagagaagcaagggaaaaggtataaatcaagctttctcagtatgggctctattgacattttagactgggcaaattgttcgtggtgggggctgtcctgggcattgtatgctgtttagcagtatccctggcctctaccctctagctaccaggagtacatcccaattgtgaagaccaaaaatgtctgcagaccttgtcagataaccttccgcagggcaaaatcatccccagttgagaaccactggtgcgaataaaacagtattggccttgtgttgataactgctgaggctagtatggatgagtacatgaagattttttattcactccctctacttttatatctgtttgggattttcaataataatttttttttttgagacggagtcttgcactgtcaccagggctggagtgcaatggtgcaacctcggcttactgcaacctctgccccccccgggttcaagcgattctcctgcctcagcct

SEQ ID NO: 585182 - DNA, 4001 bp, Homo sapiens
cactgtaacctccagctcctgggctcaagccatcctcccgcctcagccttccaagtagctgggactacaggtgagcaccactgccctaattttttaaatttttgttgtaatctccagctcgtgggctcaagccatcctcccgcctcagccttccaaatagctgggactagaggtgtgcacaactgccctggctgattttttaaatttttgtagagctgaggtcttgctttgttgcctaggctggcctcgaactcctggcctcaagcaatccttccacctcaggttcctaaagtgctgggattacaggtgtgagctactgtgcctggccctattacattaatgttcaatattttaccttctcaacatgttttctggttcagaaaataggtatatctttgttttgaacatccaattttctgaaaaatgagtttctctcttctaaatacattttgaatatttaaagaatattgaggccaccaaattattagcacatccagaatccccctatttcatcttggtcttgccttaggaattggctacagctcatgcttccagaggcccaggcctgccctccaaactgtttttgttccaagagaggccccctctttagcacctgaaaggtcatgagggacaggcacagggtcacccaatctggggcgataagttttaatcattcctcccctacgtcctccagtcctgccgggctccaaaccagccaatgctgctgcttacagaaggccacttggtttagtcattggctaacgcggaggcttccccaatccaagcaagccctcggctggcagccccaggcactgcagttaggcctggcaccggagtgggcagcggacttctttgctgaggggatttatttatggtcttgtttgtggagctgagtggacggagctgtgcaggttggcccagcctcctcgtgtttactccttcagccccagccttcaaccgtgtccggtttcctcaccttcctctccagctctcagcaaagccagtcaccagcgcacaccaccccggggcactctgcctttcaggcaactagtttatccttcagggactggcctcccttcccccagcctcaggctatttccagtccggtctccacctgttccttaggatttgaggacatccaggcagaaccagggaaatgcccgaggcttccaattcgcccccacctctctcaccccaaagctttcgaaactcttctccagggctaggctgggaccgcgggctgtccagtaccgctgagtccccaagccccactgccagcaaggccgccaaactcagaaaggaaaccctgaacttgtgccctgggttctggtttttcagacgcgttcacgaagttccaccgctggacccgaagcgaaagcagcagcaattatcagcactaggagacgcagccaaaaatcaccgggatctgcagttgtttttctcgtcctctctcccctagctccagtttccttttcttgctataagcgccctcgtacccctattccttctaaaccaactggccactggatctcgctcatctgtggtcgagtttcactgtgaacttcccctaggccacccaacgggaccgacgtgtagagaatttcatgggcccccgtatcaccgcccttaaagacacctcacgtcctggcaggtgctggggcgcgggaacgggggcgcagcgccccagtctcaaacaccaaagcaggcagggtaacccggtgccacccccttccacccacttgccccgcgccacccggaaaaaaaaatcccaccccactgcgacttccgaacgtcccccacctcggctcggctcttgaggctgctccgcttaggtcggagcaggacatccttgaagtcgagcttgaggtccgcatctatgcggggcatggtgcagcggctcctggctgcggcggcggcgacggcggggcgggggcgcctgcgcggggcggcgcggggagcgccggggctgctgtgccgcggccgggagctggcgtgggccgggtgcgcacgccgcggtcttaaacacgccccgccgacccgcggtcacgcttggcccgccccgggcaccgcctccgcctcaggcaggggttgagaggcagactggttagggacagattggcggcgaagcccttcctcctcgcgccgccgcccccgtccttccccctcaggtgtacagcccgtggcagtgaccgaatggggacgggggagggaaatgcgcaccgttctgtttgtccccagggtccccgatggagaggggacttagcgtgtggctgccttatccaagggaaaagtcgctccctgagagcttttacttttttttttttttttttgagacagtctcactgtcgctcaggctggagtgagtggcgctatcgccgctcatcgcagcctcgacttcctgggctcaaacgattctcatgcctcagcctcctcgagtacaggcgcacgccgccacacccagcttattttaaaaattatttcctagaggcggggtttcaccatattgcccaagctggtctcgagcccctgacctcaagtgatccgcctgcctcggcctcccaaagtgctgggattacaggcgtgagccaccgtgcccggcggattctccttttttaaaattcaagcccggtgtgctcacccagtgttgaggagcacgtctctcacttgccaaagaaccagaaaccccagggaggttgtatagaattaaggaaaagaacgtgggcagttaactgtttagctgtactgggattgtggaggccatgattccctttggacttgttgttaagagacaaggtctcactgtgttgcccaggctggtcttgaactactgggttcaagcaatcctcccgcctcagcttcccagtgttgggactactggcgtgagccactgcgcccagcctggatttcaggatttttgtttaagaaaaacagtgaggtctgtagtcgacgcagatcctgagatttgaggagcctgagtcccctctgagggttaccagtgatgtgagttcgaggggttaccagtgatgtgagttcattgattcacttattgaccttaccgaccttttattatacatttgaaatgtgctgccgggcttcatgcatcatctcattcactctcagaacaacccaatgaagaaagagccatttcacagataaggaaaaacgaggcttctataaatgaaataacttgcctaaggccgcagaaaaattcaatataaatttctcagtccttaaaacttgctacaactattcactgaagctgcttttgtcctggaacatctctgcctgagtttgaaacctggttccaccactgtctagctaggtgaccttaggggagtcaatttctctaagtctcagttttctcataaaaggggtgggggcaggagggggggttaaccctatctcctccctggtttttgtgagaattaaagtgtgtgtgtttatgtaagcacaatgtctgtcccatagtagttgctcaatgcatggtagttacagatttgtagtcacatgttacattatgtgcattgtgtttgtattttcaaactagaatgctaactgcacaaaggcaagaatcatctttcattctcttccatttttctgcagcctcgaactgagctagcaactgttctccttgagctagcatgtgataaggctgaccataaaagatacatcacaatattcaatttaacacaaatgtctgaagatgataaaggtctcagcccatcccacatggtttcattagctataccccaaaggaagttcatgaagtttcagggaaggaaatgaaacttatcagagagaatgaaagtagccacaattagtccagcccatgcaatgtttataacccttgacgaattcttgggagctggccagatgtgctgcttatttgtgaagtacggaaaggaaacctaattctgatcttttaaagattaaatagaggtaaaatataattactagatggtatgattatttttaaattattatccttaaagggaagagaa

SEQ ID NO: 585183 - DNA, 4001 bp, Homo sapiens
gctgctggttaagcctgcggatatgatgggtcacagactccccgtccgaggtgtcggtctgttcctctcgccgctcccggctcccgctgcggctgttggaactggagcgcagcccatcttgaagccctgcggggaggggccggtgacgccagtgctggccagctctcaggggccataagaccctctcccccatcggcctgactccctttcatcccactcaacttcttccgatgttcagtcctcccagacaccctatttgggaccctcccggatgtgcgtggggggagtcactccttcagggagcagtggggacggcgccccgtgctagctggagggattcccctcccccaactctccatccttccccaccccttccagatgtagggggggtgggggatcccctccgcgataggccgcgagggttgacgcggtcccacgaccccctcccacgatccccagaggtgcagcgggcacacccctccttccagatgtgcggaagcccgagccccgccccctcctcccgctcccgcactgacctctcttccgctcccgtttgtcctgcaactgcttcttcttctgcttcacgctgaatggcttcttcctcggcatggcccggaccagtcacctggcccgccctccgccgagctcccgccgcctcaactgactgccccccggggcagcccccgccgcaggggcccgggaccctagaggaggcggggctagcaggtgacgtcagcgggcgggcccgacagaattaccgccgcggcggcgatggaaggcggacgggggagatatagtcacttccctccaggagcgaggcgagaggatgatgcggggtgggctactggcacgtgagagccagtggcaccgagagggcgccccggcggcgaggaaggaggcgcgcgtgggaggaccaggctaactccgtcacggacgctaccaactcgcgttcggaggagggggggcgcgtgtcatcactaccttgcgctcccgggagaacctaccactcacctggagggggcggcggagcggagggcggggcctactacctaggggagagggggcgtggacacgctgaggctatactacaaagccccgggcttgaccttagtggaaagccgagactgcgtccaggttgctggactacaccgggggcacggtcagaggtctttaggggagggcggcggtctgagagtcctgggtgccgacctgttgggacccaaattccttgtgggaacgatgataaggagcaggtttacagatcataagtgcaaaagcgggcgagaagggaaacccaagcgggacaaggacttttggggggaggtcaaagggcacgaagttgtgcctgcagctgttaccatagtaaccgaggaccggatgtggcgatcttacggtgcgacagtcctcttctcaggccctctggcccgagagcctgttgactctgtgacacactctgaggagctggttgtggtgttttccagcgagggaagaaaagagtaattttttcaaagcatttatagaaacgcagcaaagggaaggtgtgaggttgccgccatgcctggcagagacggagggaggcagttggctccggaatgcggccgccgcagatgttctccgcaaccttccggaagtggaatggcgggagcctcagcattgctgcccaccgaccccccggaagcggaaacagaatccccgcgtgccccttcctcactaccctccaaatcccgctgcagccattgccgcagacacgatgccgaaacgaaagaagcagaatcatcaccagccaccgacacagcagcagcccccgctgcccgagcgggaagagactggagatgaggaggatgggagtcccatcggtgaggggtctgggagggatgtgcacatgcctgtcaagcccgtccgggcaaggggctaggggctaataaggtgcgaaggagggggctgtaacggaaggaggaagggcgcacgcgctggggagggatggaagtggggctctcccaaatggagccttgaaccaggagttctcttactggaaccatcaacctcaatacggccccagacctttctggagaaggcgggggtggagagaataaagagctcttttgcgcagccgcagaacagtaggggaaaggggtagtagagatgttgcagattgcgatgactgggatgacagtttgtatccagactttgactgaaaaggtacaggtgcagctttctctaaactagtcctctggccagcagttaaggtgagggattggttcatgtctggagacacttaggttgttttggatagcgacggtacggtgaagaaaaaaagttgtcagtatcttttcctgcattatcccctttgattgaatatctactttttgcaaaccctgaaacagctttgcagaaaaaagggcagatagatggggtgagaactcccaagactgctgaaaatatacctgactttactggttgaattaagaaataagtaatacaagaaaaacacctaagaacagaatcatcagtcctttaatccattctgatgaccatattttcatgtctgctcttaggaccacccagccttctgggccctccccccatggccaatggaaaacctggcgaccctaagtcaggtgaggaggaaggggccctgatccttgtattaggtcgtagagaagacagcaagggaggggataaaacccaggaaggacttaaaaataaaagatcagggattccatccctaaatgaatggagagaagttgtatatttgctgatttaaaaactcaatgttgtaaaaatgtcacttcttcccaaattgataaacagatttcatgcattccaagtcagaacacccataatgtttttgtggaaatacacattattatagggaaatgcaaaatatcaaggcgactatcaagacaatcttgaagtgggagggcttactatgaatatcaagatttgtaagctgggcatggtggcacacgcctgtagtcccagttactcaggaggctgaggtgcgaggatcctttgagcccaggagtttttgaggccactctgggcaacatagtgagatcctgtctctaaatacaagaagaaaaaaagacttactataaagctacaatagttacaacgatgcagtttggaaacaatgatagacataagtcaataggacttatgtcccgaagagtccaataacaggcccatacatgtgtggacacttcatttatgatgaagatggaactgaaaagttggtcttttcaataaatgatattggatcaattggatattcatgtgaaaaaaatggaatttcaccttgcactcataatcatatacaaagatctatttcaaatggactgtagatctaagtataaaaggtaagagaataattattctagaaagtaaatgtattttctaagagtagctaagagttcttaaacagacaagaaatgcacgtatacacactaaccataaaggaaagattgataaattgaactccgttagaaaatataaatttgcggctgggtacagtggctcacgcctgtaatcccagcactttgggaggccgaggcgggcgaatcacgaggtcagcagttcaagaccagcctgaccaacatggtgaaacccctgtctctactaaaaatacaaaaattagccgggcatggtggtgtgtgcctgtaatcccagctactgaggaggctgagacaggagaatcgcttgaacctggaaggcggaggttgcagtgagctgagattgcaccactgcactccagcctgggggacagagtgagactgtctcaaaaaaaagaaaaaacaaaatacaaacttgccaaataataccattaagaaattaacaggaagccatacaatagaagatatttgcaataaatataacaaataaagatcctgtatctataatatataaagaactcttccagacaagccatttgaaaaattgacaaaaacacaggacaccttattaaaatggagatctaaatgaactaaaggtctaaatgaaca

SEQ ID NO: 585184 - DNA, 4001 bp, Homo sapiens
actaggggtcaggaagagaaagaggaatcagggaggcacgatggtaccagtagcagccacctccaccaagtgcagtcctgcctgggtttcttcttaagacacacaagctccccgttcagttagggggaggagaaaagagggatcaagggagaaggaaccctggttgggaaggagggctctgtgcttatgggtttttctttgaggggagggacaagatgccacaaacacagttaaaaccagctcttcacacccggtgtctcattctggagcttaagacttgcttttcagagaaatgacagtaatttttctgtctccccgaggaaaacacaacactccacccccgcccccacttaaaggagccccaggcagaatgaacagtgttcctggtgactgggctgggggagcctggctagacctgcataccccacttgtcgaaggcgggctcgtgccgccggttccagcgctccttaagtgcatacttcagcatcttgtcactggcatccacactcgtcacactgaagccctcttccaccagcataatggagtccaccctgagtacggccagcgaggagaggcagagagaggcagttaggggagcctgggagggccaggaggagaccctgcactggacacttttgtctctacttctcagagtccgttcctctgcctcctctccccaggccctctccactgacctcacaaatctgtttcctgtcaccacaaggcaacttttttttaaaagcacctcttcagagccaggcactctacaaatatgcattaattctcatggcaatcctgagaggtaaatagtgtcattcccatttgagagacagacaagctgaggctccttgaagttaaaatacgtgtgcacaaaaggcagtagaacatggtggtttagagcacaggacaaagccgggcgcggtggctcatgcctgtaatcccagcactttgggaggccgaggtgggcagatcacaaggtcaggagatcgagaccatcctggctaacacggcgaaaccccgtctctactaaaaatacaaaatattagctgggcgtggtggcaggcgcctgtagtcccagctactcgggaggctgaggcaggagaatggcatgaactcaggaggcggagcttgcagtgagccgagatggagccactgcactccagcctgggcgacagagcacgacttcatctcaaaaaaaaaaaaaaaaaaaaagagaaaaatagagcacaggacagatcttaaccaacccgggcctgttagctccttttcactggatgatgtatgagggaattttactttgctgaggccttacttccccagtagtaaatgagagaatatcactgcttaacttcatggggctttgtgagggtttgaaaaagtgatgtatcaaaagctcctggcactgggcttggcaggtgcaaatgttgagcaatgttaactgttaacactgcccaaggccatcacaggaggaatatttgcaatctgtccgtggctctggctccaaagcctcagggacgctcactttttctgcccacaccctcactcacactcagtctcccttctccggggcctctccctgcgaaccgctacctggacccctagcctcacggggcactcgcagtgcctgttctgccgggcaggtacctgctcctggccctggtgtcccacccgttccaggattggcaaaggccgccctgacgtgcccggccctgtggttctgcggccgcgcagtacaggctgagacagaccccgatctcatgcaacgcccccggccccggcctgggctcacccagtgccacaggctacgtcgagcacccgctggcagccgtgctggcgcagcagcccaagcagccatgccttgtactcggcggtgcggctgcgggtgtctccgatatacagctgccacacgcgcgccgcctccccgtccgcgtactggtccgggagcccttcggccgccacccccagggagcgggtccggtacacgctgtccaccatcctgcgccgcgcctggctccgcagccacccgctccgcacttaaagcataagcactgctggcagccgacagccccacctggccaatagcaggtgagcgcgcggacacgcccctgccgggctttgggccgggcgcccgagtctgtccagctgcagggagggcgctgcctcgcaatcctgggctaggtccttttagccagcctgcggacccagccctctgtgcaatcccacggcgggagaggaccctcggagccctctgcccacttaacccgggtctcgaggagaaggcgagaggggtcaggagaggcgggagcaatgagattgccactccatcccctgagatccgcagagctgagcgccaggcgggcaggactggaccgttcccagcgaaggaaggcatcagcatatctaaacaaagattgtgccaccgaagtgtgtaggtatagtcagccggtgcagggaagacagggggagtctctggaggtaaagctggtctgtccaccgaatccaggggcggagcccggctggaatacggtaacacggtaacacggtgaaacctggctaacacgtctctactaaaaataaagaaagattagctgggacatggtgacacgcgcctgtagtcctagctactccggaggctgagccaggagaatcgcttgaacccgggaaggcggaagttgcagtgagccgagtgcaccactgcactccagcctgggcaacagagcaagactccgtctcaaaaaacaaaaagcaaaaaacaaacaaaaccctctgctttcacaggaagcaggagaatagggtctagagacagggaacataaggccaattcacacttcagttataacgggaaatatcctctccatagggcgtatgcccgccattaataactttgtaactgtaactttacttcatcctcttcatttacatagggtgtaccccaagtagagggtatttaaactcacaaaatgtaacagggcctttgagcccctatgctcatgctcgctcccacactgtggagtgtactttcattttcaataaaatccttcattcctttcttgctttgtttgtgcattttgtccaattgtttgttcaagatgccaagaacctggacatcctctaccgttaacatattttggcgagccagccagcagaaagaggtaagcccaaagtttgggattcatttttctccctttcctttctgctcaattacagggccgctctcgcgcttctctctctctctctctctctctctctctctctgcctctctcctccttcctttccaacttgggacccttggtgggcagcgcctaaacatggaagcaactgcagggtttttttttgtttttgtttttgttttgagacacagtctcgctctgtcgccaggctggagtgccgtggtgcaatctcagctcactgcaatctccgcctcccagattcaagcaattctcctgcctcagcctcctgagtagctggtattacaggcgctcaccaccacgcccggctaatttttgtatttttagaagaggcagggtttcaccatgttggtcaggctggtctcaaactcctgacctcgtgatccactggcgtcggcctcccaaagtgctgggattataggtgtgagccacagcgcccggtctgtgctactcttctaagcagggggcctggttaacgggtgatgctctcctttggtactgtttggccccagtgctccttggagcctggggaggtttagcctttaaaaatcaaactgtccagcactttaggaagccaagacaggtggatcacgtggtcaggagttcaagatcagcctggccaagatgctaaaaccctgtctctactaaaaatacaaaaattagccaggcatggtggcacgtgcctgtaatcccagctacttgggaggctaagccaggagaatcgcttgaacccgggtggcagaggttgcagtgagccaagattgcgccactgcactccagcctgggcgacagagcaagactccgtctcaaaa

SEQ ID NO: 585185 - DNA, 4001 bp, Homo sapiens
tctgtaatcaaagcactttgggaggccaaggcaggaggatcacctgaggccaggaattcaagaccaaactgggcaacaaagcactccatctcttttttgaaaaaaatataataagataaaataagatgaaataaagttaaagtactatttctagaaaacattaaatgcaatttcactatctgagaaaaatagctttcttgtggaaattactaccaataaagaaatcaagagatgttttcatttacctacagtaagaagtgattaccttcatattagcactttctaatcttttcaaaaaggatagaagaaattaacagttctcgcagtggagaagagccacaattcttggatatgtaaatctatgttaatcaaagattaattatgccacatatttcatggctaataggagagaaagaatgctgaccactaggcaaggagaggatgtttaactgacattcatattgatatagatataatgggcactgtcaatgacaacgagtaatgatgatttcttaggaaagcatgttcagagttttgcacatcactgattatcccatttttatctattacactttttgaaaagaaagacccattctcttaaattgcctagttagaaagtactctttatgcaataatgttaatctatcttgatttctaaatattttaataatgtcctttttaaattttctgcacaatatgatatttttgtttttttgaaccacagccactccaccctcacccacacccaggatcagagattaaagcaaatgattctttacactctctcaaaaataaatccagactttggaaaattacacagtaatgtacaagcatataaaaactcaaggtcagaagtaatttcaataattgcagggagctctctggaggtatctgcctgtaatttaacaaccaactatggatgtaaaccgagacagtgatactatcgttatgcaccacgaaattttcctaagagctttgatcagattcccctaaatagtttatgcatgtctctgtatgcaatcataggcgctgacctggaataattaaaatgaaaataatcagtgctgtatctgtcttaacatatacaaattcggtttatcaatgtgaaagcagatctgcaaaactcagttgtcaaaaggtggcctacggtattttcatgacagagaatctttgttaggtttgttaatgtaacatgtgcaatggaggctggtgtatgtaattagtttcctcctcagagagatactaggaaggtggacgacagtaccccgggaactcacacgtcggtctagggccctttttgtcccccaccctcacctcactcctcagacatgcactctcccatcacatttgaagccccggtgggcagttttctagggtcgtttcactggagcgttaaatggcatctgacgccaccgggcagcctggggttggatgccatagccgccagcacccacggctcacctccagcttgtggttgatttgagacacagactgggctttgtggcaaagctgtgcaaagcaggagctcaggctggtcatcttctgtcgcccctcataagtgatgtccgcttggtctggatcgatctctcccaggagcagatccacatccacaaaagctttgtcgaactccttctccagcacctccagccaccggaacatggataccccgccaggggcccccacggagcaggaggcgccccctgggccccctccggctgctgctgggcatggaccgcccgccgacatggcgccgtcaagggcctctcccgactgctgaagaccctcgccgccccccgcgcacgaagggaactgctgggactgaggggacccccgcgcgcgcgggcacactccgtcacctcccttcacctcgcgccgttaacgccagcagcacagtcacagaaccgcaggagtaacgaggctgaagctgaggcggcaacggcggcgacacacggaagactcagtcagtcccacctcccagcctgcccccgctgcgcatgcgtagcgaagagctgggcggacgcagccacgagggacaaaataggcggggacaggatgcgatcttggcctatgaaaggcctcagcttgggagcggcctgtcagcggccatattaacaactggcaaactacggcttgaatccctgagaaacggaggcgcgtggtttctgcaccctggttggaaaggcccgaggatgagaaaggtgtccacgtcgcagaaaggaaggatttccgccggtttgacttaacagttggcgggagccgttccaaaatcctcccagaaagttgctgcggtggcatctagggtcagggaggggagagcaaggaagggcggtgtgagcatgcgcaatagccacgtttttaccttctcgattccagttcctggataggatggagtgggtgtacacactggctgttcttggtaaaccagaccccaaattccaggtgtggactgcctaaagctgcgcattgaagcggctgaccagattttgcggaattaatagaagactttttgtcttgtgattaagagtcaggtagacctggattcaattcttaccctctgtcacatactacctgtgtcgcctttcatgtattaacctcgaaaccaagtttccaaattttacttaactcagttgtaaggtaaaacgcttagcgtcacttcttggcacacggtattcctcttaatacaccataggtcacacatttcaaaagcaactacagtagtgcttcacttaagatggggatatgttcttaggaatgtgtccttaggttaatcatcccttagggaacatcctagagtgtatttaaacacaaacctagatagtatagcctactacacacccaggctatatgatgtagcctattgctcttaggctgtaaacctgtacagcatgttgccattctggatacggtaggcgattataacacagtggtaactatttgtgtacttaaacatatctaaacatagaaaaggtacagtcatatactcttataggatcaccatagtttatgcgatccattcattgctgaagccttgttatttggcacataactgtactttaaaaggtgtatttatttgaaaactggtagtgtcctcacacgtgacatttcagaaaatcaaaattgtgaattcatatatttacaaatatattgaatgcagagctctgttgcgacattgaagacacaaaaatgaatgagacatgacccttactcaagataggctagtgaggctactacccctcaactataactttaacttgaatttttcagtgcctttaaaagtatccagcaactcctctctttacattctgcctacttccagttcaagggtagacagtcctagaaagggaaagagaaacctgtgtgattagagtaggctggtggaaactcctgcattacctagaagcatatttagctgagtgcagtctgctgttatctgttcttggggcagacccttacggttaatcacaacccaaagcctgcattgtgtgcccttcgctgatgcaaggcaactgaggagcaagaaatcacaattttattattgcagtctttgtactgcatggcagactggttagcatgaagcaataaagtcctttggcttgagcaaacttagctaatcaaaatggatcatgagatcctgaccttagacttaagtagggaccttcatacaggttttagtacacaataaataatgtaaaactaaaatttacatctttccccattcccttccaaaattagctttattttcatctacaatatttgcaaaaacattgctacagctatcaagctcccagccactttatctacacataatacagttagcaatgcattttcaggaacgcgaagtaaataatttaaaattagcagggcagggggagaatacatcgaaccacaattataatagctttcaattattgagtccttactatgtgttaggcattatgctattttctttaattctttgatccttacaaaatcctatgaggtaggtatgatcacgtctttta

SEQ ID NO: 585186 - DNA, 4001 bp, Homo sapiens
ggcaggttcagtctgagatctctgggagtcaggagcgctgctctcatccccaatcagggcctcatagaaagctcgggctgcagccccatccagggtggactctggcttctcgggctgtggctgctgctgcccatccttccagaggtcgctggggtcagtggctggggtgaaggtgatgagcaagggccgggacatggcttttgggagaactgagaaaatgataccaggcaagggaaggatgagacaagtaagccaagctcgtggtgaccctgtagcaaccacagcctcagagacctgctgggatgagaaaaagtagtcaaaaacactttcctgccactaaagtaaccccacaacttaggactctgcagggcctaagggagagagactttgcgtaaaaacatggaaccctacaataccgactttgctccttagtaaagattaataaaactccatgagactgttgtccagaggtcctgcgtccggcccccacccccatcctcaccaacaataaacaccagcctctttctgaaaccactttcccaccccgtaagacataccagtaggaaaaaaaaatcagcctggccctttaagtcttccgcgatcccatttcggagtttcctcttcccaaacaaaaatagatgggtcactccctagaagatctcggggagagtctcctatacgtgttgctgtgtagcttccgtaccgcaaaatggcgccattctaatcagaagagttgacacaatcaaatagccacacggcacgaagacgcatgcgtggcgacaacaacaacaaaaaccacaacccacattacttgagggctcgggcgtgcgcaaagctccgggttcagtttcccgcgctggaactttttcaatagtaaacgagcaaagctccgcgcgcccaggtggcgcgagcactaggatctgtcggttggggtcctacttttacataacgcccccacaatgcccttcgccttcctcaacgtggcccccgctccaagcccattttctggagccaggaatccactctgtgggttaggaaaggccctcaggaggcggagggaaacctgtggaatgccgagaagccgtgtaatgaaataacgtcacgcctgcccctcaccattactctgaccagggttcgaaggtcacacttagagcctaaggggaaatggagaagtgcaaagggacgagcagaatggctggcaccacctcaggttagcgcactgggacgttccagttctcacaccgcccaccccaccccacccaagtccctacgcacggagccaagccgcacctctcccctcatgaggcaggagcccggaggaaacagtatgcccgtcaagggtctctggcgggactgattcgcactaggggcccaacaggcaataaggacccagcggattggccgaggataggccagtcccctgggcagcagcgccgcgccgggactagaggggaacgtgaggagagctgcggaaagagatccagcctggctccctcctttccccgccctaagtcagcctcttcacccagtgagcacaaaactgtattgcccagactcccgggccccgaacgccatacctggcttccgcttccggtggcttctcgttgtgccccgcccgcaagcgccctcctccgggccttcgtgacagccaggtcgtgcgcgggtcatcctgggattggtagttcgctttctctcatttagccagtttctttctctaccggggactccgtgtcccggcatccaccgcggcacctgacccttggcgcttgcgtgttgccctcttccccaccctccctaatttccactccccccaccccacttcgcctgccgcggtcgggtccgcggcctgcgctgtagcggtcgccgccgttccctggaagtagcaacttccctaccccaccccagtcctggtccccgtccagccggtgagtctgaagtcgtcgctgctccgagtcccttgtcgctgggagcggcacatggggtctccggactttgatgtgggggcgggggaggaagcgaccaggtccggcacgaaggagggagaggtggcctgaggagcggaggggggatgtgtggattccggtgaaagggacctgacaatcgcccccaacccgtgagaaaaggaggagcccagttcttgcttgagaatgataaacttggaaacccttgggaaaggcgtgggggtcatgcagagacttgtattggtagggagcctgagtcgaggtccctgccggagttgacacagaggagagagggccctggccttcgggagctccagggatgtgggtcgggctggtgggtcaaagtatctgttggcttctttcaagtggtgggaccccaaagaatgtttaacttcaaagaaaaggggctgagatgtaaattagaggagctggagaggagtgcttcagagtttgggttgctttaagaaagggtggttccgaattctcccgtggttggagggccgaatgtgggaggagggaggataccagaggcagggaaggagaacttgagctttactgacactgttctttttctagctgacgtgaagatgagcagctcagaggaggtgtcctggatttcctggttctgtgggctccgtggcaatgaattcttctgtgaagtgagttctcttcaacctccctacttgccagcttcacatatcttcccaccagacgttccttcacatattccacttctgcactgttctcttacatgctatttgaaaacttcctatcagcaaagagtcccccctataaaccccgacgaacctgtgctaaagtggcaaaactggggcccaagtcctgagtctgccaccgtccagcaatataacgttgggctagtcaatttgtgtctttttcttttttttgagactgggtctcactctgtcaccgaggctggagggtagtggtgcgatctcggcttactgccacctctgcctcccaggttcaagcgattctcctgctccagcctcccaagtagctgggattacaagtgcctgccaccatgcctggctaatttttgtatttttagtagagacagggtttcactatgttggccaggctggtctcgaactccagacctcaggtgatctgcctgcctcggcctcccaaagtgctgggattacaggcgtgagccattgcgcccggcctgtatcttttgttactaaagtggcactgctagtacttgtctcaggtggcctttaggaaaactgaaatgctacacattgaaatgttttgttcagaaaccatgctgttcagcttccaccttccttagccagctgagaggacaaaactggttcctagagacgggatacaggagtggagtagggacaaagatcttgaaaagaatgtctaagaaaaagattgctgtatctacttatccttagaaaagaaaagccaaagcttttatgggagagagtgtaggtgaactagggagagacacaagtacttctgctgagttgggagtgagaaacaagcacaacagatgcagttgtgttgatgataaggcatcacttagagcattttgcccaggtcaaagatgaggattttgatatgggttccctcttggcttccatgtcctgacaggtggatgaagactacatccaggacaaatttaatcttactggactcaatgagcaggtccctcactatcgacaagctctagacatgatcttggacctggagcctggtgaggcaccctcagggttgttttgtgtgtgtgcgtgcactatttttctcttcaaatctctattcacttgcctgaattttgaaatttcctttggttctctgatttctttaaccccaaattcatgctttattttgatcctccacctgactcttgtctagttttgtgacgtatatcacttgttctcatgttttctaaatccgcaattcagacctattccaaaatgcgtttcctcatgggtctggtttgttgtctgtttctcctgctttgcaccttccagtctagaatttcatcttctgcattgacattgttgcagt

SEQ ID NO: 585187 - DNA, 4001 bp, Homo sapiens
ggctccttgtctctccatggctctccctgaccatgcgggctacctcagggaagccagcttcttcagcgagctgagccgcatccctgccactcagctcacagacccccacccaggcagccccacggcccaggagatagctcacagctgccccctggcccgctcgagcagcacacatcagtggggtccaccagaaggcatcccgggcgttgatattccccccagctcctcctgcctcatgcggttccagcagtctcctaagttctggcaggtccccctcctgggctgccctcagtatccggtgagtcatcttatcctcagcctcaagggatctcccttgtccatgtcttcctgatgctccttctgccactgcttctgctgctggtgccttcattattcttcttttctttctctttctttctctggcaggttcagtctgagatctctgggagtcaggagcgctgctctcatccccaatcagggcctcatagaaagctcgggctgcagccccatccagggtggactctggcttctcgggctgtggctgctgctgcccatccttccagaggtcgctggggtcagtggctggggtgaaggtgatgagcaagggccgggacatggcttttgggagaactgagaaaatgataccaggcaagggaaggatgagacaagtaagccaagctcgtggtgaccctgtagcaaccacagcctcagagacctgctgggatgagaaaaagtagtcaaaaacactttcctgccactaaagtaaccccacaacttaggactctgcagggcctaagggagagagactttgcgtaaaaacatggaaccctacaataccgactttgctccttagtaaagattaataaaactccatgagactgttgtccagaggtcctgcgtccggcccccacccccatcctcaccaacaataaacaccagcctctttctgaaaccactttcccaccccgtaagacataccagtaggaaaaaaaaatcagcctggccctttaagtcttccgcgatcccatttcggagtttcctcttcccaaacaaaaatagatgggtcactccctagaagatctcggggagagtctcctatacgtgttgctgtgtagcttccgtaccgcaaaatggcgccattctaatcagaagagttgacacaatcaaatagccacacggcacgaagacgcatgcgtggcgacaacaacaacaaaaaccacaacccacattacttgagggctcgggcgtgcgcaaagctccgggttcagtttcccgcgctggaactttttcaatagtaaacgagcaaagctccgcgcgcccaggtggcgcgagcactaggatctgtcggttggggtcctacttttacataacgcccccacaatgcccttcgccttcctcaacgtggcccccgctccaagcccattttctggagccaggaatccactctgtgggttaggaaaggccctcaggaggcggagggaaacctgtggaatgccgagaagccgtgtaatgaaataacgtcacgcctgcccctcaccattactctgaccagggttcgaaggtcacacttagagcctaaggggaaatggagaagtgcaaagggacgagcagaatggctggcaccacctcaggttagcgcactgggacgttccagttctcacaccgcccaccccaccccacccaagtccctacgcacggagccaagccgcacctctcccctcatgaggcaggagcccggaggaaacagtatgcccgtcaagggtctctggcgggactgattcgcactaggggcccaacaggcaataaggacccagcggattggccgaggataggccagtcccctgggcagcagcgccgcgccgggactagaggggaacgtgaggagagctgcggaaagagatccagcctggctccctcctttccccgccctaagtcagcctcttcacccagtgagcacaaaactgtattgcccagactcccgggccccgaacgccatacctggcttccgcttccggtggcttctcgttgtgccccgcccgcaagcgccctcctccgggccttcgtgacagccaggtcgtgcgcgggtcatcctgggattggtagttcgctttctctcatttagccagtttctttctctaccggggactccgtgtcccggcatccaccgcggcacctgacccttggcgcttgcgtgttgccctcttccccaccctccctaatttccactccccccaccccacttcgcctgccgcggtcgggtccgcggcctgcgctgtagcggtcgccgccgttccctggaagtagcaacttccctaccccaccccagtcctggtccccgtccagccggtgagtctgaagtcgtcgctgctccgagtcccttgtcgctgggagcggcacatggggtctccggactttgatgtgggggcgggggaggaagcgaccaggtccggcacgaaggagggagaggtggcctgaggagcggaggggggatgtgtggattccggtgaaagggacctgacaatcgcccccaacccgtgagaaaaggaggagcccagttcttgcttgagaatgataaacttggaaacccttgggaaaggcgtgggggtcatgcagagacttgtattggtagggagcctgagtcgaggtccctgccggagttgacacagaggagagagggccctggccttcgggagctccagggatgtgggtcgggctggtgggtcaaagtatctgttggcttctttcaagtggtgggaccccaaagaatgtttaacttcaaagaaaaggggctgagatgtaaattagaggagctggagaggagtgcttcagagtttgggttgctttaagaaagggtggttccgaattctcccgtggttggagggccgaatgtgggaggagggaggataccagaggcagggaaggagaacttgagctttactgacactgttctttttctagctgacgtgaagatgagcagctcagaggaggtgtcctggatttcctggttctgtgggctccgtggcaatgaattcttctgtgaagtgagttctcttcaacctccctacttgccagcttcacatatcttcccaccagacgttccttcacatattccacttctgcactgttctcttacatgctatttgaaaacttcctatcagcaaagagtcccccctataaaccccgacgaacctgtgctaaagtggcaaaactggggcccaagtcctgagtctgccaccgtccagcaatataacgttgggctagtcaatttgtgtctttttcttttttttgagactgggtctcactctgtcaccgaggctggagggtagtggtgcgatctcggcttactgccacctctgcctcccaggttcaagcgattctcctgctccagcctcccaagtagctgggattacaagtgcctgccaccatgcctggctaatttttgtatttttagtagagacagggtttcactatgttggccaggctggtctcgaactccagacctcaggtgatctgcctgcctcggcctcccaaagtgctgggattacaggcgtgagccattgcgcccggcctgtatcttttgttactaaagtggcactgctagtacttgtctcaggtggcctttaggaaaactgaaatgctacacattgaaatgttttgttcagaaaccatgctgttcagcttccaccttccttagccagctgagaggacaaaactggttcctagagacgggatacaggagtggagtagggacaaagatcttgaaaagaatgtctaagaaaaagattgctgtatctacttatccttagaaaagaaaagccaaagcttttatgggagagagtgtaggtgaactagggagagacacaagtacttctgctgagttgggagtgagaaacaagcacaacagatgcagttgtgttgatgataaggcatcacttagagcattttgcccaggtcaaagatgaggattttgatatgggttccctcttggcttccatgtcctg

SEQ ID NO: 585188 - DNA, 4001 bp, Homo sapiens
aaactggaacatgtagacattaggttgtttgcccaagtaagtggaatcaggctttaaatccagggagctcatgtttataaccacttgactatactaccctgtcaacctacacatgaggataaggaaagaactcttcagcactgtgctggggcgtctggtgtggtgtggctgggagaggcagaacacaatgagacatgggtctgagctaaagtttccccttaccggttttccgggctccttgtctctccatggctctccctgaccatgcgggctacctcagggaagccagcttcttcagcgagctgagccgcatccctgccactcagctcacagacccccacccaggcagccccacggcccaggagatagctcacagctgccccctggcccgctcgagcagcacacatcagtggggtccaccagaaggcatcccgggcgttgatattccccccagctcctcctgcctcatgcggttccagcagtctcctaagttctggcaggtccccctcctgggctgccctcagtatccggtgagtcatcttatcctcagcctcaagggatctcccttgtccatgtcttcctgatgctccttctgccactgcttctgctgctggtgccttcattattcttcttttctttctctttctttctctggcaggttcagtctgagatctctgggagtcaggagcgctgctctcatccccaatcagggcctcatagaaagctcgggctgcagccccatccagggtggactctggcttctcgggctgtggctgctgctgcccatccttccagaggtcgctggggtcagtggctggggtgaaggtgatgagcaagggccgggacatggcttttgggagaactgagaaaatgataccaggcaagggaaggatgagacaagtaagccaagctcgtggtgaccctgtagcaaccacagcctcagagacctgctgggatgagaaaaagtagtcaaaaacactttcctgccactaaagtaaccccacaacttaggactctgcagggcctaagggagagagactttgcgtaaaaacatggaaccctacaataccgactttgctccttagtaaagattaataaaactccatgagactgttgtccagaggtcctgcgtccggcccccacccccatcctcaccaacaataaacaccagcctctttctgaaaccactttcccaccccgtaagacataccagtaggaaaaaaaaatcagcctggccctttaagtcttccgcgatcccatttcggagtttcctcttcccaaacaaaaatagatgggtcactccctagaagatctcggggagagtctcctatacgtgttgctgtgtagcttccgtaccgcaaaatggcgccattctaatcagaagagttgacacaatcaaatagccacacggcacgaagacgcatgcgtggcgacaacaacaacaaaaaccacaacccacattacttgagggctcgggcgtgcgcaaagctccgggttcagtttcccgcgctggaactttttcaatagtaaacgagcaaagctccgcgcgcccaggtggcgcgagcactaggatctgtcggttggggtcctacttttacataacgcccccacaatgcccttcgccttcctcaacgtggcccccgctccaagcccattttctggagccaggaatccactctgtgggttaggaaaggccctcaggaggcggagggaaacctgtggaatgccgagaagccgtgtaatgaaataacgtcacgcctgcccctcaccattactctgaccagggttcgaaggtcacacttagagcctaaggggaaatggagaagtgcaaagggacgagcagaatggctggcaccacctcaggttagcgcactgggacgttccagttctcacaccgcccaccccaccccacccaagtccctacgcacggagccaagccgcacctctcccctcatgaggcaggagcccggaggaaacagtatgcccgtcaagggtctctggcgggactgattcgcactaggggcccaacaggcaataaggacccagcggattggccgaggataggccagtcccctgggcagcagcgccgcgccgggactagaggggaacgtgaggagagctgcggaaagagatccagcctggctccctcctttccccgccctaagtcagcctcttcacccagtgagcacaaaactgtattgcccagactcccgggccccgaacgccatacctggcttccgcttccggtggcttctcgttgtgccccgcccgcaagcgccctcctccgggccttcgtgacagccaggtcgtgcgcgggtcatcctgggattggtagttcgctttctctcatttagccagtttctttctctaccggggactccgtgtcccggcatccaccgcggcacctgacccttggcgcttgcgtgttgccctcttccccaccctccctaatttccactccccccaccccacttcgcctgccgcggtcgggtccgcggcctgcgctgtagcggtcgccgccgttccctggaagtagcaacttccctaccccaccccagtcctggtccccgtccagccggtgagtctgaagtcgtcgctgctccgagtcccttgtcgctgggagcggcacatggggtctccggactttgatgtgggggcgggggaggaagcgaccaggtccggcacgaaggagggagaggtggcctgaggagcggaggggggatgtgtggattccggtgaaagggacctgacaatcgcccccaacccgtgagaaaaggaggagcccagttcttgcttgagaatgataaacttggaaacccttgggaaaggcgtgggggtcatgcagagacttgtattggtagggagcctgagtcgaggtccctgccggagttgacacagaggagagagggccctggccttcgggagctccagggatgtgggtcgggctggtgggtcaaagtatctgttggcttctttcaagtggtgggaccccaaagaatgtttaacttcaaagaaaaggggctgagatgtaaattagaggagctggagaggagtgcttcagagtttgggttgctttaagaaagggtggttccgaattctcccgtggttggagggccgaatgtgggaggagggaggataccagaggcagggaaggagaacttgagctttactgacactgttctttttctagctgacgtgaagatgagcagctcagaggaggtgtcctggatttcctggttctgtgggctccgtggcaatgaattcttctgtgaagtgagttctcttcaacctccctacttgccagcttcacatatcttcccaccagacgttccttcacatattccacttctgcactgttctcttacatgctatttgaaaacttcctatcagcaaagagtcccccctataaaccccgacgaacctgtgctaaagtggcaaaactggggcccaagtcctgagtctgccaccgtccagcaatataacgttgggctagtcaatttgtgtctttttcttttttttgagactgggtctcactctgtcaccgaggctggagggtagtggtgcgatctcggcttactgccacctctgcctcccaggttcaagcgattctcctgctccagcctcccaagtagctgggattacaagtgcctgccaccatgcctggctaatttttgtatttttagtagagacagggtttcactatgttggccaggctggtctcgaactccagacctcaggtgatctgcctgcctcggcctcccaaagtgctgggattacaggcgtgagccattgcgcccggcctgtatcttttgttactaaagtggcactgctagtacttgtctcaggtggcctttaggaaaactgaaatgctacacattgaaatgttttgttcagaaaccatgctgttcagcttccaccttccttagccagctgagaggacaaaactggttcctagagacgggatacaggagtggagtagggacaaagatcttgaaaagaat

SEQ ID NO: 585189 - DNA, 4001 bp, Homo sapiens
aacaaatttctttaaaccattgtgggatccagagcagaatagttgaaagaaaaaaatggtaaccagacctagcaaactcttgggcaaggggagggacattagtcataatgactatagctaacattcatgtattgcatactatgcggcatgcactattctagcattttacatatattaacccattgaatcctaacaacaattcttactacccccatttctaagatgagaaaactggaacatgtagacattaggttgtttgcccaagtaagtggaatcaggctttaaatccagggagctcatgtttataaccacttgactatactaccctgtcaacctacacatgaggataaggaaagaactcttcagcactgtgctggggcgtctggtgtggtgtggctgggagaggcagaacacaatgagacatgggtctgagctaaagtttccccttaccggttttccgggctccttgtctctccatggctctccctgaccatgcgggctacctcagggaagccagcttcttcagcgagctgagccgcatccctgccactcagctcacagacccccacccaggcagccccacggcccaggagatagctcacagctgccccctggcccgctcgagcagcacacatcagtggggtccaccagaaggcatcccgggcgttgatattccccccagctcctcctgcctcatgcggttccagcagtctcctaagttctggcaggtccccctcctgggctgccctcagtatccggtgagtcatcttatcctcagcctcaagggatctcccttgtccatgtcttcctgatgctccttctgccactgcttctgctgctggtgccttcattattcttcttttctttctctttctttctctggcaggttcagtctgagatctctgggagtcaggagcgctgctctcatccccaatcagggcctcatagaaagctcgggctgcagccccatccagggtggactctggcttctcgggctgtggctgctgctgcccatccttccagaggtcgctggggtcagtggctggggtgaaggtgatgagcaagggccgggacatggcttttgggagaactgagaaaatgataccaggcaagggaaggatgagacaagtaagccaagctcgtggtgaccctgtagcaaccacagcctcagagacctgctgggatgagaaaaagtagtcaaaaacactttcctgccactaaagtaaccccacaacttaggactctgcagggcctaagggagagagactttgcgtaaaaacatggaaccctacaataccgactttgctccttagtaaagattaataaaactccatgagactgttgtccagaggtcctgcgtccggcccccacccccatcctcaccaacaataaacaccagcctctttctgaaaccactttcccaccccgtaagacataccagtaggaaaaaaaaatcagcctggccctttaagtcttccgcgatcccatttcggagtttcctcttcccaaacaaaaatagatgggtcactccctagaagatctcggggagagtctcctatacgtgttgctgtgtagcttccgtaccgcaaaatggcgccattctaatcagaagagttgacacaatcaaatagccacacggcacgaagacgcatgcgtggcgacaacaacaacaaaaaccacaacccacattacttgagggctcgggcgtgcgcaaagctccgggttcagtttcccgcgctggaactttttcaatagtaaacgagcaaagctccgcgcgcccaggtggcgcgagcactaggatctgtcggttggggtcctacttttacataacgcccccacaatgcccttcgccttcctcaacgtggcccccgctccaagcccattttctggagccaggaatccactctgtgggttaggaaaggccctcaggaggcggagggaaacctgtggaatgccgagaagccgtgtaatgaaataacgtcacgcctgcccctcaccattactctgaccagggttcgaaggtcacacttagagcctaaggggaaatggagaagtgcaaagggacgagcagaatggctggcaccacctcaggttagcgcactgggacgttccagttctcacaccgcccaccccaccccacccaagtccctacgcacggagccaagccgcacctctcccctcatgaggcaggagcccggaggaaacagtatgcccgtcaagggtctctggcgggactgattcgcactaggggcccaacaggcaataaggacccagcggattggccgaggataggccagtcccctgggcagcagcgccgcgccgggactagaggggaacgtgaggagagctgcggaaagagatccagcctggctccctcctttccccgccctaagtcagcctcttcacccagtgagcacaaaactgtattgcccagactcccgggccccgaacgccatacctggcttccgcttccggtggcttctcgttgtgccccgcccgcaagcgccctcctccgggccttcgtgacagccaggtcgtgcgcgggtcatcctgggattggtagttcgctttctctcatttagccagtttctttctctaccggggactccgtgtcccggcatccaccgcggcacctgacccttggcgcttgcgtgttgccctcttccccaccctccctaatttccactccccccaccccacttcgcctgccgcggtcgggtccgcggcctgcgctgtagcggtcgccgccgttccctggaagtagcaacttccctaccccaccccagtcctggtccccgtccagccggtgagtctgaagtcgtcgctgctccgagtcccttgtcgctgggagcggcacatggggtctccggactttgatgtgggggcgggggaggaagcgaccaggtccggcacgaaggagggagaggtggcctgaggagcggaggggggatgtgtggattccggtgaaagggacctgacaatcgcccccaacccgtgagaaaaggaggagcccagttcttgcttgagaatgataaacttggaaacccttgggaaaggcgtgggggtcatgcagagacttgtattggtagggagcctgagtcgaggtccctgccggagttgacacagaggagagagggccctggccttcgggagctccagggatgtgggtcgggctggtgggtcaaagtatctgttggcttctttcaagtggtgggaccccaaagaatgtttaacttcaaagaaaaggggctgagatgtaaattagaggagctggagaggagtgcttcagagtttgggttgctttaagaaagggtggttccgaattctcccgtggttggagggccgaatgtgggaggagggaggataccagaggcagggaaggagaacttgagctttactgacactgttctttttctagctgacgtgaagatgagcagctcagaggaggtgtcctggatttcctggttctgtgggctccgtggcaatgaattcttctgtgaagtgagttctcttcaacctccctacttgccagcttcacatatcttcccaccagacgttccttcacatattccacttctgcactgttctcttacatgctatttgaaaacttcctatcagcaaagagtcccccctataaaccccgacgaacctgtgctaaagtggcaaaactggggcccaagtcctgagtctgccaccgtccagcaatataacgttgggctagtcaatttgtgtctttttcttttttttgagactgggtctcactctgtcaccgaggctggagggtagtggtgcgatctcggcttactgccacctctgcctcccaggttcaagcgattctcctgctccagcctcccaagtagctgggattacaagtgcctgccaccatgcctggctaatttttgtatttttagtagagacagggtttcactatgttggccaggctggtctcgaactccagacctcaggtgatctgcctgcctcggcctcccaaagtgctggga

SEQ ID NO: 585190 - DNA, 4001 bp, Homo sapiens
acatagaactgcaagacactttagaattctttaagaagttcaaccccctcattttatagaattgagaggtaggtaaaaagtgaattgctcagaatcacacatctactttactggatggctggaactagaacctaagtctgatcctcttttccattgtttcctgactcccttctagcagtacatttttaatggaaagaacgccggaccagctgtcaggacatgtaattctaggccaggccactgaaaacttagctgtaaaactgtctagtatcagtttcttcatctgtaaaagaagagaactggactcggtgacttctagtgtcctttcagatagtcaaattctgtgataacaggttcttgcccatcgtagctcagtatatatgtctattttgcactgataaattttcattttttgcctataatcttattattctttgaaacttctggaggtggtacaactataaaattctgttataatttttatctaaattaaagaaaactcaggccaggcgcgatggctcacgcctgtaatcccagcactttgggaggccgaggcaggcggatcgcaaggtcaggagatcgagatcatcctggctaacatggtgaaaccccatctctactaaaaaaaaatacaaaaaaattagccaggcgtggtggcgggcacctgtagtcccagctactcgggaggttgaggcaggagaatggtgtgaacccaggaggcggagcttgcagtgagccgagattgcgccactgcactccagcatggcggacagagcgagactccgtctcaaaaaaaaaaaaaagaaaactcagaacatcaggtatatctgaaattaatctgaaaattgctgtagaatgttatcacagctaattctattacaaattgactcacgttttccatgcgttaaaacatgttacaaatacacttcatacaagaaccaaatccttttgctaagaaagatcttaagtgttctcagcccatatgcaaaaaacatggtagctatgtggggggggcggatgtgttaattagcttgattgtgctaatcatttcacaaggcatacatatatcaacacatcatgttgtatatcttaaatttatacaatttttgtcaattatacatcaataaagctagaaaaataaaaattttaaataactctttgtggtgccatctccctatatccaggatgactctgcccttgcccctaaggtcggtggcactggcttgctgtacccttctgctctccaactcctgccatcttcctggcaccgtgcatgtggataactaaactcccttactttcttgaccttcctgaagccaagcacttttacagcaatttgactcagggacccactcccatggccacatatggctctttacatatacttggaaatgcctgtccttggacatgtaaaaacaacaaaagtacatttctcactcctgccatattccacccatcttgttcctctcccattctgtcagttctgctgccacgttgcaacctctcgttcactgagcctctcactatttccccacccagagaaacacacaggggtcccatgaccaatggggcatcagctctctttcttatttgccccttaactgaagtcatgctgccaatccctatccctggatgactgcaatcaccggcttctcctccctgctgtcaggccactcagctcagtgcccaggggaaactgtatcaatccacgagcgggattttcagtctcttccttaatgtctttgacagatgtattgtcctctcaacaacataacaagacaccagtacttacctatttctacgtgtgttgaaaggccacacggtgaacctctatggcagagagaacccaacatgatcagcaggccaggccacaacctgaaagcagacatgatctcattgcccaccggcttctctggtgacgtgggaatgctcagagctgcagcagcactgggactccaaaatccaggtgcagacccaccgcttctctctaagcaggtcactgaccgaggaaaccaagcctcatttcaaaataatatcgttttccaatgaagtcaactgtccaactactgtttagcttcaccagaacagcaaacaaactctgtgctcctggggggtggggttgggaggataaactgaaatctgaaaagccttaggccagaagcactgcatcttctgaccgaggttttttctggatttcattttaacatgaaatttgtgtagagatgcaagcaaagttgtctccagatattttttgctttctataaaaaggctcacctgtgcagatagtcaacatattagaccacctcaccttacaagggtggatctctcatgcatcctttctacacatttatcaggctgtcctgcttcctccgcctcccaagccacaagtgctgggaaagttttatggtaatcagctggaactggcttccttttcagtatttggcaacagatactgacacttgtatgggattacacaagagcagccactcctggtctctctacctctggctgttctaatagggcttatccagagcctgttgcaaggtcagattcctgcagctgaagcaaagatgtcaattccacttgggaggtggaaggaagggggcagatttagggccaagaaacagggtttggaaaatgttaagctcacgatatattatcaggtacccacttacacttcatccatgggaaaaattaagctcttcatgaaactgatggtaatcttaaaacacaaattatgcatattttacattaaaagcaagagatgggctcctaaaagagtgggaggaaatagtattcacttcaggtttgccaaatgaaaggatgaatagaaagtgggatgatttggctgggcgtggcggcccacacctgtaatcccagcactctgggaggctgaggctggtggatcacctgaggtcaggagtttgagaccagcgtgatcaacatagtgaagaccccgtctctactaaaaatacaaaaattagccaggtgtggtggcacgtgactgtagtcccagctactggggaggctgaggtgggaggatctcttgaacccaggaggtggagattgcggtgagccgagattgcaccactgcactctagcctgggtgacagagcaagaccctgtctcaaaaaaaaaaaaagaaaagaaaaaaagaaagtggaatgatttgacaacagttgtcgccccaacagtttcccctgtaagcttaacacagccatgtgcacagccccaaggaaagaaatcccgcagctacccccagacctgaggggcagtaggcccagctactcctgattagtccagaggccatatgcctacgtgttttgtttggctaacaggatgttttataaacttaaatcaagtttatgaactttttctaaatgagaaaattcacgtagaaatctagatttctggctctcttaaaaacaaaagaactggcatcatgaactgacgctcccatgtgacacgacaaccagctgcagccaaagagccagctgccccctgatagagcatgtcctgctcctccagtccccaccatccatgcaatgtgtgcaggtttccacaccccttctggccaccagaggcctttgagtttgcctccctgtcactctgggccttctacagactgtgcgtgagggagtcacaattattaattgggactttggatattgtctctcagaacatccaagagcagtcaatcaatggttacaggggaaaaaaatactgctagaaaagatatctaaccatatataatacaacaaacccatccaaaaagcaccaaagaaatgggttcagaacaggtgtggtggctcacgcctataatcccagcactttaggaggccaaggcgggcagatggcttgaggccaggagttcaaaaccagcctgtgcaacatggcaaaatcccgtctctaccaagaaaaaaacaaaaacaaaaattagccgggcatggtggcatgcacttatggtccaagctactcaggaggctgaggcgggaacatcg

SEQ ID NO: 585191 - DNA, 4001 bp, Homo sapiens
ctgtagtcccagctactcgggaggctgaggcaggagaatggcgtgaacccgggaggtggagcttgcagtgagccgagatcacgccactgcactccagcctgggcgacagagtgagactccgtctcaaaaaataaaataaaataaaaaaaaaaacaggcaaaatattttgaaagttacaaatataaacatttagattaggtaggttacacagcacagtttcctaagggtgtccttaagcaaaattgtgaattcagtgacacttgtcccggggatgccactcccccactttctgacttgtgcacccttgtgacgcacaccccaccactgctaatgccctcagatacccagtgccctcttgctcctgccagtttttactttacttactctcagccaaagcactaaaatcatttatttatatccaaatttgaatgaatgtgttcatttacttttttaaagagatgtttgcattcctttagttgtgtaatgaaagacattagaaggcacattgttgtgaaagtatggtgctttccttgccctcagcccagcaacagacagaccctgttattgggacactgtccctgttttttaagaaatttactctacttttggagaagaaagacatacaaggcatccaacaataattcacatcagcttggggttgtgcacaaaaggtgagtttgcaagttgagcttgtcagactccacaggcatacactcctatttccaatcttaacgcttattggcaccattttacaaatgaaataaccaggataagacaactaaataatttgctcaatgttttactacttgtcaaaggttgaataaagtattatgggaccattattagaacactgttgtcaatttgggttatggttagataatgagtggtgttttcttaatgacaacagagcataataaaaggcttgtgttaatattctaacatattaaagaatgtacttttatttattttttgttattcttgcctctgtttgtaatttccagcccatgaatgctattatcaagttgagcttaatggatctcagcatgaaaaagccaaggtcatcacttctccacacctctcccaccttgaccttctttctatatctccttcggtatttttccttcatgtagtctctggcatggtacattacataggctatcaggtttacataaatggatttttcatgaaaacaaagaaaagagaaaagaaaaattatatattttcaaggcctctactaagaaaatacagtgtgacattttatatttatttggggaagtagcaggagaaatggttagtcaattctagggttttttggagtcctgggaaggagttaaattgagaagtacttcctggatatatatggatccaggcaaagcttaaactaattcaccctaaaggaaaaataagcttaattctctcaagcataattttattttaagagattgcaagggttaacgtattatgaattagtgaaaaccatatgactgatactttaacaagtatctttggtggagccctttttattctaggcaatctacctccctggcacatcagaacaatggggttcctgtgttatcacagagggaagagtgtgctttcagtcagaaaatctggagcttgagcctcagccaatcacctcattatagttagtaagcgggttgaaatctgttgtttctgctcattgctttttcaactctgttcccttatttaaccatcttcaggaaatgatacattgaaatcagaatttttttttcaaggagagaaaaaataatctcagattaacaggtagtactggtcatcgtaatacacgttcttagtaatcaaagtacagttattgggcttacctggtgatttatctcttcacaccagaactcgagggagcccttccttcagtatacttgtggctcaatcacttcttatgctgtttggaaagaaagtatcagtatctgagccacagcagctcactggcatgaacacaggctcactgatccatcagcaattcctggcacgcattactgcctgtgcaggtagacaagcctgggacacacccccttcaagaaggaaacaaaatacttttctcctaactccccctcccgcttaaagtcactatcaggtctggtaagaggaaggagcacagagctcaagacttaatgattctcccagcagacataaatgggtgtctgaaatcacagaagggaaatgggagagaaaagctctaggggaatgtggaacacttttgccctagatcggtttactacaaaatgctactccatcaaatcttcctgtccaacctctgaacacactgggtcataccctataaagctgaaggaatgcagcccttcatgcataattccaatgaggagaggtgggtaattcctgtggggcagaaataagggtagatactgtttttccttttccaacttttttatttaagactaaagaatcaactagctactttcccagataaaacaacctcagacttctgggtggggtagtaccaaaggagctgtggcaaaagacagcaacagggtggatgctggggtgaatgcttttggtgtgttttttgtgcttagaaaacctagagtgaaacctgattaacttctttagtaaagatttgttttctttccaaggagtcatccagtttgaaaactatgaaaggtcaagattattatgtgctgtatctttagccacattggctcataaattacttttggtcaaggtaatgagctactaacaaccacgtctaaattagcaatttgtaattctgttatggaataatgaaggggataataatatgttaattctcaaaaatgccactgaaaagaaagcaaaggatgtctctgaattcaattaatttattaattttcttttgtttcttttaagcactccacgttttacaaatgacttgagctggcttacaatgttaatgcataaaataaaatagtgtgagaataaaaattttaaaatcattataaaacctctatataaactataaaaaaggaaactataaagagtcaattaagaaaagtgatgcaaataataatccctgaaattattgtttcataaatttgaaacttatctctaggacagaacttcctaacagttaaagaaaaggggaagctagtcaggtacactgttctcacaatcaggaaagaggaagcatctatgttttcatgaaagagtaagtaaattctaatagaaacatcttttttagagtgaacaatattcccgtcaacatttgagcttctaattgcatgttgaagacctttagtgctatgtgggcctaaacccagtatgacccacttgtcttccacaccagctgggccactgatccctatcatacttaacatgattgggtctgggtctagcccactgaaaaagttatcaagagaatggggcttacctgacaaaccccaattgtcaggtagactcaagcttcaaccattgttcctttgtcccccatcagcctgggtggaaaaaagctaatctcataatctagtcgagttaattccattctccttctgcttgttttctgtagggttttgcctgtttcacagtccaccaattataactgtagaccaaatttcaattccgaaaggataaagacttccagacatacatactcttactcagtaggtccaatgtctaaagttttaagatgagagatgccatcttctcagttcagtgccacccctttcctattgtctatattaaattacaagtgtttaaagtaattcactgacatcctagtaagaatgtgtttataaaatggaattaataatctactaatcactagagcaagaaagtggccatggaattgggtggaaacagttgaaatgaccaactagtgtggagtttaaggtggtgagggcttgaagctgagatggaagctctgttatccacctttggctcattgtgtcactgcagcccaacaacttcctagggccaaggtatggccctcagaaccaaaggaaaccctacattgtctcattagaccaaaa

SEQ ID NO: 585192 - DNA, 4001 bp, Homo sapiens
aaagatcataaagagagtcctgaggccattcagacccctgtgtctcatgccctgtgttctatgagatctccgagtattactaaaataaaatcacttttggggctttagctaaggagttgttcattgcagtcaaaagactcaggagttgttcattgcagtcaaaagattcaggaataataggcagaagcagtaggttctatagcctcgtccctaaataaaaataaaatcaggggttttactagcctgagagatggctgttatgttaaaagaaatatataaaaataacaaacccggaagccatcaattcccaagataatgggactgatagatcattgctaaactatggttttttggaagtagccactgtctcctgaggtagactgtttcccactagtgaattaaatcaaatctcacacacacaacagcagtaacaaggaggggaaggtggctgtgggcctggtctgcccatatcaccaacccatgtcactgacatgggttagaattaccagaacatgctgatgataaagaagactgattttcagttggttctattatcttttagacatgtttagaaatattattctctataggaactgcaccccgttaatgcctgaacccagggcaggtgacttccactgacaacccctgtgctgtcctcccatgtccaattttagaaagagcaaccggttaccaggcctggtaactgaatcccctgatctcattatctgtgaataagaggtctgatttctgttcacaagtttctattcatttttcaaaaaagacaatgatgttgtaactctatattatgcaaatattattagaacagaattgtggctatattattttaggataccatctctaaggacataaagtacaagttttgcagtcttttaaggctaaccacttgcccagaaatatatttgaaattatgcatttgagctaccaataagtggattttttgaaactataggactatgaatgaattttgaaagaggaaacgtaataaaccaaaagtaatgtgggagaaattcaagcatcacttttatctgtaagttcactttaagagggaaaaacacattttgtcaaatttcaaaggataaacaattttaagcaaaactaaacttttaaaattcatattcaacaaatactgacaaagaatcagaaaaaagaaaggaatgaagcatcaattacactattttaaagaatagtataaaaaacaatggaactgtagttacatccccacaatacaaagaatgacacaatggagacaagcttaagaacccagagaaatctccccaaagtctgccttcctcttgagaaagtatcatctgagaagaagaatgtgtaaggccaagagttttcattgccataggttagtcgttggtgcaggattttttgagaaagtacaaaaatattactcagtttcaagaagggtttgaggctagtgatgccttcataataagccaaaattgtagataaaacatgacaaggtctgatgagggaaaataatcataaaaatgttcattaacttctgcatttacacctagtaccttggagattatcagaaaaaaaggttatttataggttcccatttcctgtattctgatctttggataaaattagtggagcacagaagaacagagaagaataaatgaaaacaaaaatatttttatacagacttgtgctcttattacgtaaagtgccttaaagttaataaattccttcttattcactgtacatgttcccttattcactgtataaattcacttattcactacatatgttattaattaaacctcaaattaccaaagcctcacaaacacaaaatcatgagtggctgctcatctctgaaattcctctccaaaggaagtcactggaaggagaaggaggacctgggactactcactgtggctggccaaagacaaactcaccggcaaatttgccccactccctggcagctggagatatgggcattactggctctcttctgtcataccttgctacaaatcacaggctgggctcttgtatggatgagagtcaagttagccccgaatggcagctccccaggctggaccctgcggttcccataggcagtcagccccatgtgcaggagtgctgcagcctgacagacaagtcctgcatgggagtagctcctgcagtgggaggggcaatgcactggagaatggatgagtcacaccaggtgacagacgcggactctcacaaaaagcaaaggctcctgtcttgggcaagggatttaagactgtggtggcagcacaggatgtgtgatgcatggctgtagctcatttgttcttacaaatcagcctgagcctaaagatgaaatttggaaaccacaagtgcctctgcttggggctctggtactagctggctggctttctggttactaggattatggtggtatggttccctaatcattcctatcggtctccagttgcaaacacaaggtagcattgtgattcctcacctccttgtggtcagtggggcatttaagtaattctgcatggtgccagcaattcagaatagtagttactccatgagactgggtccctgagtgaccgtgataagaagaggtccctgctaacacatgacaaccataagaaaggattacttcttactattcttactccctgagatttgggagctatttgtcacctcagcataacctaccctatacaaggacaaagactctcaaaaagcaacatggtcagtgacatatctttttttaaatttgaaacactcaaaaactctttttttttgtatttatgaacttcttagcttccccaatcccatgtttgaaaagctatatctatatttatctagagtgtggcatttttcaaaatcttcacgaagttctcctaatatactgaaaggcaccccttaattttaatctcagcattcccccttcctcattttgtttccttagctagtcttgatcttctaggaagtggccagggaaggatgggaaagttcccagctgctgtgagtgctgtgctgctatttttctctaattctaggtctgtgaatccccttgagggctgaatagtaccctcttgaaatccactcaagtctgctcctcagatgggaaaattctatcttttaaaaaatataggttggccacagtgcctcacacctgtaatctcagtactttgggaggctgaggcaggaatgcttgaggccaggagttcgagactagcctgagcaacataatgagaccttgtctctactttaaacaaacaaacaaaaaaaattagctgggcatggtggtgcacacctgtagccctggccactcaggaggctgacataggaggctcacttgagcccaggagattgaggctacagtgagtggagattgtgccactggactccagccagggtgacagagtaagaccctgtctcaaaaaaaatttatatatatatatatatatatatatatatatatatatacacatacacacacacacacacacacacatatatatacacacatatatatacatatatatatacacatatatatacacacatatatatacatatatatatacacatatatatatatgctttattttttagagtagttttaggtttacagcaaaattgaggcaaaagtacagagatttcaaaaatatccctgcccccccatacacacaacctcccccactatcaacatctcgcggtaggtgatgcatttgtcacaactggtgagtctacactaacatgtcctaatcagtcgcattgtcattatttatacacaaaatgcccagtgtgccatgcatctgtggatatatcaatttatataaaatatgacccctaacctcccagagttcacacttctagttggaagaagaaaacacataaatatgaaaaacatacaagatcttctctactaatagctgacacagtcactcccaacaatggaggagttgatggaggctggcctggtcaggagtcacttcatggagaatacagggacagaccaggcc

SEQ ID NO: 585193 - DNA, 4001 bp, Homo sapiens
gtctccataagtcagaactaataaaaccctatttctccagacagacccagatgaccccagctgttctgaaacaccatctcctatttgtcccatcttgcttgtacctggagcagattttctgaatgagttggaatttaaaactacagtgagtctgtctgggtactggagcttctttctgaaacatgccagatggaattgtaggggatgactcacacagactgagtactccctacccgtctgaacacgctgagtgcggcctgacatcaggactcccaaagaaaattttaaaaggtcagctgggaactgtaagtgtagtcagtcaggaaggaatgcatcagaaggtgtgatctcgcaaacctgttcatgcaaaacaccctaaggtgaatggccaagaatatttgtgaatcaaggaaatactttcccaaagggttcctctccccggaactgtaccacaaggtgagagggagtgcctcttctcacttttttgccagtcttcaaggtggcaattcgcctcttactcccaggccagaccattgtctgatgggaacaaccaatccaaagaggttaactagagggcaaggaacctaagagttaagtgacccacattttgggggggggggtgtgtcgtctgtgtgtgtgtgtgtgtgtgtatgtgtgtgtgtgttgttcccctaattctataactgtctgtctgtttcctctgttccagtagtataattagaactctgattataacatcagatggataaacgagttgtttatgtgtttaagacccagtatctcttgccctcatagcagaatctatttagttacccttagagttctcccttgccatggaagaaatgcttcacatagagccttgggggaaagaaagatagaaaagaactattagaatcagaaacatctcatctttagctactttagatggcttccagccaatctgtttgtagcccagcatctcttctaaaaattggaatctggattcagattctgataggtttcaagaatcacataatttcagagttggaagacaatttcagagttagaagacatctagatatctcaccaactatcttgatacttataaaattttaaagaaatttatacgcccagcaattgcctctggtccatgaagaaagctcatgatgtgctgacactgaaaaacaaacaaacaaacaaataaacagcacctaatgatgcaacactttagacctctcacaactgtcttcagagtataaggaatatagaccttcaagtagcatagaattggccacttgaaacaagggaagatgcctttgcaaaaacgtgtttggcagtaactggagaaatgtttttttaaattgatacaatgatagctttttcaggctcactaaaagaagaaactaatcaagaacacttttaaaacaacatccagctttacattcagtctaaaagacaggtattgaaatttatcaagcaaggggacaatgcagggacagtgagtttatttgcctgacaggatactttgcattttcactcctaggagtgagccattaaagcctgacaaacaactcttaaagaaaaacaaacgtaaaagaggcttaggaaatactccaaccttgagctagccaatttctaaatcatgttagagaagtttccagaagaatcaagcattccagaaaataccatcatatatcacgcatttccccctcctggaatatgtgcaaaaacaagcctttcttcaacaggaaaatggtgctggtgtaggacatctactcacggcatccaggaagtagatctagcagcccagaggtggagaatcacccagcaggaaggtcagagctcagctccctagcatgatgcctcaccatcacgtggcacctcccacggtccctggtcagtggctgtgatctgtcttctccatttttgaaatgggagtccaaggggcccagtgagaactgactgcctgttgcgagaagccgatctgagaactgtaaagttacccacagtttcaaggcttgtgcaagtctgtgattcactccactatgggtccatgaagcacgcctaagagaaattacaggtttctcctgtctgaagcaaatccattaaagtgagtcacttgtttgtctttcagttcttcatccttatctcagatgattgcatgagactctgcttgcatctgctgcactgggataattggaaggagggtgataaaatgcaaggttatgccactattgttgatgatttttaaaggctgatactttttttttttgcctgttctgatgttgaacttggaggaaattggctgataaactggtgcatcaattgtgatctaattcctaacctagcaacagagagatttctgttttatttttgtaatgaccgggacaaggagttctcactgagccactacatgactgtggtaattcagacacagaagacactgtgtccacttgtggggaatgcacacggtttgactttggacaggggagccagtttgcattgttctgctaaccaccaaacagtcccacacatcctagttctactgttgtctactcacaggccttccttccccaaagatctaaagcaaaccctcatttagatatttccaggagaaatgtggacaataaggagaggtaagtgaggaggcagttttgttatgggttttatagcaatgaaggtcaaggaggtgctgtttatggaaatgggtcagctccatttaggtcagtagttaagaaatggctcatttgggaagtggaaaagccaatatcaagccattgtgtaatcaaaggactttttattgcacatatttaccgaacatactctatgtacaaggcaccatgctctgcactatgggcatacaaaagtgagtaacacagtgagtaacaaaagtgaataccccattccccaaaacatatacatatgcacacaaaaagaccaaaaggaaataaacaatataacacaaaagtgaaggacatagattataaaattacaggaaatcaggtggggagaatcagcgcttctggttggaccaatcagggaagaattcttgaagaaggcagaaagtgagggagagctcaggcacacgtgcagtgagcagatccctgtgatgtgtactctttcctggccaggtaactgtgtattatgaccacagtaatgaatgaaaggatttttcaatggtaagctcaacagattttgctggctgatacccctaatgttgaacagaccaaatcaaatgcttaactctttaatttggaagtcagtgaactagttcccatgagggtgtcttcagccaaacttatgcatggggtcatggctgtgtgtttgcttgtgtttgcatgtgggtgggtgggttcatgtattcacaggactctaatttaaaaaaaacaactaaaactaacatgtgaatttgaatgagcaattattatgagccaagtactatactactttacctacatttatccacttaaagtctcagggatttaaatggctttcccaagaatcattatgtattaagtctgatacttaaaaatctgccttggatactatcagtaccaatttctcctagagtcacctgaccaaatcactttcttggtgcggtgtcagcaggaaactgaatgtgtctctacccagggtcatccagagtcaacctaatccatgcagttccttgacatttttcaagatggtgtagagtgggctttgggatgcaggagagagggcatagcttcttccaggaattcccaaataattccagagtttttctctaagcatccttggggtttcttggttaatgatgaagctaaggtggggtttctttccaaccatcctgtctcagggagtgagtatagctgagtagtgagtacttccataatagatgtgactgctcaagacacaaagcaaatgctaggccaatccctccctctctccctagtgctcagagctgttatctgtgaaatgaagcaattggagttcatcttttataaaatttgtccagagttaccatcctataactatatttgctt

SEQ ID NO: 585194 - DNA, 4001 bp, Homo sapiens
ctttttacagaagactaaaagagatggaaaatgaaccgatctgttaaatgcatttattatccactgaataaaagggcaatctctcctgtcttcactctacgttctctgggccactttatctatcaatctagctattatctatctagttaatttcctgttattttatcttctcccctttcatttctagaataagaaacttctgatgcccttcaagggaaaagcccaaaccactaattggcaaatctagaatttaatccttaggaggttgttactaatattattaattgtcaaagccaaaaccaacacaaaatagtaatggtaaaaatgagtaaaactctttatacttttctaagagttaaaagagctattcatgtttcccatgtatcattttatctttcactgagaggaaggagtttaggataaatcacaagaacttgacaatgagaatttattgtactcctgtgccccggcttgtcctatagagctcagaagaacagaaaataaagcctttaactggtaacacagaaaacaattgatagaataatatttggggggggggaagagagtgtatattgggggtgcaattgaaaactgttaacagaaagctggctgcgatggctgacacccgtaattccagcattttgggaggccgaggcaggtggatcacctgaggtcaggagttcgagaccaacctggctaacatggtgaaaccccatctctactaaaaatacaaaaattagcagggtgtggtggcgggtgcctgtaatcccagctgcttgggaggttgaggcaggaggatcgtttgaacccgggaggcagaggttgtagtgaaccaagatcgtgccactgcactccaacctgggcgacagagcaagactccatctcaaaaaaataaaaataaaaataaaatctatttagagatattcttttacgataagaatatagtcaagtattatctgtgtaattcaaaaataacctacattgaaaaaccaactacgttagccctttatgaaagaaaaaatgctgtagtgaagtggcatgacctggctttctgaaatatgagaaaacatggtttaagcaaaccgcacatcatagagttgctcctttcaaaacaagtcggcctggccctgaagccccagcacttttactgacctccttcctaatgctgactacaaactcctttcccctcagtcctgtgtgggaggctgcagcctacattttacatttctaaggtcatcccttgtcctttggaaggactctcccgaagctgagcgaatagccagggctccctcctcctgctactgggatgcagcctcttccttcctcagcctgaccacagcaatggccgactggccctgaaatgctcttggcaagagcagcagctcagtagctcatgaatgcactggtttttatagtattttctggtttaaggacgagagaacttgtttgaaaaaaaaaaagtctgttattaagaaaatcctaaaggatcccagctagttgcttgatacgccatctcctttaatatagtctcattaactggaccaacagtatgcacaatgctcttgactggacatacttaactttcccaacatacatatcacacctacgcaaaagaaaagcaggcaaagaggatcgtaagtggaagatgtcttaagagaagtgacttaggagcccctgaggtcttgctacaaagggagacagaatgacagaccgcagtaggagaaatgtctgttacctgtccagcactgtggtcccccggctggctcccgctctgatcagatgcctaaaagcttcccagtttccactatggggccatttgtcctgggcctcctgggcaggggctctcacgcccagtggagggagaaccaagcaagactcatttcgcgttttcaggcaggactggcagcaccgctcccacgctcagcctcccccagctatgatcctcccagtctcacagagtcatccctgagagccgcgctgctgttttaaaaacaaaaagtgatttcctggtcctcttccccggatggcgtgtgcgatttccctcacgcccatgggaagtccttcagatccttcttatctggaaacctctccaccaagtggacagacttgtttggccaatgcccctagttctcacttttctttctccaaagaaaaaaatcagaaaagcaaaaccagagcaaaccaaacataggttagagctaatgagaagtacaggatgtctggtttcaacttttaaaagatgaccactaaattagattgtaacttcagagaggaaggaaaattaagactatcgatgaattctttgtctttagcagtgccaagaaagcagagaaaaaaagaatccgcagaagagaagagacctagagaagttgcttagtcctcccccgcgggagggctgtacctcaaaaatgccatattggagggacgtccagttctcctaggtttccagggaaactctgtgagtatttgtgtatcaaactataaatttagtggtacttaaaataccgctcaatagcatggatatttaaagataaggagatatatggtaaaggcctggttggcaggctgcatccaggttgctgggtttaaagatgaattatagtcagctcatttttgaactggaagtgacctcactgatcctcattttacaaaagaggaaactgaggcccaaggagaacccttcccaaggtcagaacacggatggggaatgctgtttgactctctactctggagctctgcccacagaaagtttgatgaatgaggcctggcttggaatcggcattggaaataagtgcttcgggtgagtcccatgcaggtagtcccaagagtatcttcagggaattcctcatagtgtcaaagaaaggactctggagtcagactgtaggaactgatgctttagtcccaccaattatatgtggccgggtacacattacttgaccctattgagattcagtgttgttttgtttttagacggagtctcgctctgtctcccaggctagagtccagtggcgcgatcttggctcactgcaacctctgcctcctgggttcaagcgattctcctgcctcagctttcccagtagctgggactgtaggtgcctaccagcacatctggctaatttttgtatttttaatagagacagggtctctccatgttggccaggctggtctcaaactcctgacctcaggtaatccccagcctcggcctcccaaagtgctgggattacaggcgtgagccactgctcctggccctgagattcagttttattgtgtgtgaaagtgggataataatagtactgagtttatagactctgctgaaactgaagaggaagagtttagtaactgtttgttgttctctggagccctgggctccaatgcctccaagttcatcctctctcccctccagctgccttcccttcttgtcatgctatcagcctgtagcaagtcagcaaccaccagcaggacttaggcttgagaccagagtatttgggcaagaagaggatgaactccaaaatgttattattccacttctagataatgattctcaactgtagtctacacgttagattggatacaccctaacttaaaaagagcctgctgagggatgcagttcctgggcaaatgctgccttttttcctgctcgtattttggttgttgggtgcagcaggctgtctaacatggaatgggcgttgtcaaagtggctgtccctttccttccctgaggagcaattcttctcgcccacagttccctgcttgttgttaggaacactatgtgcttgctgcacacacattacaatgaaaacaaaagcaaataaaaaatgcaaccaccatatggcctcagcggcaacccagaatgaactgtggatggagagaccctgccctgtcgtagctacggctggaattgactgtcacagcagccgttttcttgaattctaaaacgttggtgttggtggctgaacccaaatttcttgaacccaactgcaaacgtagagagaataatttacc

SEQ ID NO: 585195 - DNA, 4001 bp, Homo sapiens
caggccttaatgggcaattgggtggggaagatgaatagaggtgtcccaggcagggaggacagcacacacagaaataggcaggcattagagcattcaaatattagggaaatgcaaggtacttagtttagttgcaaagtcagatactgagagggtgaggctggcaggatgataaggagccgacttttgatttttctaccttctttaagtgaatgcttctcaaactttaatgtgcatatgcatcacccagggattaaaatgcagattcagtaaatctggggagggaataaagaatttgttcccaagtgatcactcccaactgatgcctgatgcagctagtccttggactacactttaggtagcaaggctgtaagcaacagagtgcaatagaaatatttcactgaggtcgggcaccatggctcccgcctataatcccagcattttgggaggccaaagtgggcagatcacctgaggtcaggagttcgagaccagcctgggcaacacggtgaaaccccttctctactaaaaatacaaaacatagctgggcgtggtggtgcgtgcctgtagtcccagctacttgggaggctgaggcacaaagatcacttgaacccaagaggcagaggttgtgctgagattgcaccactgtactccaggctgggcgacagagtgagacacagtctcagaaaaaaaaaattatatatatatagatatatgtgtatatatatatatatatatatatatatatatatatatatctcactgacagtggcattattagaattgcatattcccaagacccctgtagcagggtatggaagatagaatggagggagactgtattgaggtaaaatacataagtggtaagaaattatgagcatcggaactaaataagctagaaaagaatagtaaatgttcaataaataggtatgaattgtttgatattccatgaagtctgtataaattatttctcttagagtaaaggctggttgtgaagacaaaatgaaacaataaaaacataagatgacaaaaaaatccagagaaatttatagtggtacttaaataagacctggctcctctctgagtctcagtgacctatcatcttgagcctcaatggtgaccaacaagagcacccagctaaggagtgagcaccatccctgcagacaaccaccaccacaagcctccgagacatccctggatattcgttgtcactactggtattgaatttcaggaaacctcgggaataacaactgtttaaccacaaattctagaaaataatgtggaagtccaccagatccctgaacaaagtactcttttttttttcttatagcacataggcactctaaattaggaacacccgttcctatttctgttagcaaattctctgtcaaatctactatttaactgaaaacctcagaaaggagtaataaagaaatcatggtagaggtctatactattaaaaagaaaaggcagttagtaaaaattaccccttatgcagaagccaaaaaaaaaaaaaaactacttctaatgagatttgcactccaaagaaaataagaatcgacaccatgatctatatactggctggcattctttatccaaagatgtacagatttgaaaaatccatatgtcatatcccatctcactatttgcccctcacagtcttgtaaatcagtaaatctccacaagacacacaggttgagagcgtgaagccagctagaaaagccacgtggaaatgcacatctattccagagcagccggattcacatttaacatggcaaatcaaaacgatgcaggtacctacctttctcttctggagttttcaggcttctaaaatttaacaccttactgctgatctgcccaaaaccctctcaggtgaggtgaacctcgagggcatcccattcaatcacacagccagaggagggtggggtttcacaagaccagacttcaaatgctggggctcttgcgggttcccaggctgtcgggagcagaggtgaactgccttctgttctctgctgcaggaagaagacgggagacactgactgactggaggtggggggcgggggcttgggggagggaagtaatatggggactgtaataaataagagatcctctccacatgatttcctatatttggtgcctgatgcctctctccaggctccctagaggaaacaggaaacttgtcctctggccactggaaagaagagaataaacatactgagaactgtgaaaagaagcagcaggaccccaggcaaggagctgatgggccagccaactttaccttttaccaagtgctttcttcctgaagttcctctaagtgtttaactctgtaaaagtcaagaatgtcctcatcttcttccactgagctggagcatattctggccccagtccagatgtcatattacagagcagctgatgacaggcaggttagaacaggccctggaagaatccattcccagcctcaggcaagaccccctaagctctgtctttggaaagtctgatctttcttaatcttggactgactccaaagccctcaggccattttgccttagagtttaaagaattatcaggaggccaccatccgtggagtgaagtaggaccctctacattatttatggggtttcatgtaaaatgaaaatgtgatgccactcatttgaaaattaagaatttcaagatggtgacaatagaacattaaagcaagtgtggggactctctggagcacagggctctatgcaactgtaccaggccgtagactcaccaagccagtcctggctgtagaaagaacgtgggaactctgggccatgtggattttcacaagctgagttgttgagagacctggactacctccattgtgttcagcagggtgacagtcagtcctccaacagcagcacacttggaagctgctgcaaggcagcagagggggaggagggtggatgctgggttgcgggtgtgagcaggcaaagaccacaaacacatcactgagtaaaaatcacacagtggtctccttgcccatattttccctcacttcctatccattctcctctcagcaaccagggtaatgtctctcaaatgccatcttcatggtgggattcccatgcttaaaatctttcaggagcttaaggatataggtcaaacccttaaatgcacaatggccaatctcttctactttccctcaaagcccactttcacctgtgctctcctcatgccctttctcattccctccttccccacctctctccactcaatgaagtatgtcctcccctccaagatccaattccttgaatctgacatccttcagaatgcattttccaatttctgggcccctttggtgttcttccaagcaaaccatgcttgtctctctcataacactaaagcaaggaagcctgcctacttgtctctctgtctcctgctgggctgtccctctgtgaggtcaaggactgtgtctgcttcaccattatatccctagcatccaggacccagcagtgtctggtttgtgtgggtttaatgttaggaggaggagcgtcatcaactacagttattgctgggtgcgatggtgcgcacttgtacaagtcccagctactccggtggctgaggcaggaggattgttggatcccaggagtttgagaccagcctggtctcaaaataaaatcaaattaatttttgattaatttaaaaataaaatcaaattatttttgattaatttacaaaataaaatcaaattaattacagttattacatgttagggaaaggagaatatatgacttagaggaaaacacaagactgttgttatagttttacaaagtggagcaacttcacgggtgatattgcggagctattgctgaatattatgaaaatgctgcagtttgtcatatgctgtgtattgctgcctcacagagattattataagcaggcaacaacctctattcaaaaagtgaagtcttagataatgcccacaagaaggaggactaaagttagcaagggtgaatgaaatgggagtctgttggaggtga

SEQ ID NO: 585196 - DNA, 4001 bp, Homo sapiens
ctataatgacatgattttttaatcacgaagaattcaaatggactatataacttaatttcatgatcaggaaatttttacattacctgttgataagtttaacatcttttattttaaaaacaggtatttatactttcatgtgtaatatgctttttttctcataagatctaaatgcttaggaaagctgaaaaaaactgggcaaatacctgctgtaaaatccctagtatattttcaagaaaaactgaagttgaaaacaagctcatattacttcaaaatgtgtagcctgtatatgagaacaagtcttatatgaaaatgctggctgtatcccaaaataaattttttcaagttgtaccttgccgattccactggcataaatgaaactttaaaactcccaggtgtggaattatttcacatgcagtttcagtaaaaataagtggttcatttctgattacatctcacagtacctggaacagagttacagagtgctaggcttgtgggcactatcctttctttctcctattttaaaatgtgtgttggggagtggggaagtagggaatggaaagtgcaggaaagtgtggaaaaacaggacctagggggcaggtctttccccatgtactgaactgaaagagtaaattcatgtaagatccaggagttgggggaaggagtgttaagtaccaagttctagaaattgttgtacatgagttagtggaaggggataaaatgtctgtcacggtgtccgtccaagattaactaaaacatcagaaggaaaattacctattacaagaaaaagaaacttcttagttggccacaaaaataagcttggccctttggagtacaatcttccttttcccattctggaaagccagacggtgcttggcgaccctttcatggggtcgctgtgcgccacctcaccattaggatgacaattctatggaggcaaaaccttttaggtttctctgtttcaatgccccaattccccacgccccccataagtctatggaagtcccctcaaatcctatcacgtaacgtggcgtaacccttaattacttcctaaactacaaagcacactgaaaacattttctgcacaccttaaaaaaattcaaacaccccaaagatccaagaataacttctacagtcaatggtgacaatgtgtaaagtcaacattttctcggcatactagtaccttccaagcccccaggtgttgattccggagagcgccttcttggcagggccaggcctctggactgaggagcggtgcctgttactccttgtttaatttgaattgaaaacacgttttccccattcttgaagccctgcccttcttattaggctttacaccgcccaaatgtgaggtttacctcgctgggggaaaaaaaacagccacacacacatgtcacaactccacttggcaatagtcctactcctcagtgcctcgaggggcaaactgaagacaaaccggtttattccctccgtgcagttgaagtccttataaaatcatttctcttgagggtggggtggtcggggagggggcgacagaaggtggacacagataaaagagtgaaggaattccaagctgaaaggtgagacttacatgttgacattactgcgccgaggtcccctttggccgcaagatcatcctccaccactttcccgctctgctgccgctgctccacccagggggaacccaggcgccccagccctgcgccgcggcgggaccctcctttacgccgtttctggagagttcatgggctttcccgacggcgcaaggtgaaccctgggcgcggcagcgttcagcgcagggcctgcggacgaggaagcaggctggcggcaggtccctcctcgcagggaagttggcagggtgagggcgagaagctgaggaagtagggtgtgcgtggggctggtgctgaggagaccgggccaggcaggggtgcgcgtcgcaggtcctcgcccccgctggcgggaggcgggactcggccaccaccctaggtacttgggtccccctcgcgggcgcaggcgactctccccggacccgtgcgctccgcccgcgcttccggcgtgactggagctgggctcaggtgcggcggccccggcggcgtgcggcgtatgacccgactccggctgccctggtctgggcgctccgcggctggggctgtcccgaaggcgcagctgccccacacaggatcttcaaccccagggccgaaagggagaagtcgccccgcggggcgggacaggcgcttttggagcgagcagcgaagggagagtggccggggtcggcgatgggcgcagagccgggctcagctccccagctgggaggggacagggcggacccggaggtcgccgaaacgccgggagcgctgaaccccagagaccctcggcgagagaaaggagaagctgggaaggcaggcgctcctgtggcatctccccagcgtttgcagcctacccgagtccccgcgcgggtccccccgccacgctcccgggctgttgctttgcttcacttttctgccactttctttacttaacttttctgtcttctctgactagttcgcttgctcgaaaaaatgaagggattttaacggggggctgggaagatggtcacataacattttattgagagggattgatttgccaacgtaaatccagctgcttgttggggaaagttagctgcctgctctccaatgctcctgtaaagtagctgtctggcaaagggatctggacacacctccttgggaatgagaagagagaagggctcacacttggaaagaggttttcttcccattgtgtactgccagagttagtccacaaaatgctagaggcaaaccttccggtgccagggctgtatgcacatccagaacctcaacagctcagcttgcacggtgtacacactggcacatgcacaggccatacacagaagtgccctaacaattatttcaagctgattagcttatgatagagagctgttggtgggtgcggggggtgggaaggaggtaaagcaggacttactcacagttacaggcagaaaggaagctggaacgctgccaccaattccagaggcctgaacatctagggtgtgttctacttgtcatttttatcagtattcattttgatgaataaacggtatgattaatagagacgctgagttgtagcatttaagggaagctaaagttcttctgcccaactgtctcacgttaacaggtagggaaatgagactgacaagatctgaggtctgtgcacactagctagaggtgaccaggggctaagattaggtttccagactacccttttgagtcagtcgctattacacggtatagtcccaaagaaatttaagggccactcttggaattttttaaaagcaacatgtatttcacagtttgtgggtcaagaacctggatgcccttagctcagtgtctctcaggaggccacaattggagtggtgactaaggctgtggtctgatctgaaggctggacaggggaaagatctacttccaagttcacatatgtatttgttccagtcatagaattttaaagttagaagaaacctggaaacataagagcaaataaatataaataactgccaggcacggtggctcatgcctgtaatcccagcactttgggaagctgaggcgagtcagttggggtcaggagttcgagaccagtttggccaacatggtgagacctcatctctactgaaaaaaaaaaaaaaaattagtcctggtggtacacacctgtaatcccagctaccttttctgaggcaggagaatcacttgaacccgggaggtggagcttgcagtgagctgaggttgcaccactgaactccagcctgggcaaaagagctagactctgcctcaaaaaaagaaaagacatataaataacttcattattcagtgttctccagaaaaacggagccagctagatgtgtgtatgcacatagatatatatattttagttttaaggtattgtggaggtactagtgcaaaatttacagtcaggcagcctggagattcagg

SEQ ID NO: 585197 - DNA, 4001 bp, Homo sapiens
acaaggaaagtgactttgaaaatcttttatcatcatcgtgagactcagttttggaatacaatttacaaggaatgagatgaaaagatggcagctgttgtaacggcatccagaggctggggctggacgcctgcccaccttcacactgtggcccatggagccctggcatgtcccgagcaccattgtccaccagctgtgccagcggggttggaaatgaccatttcaaacaccacgtgatagcttacattgtgcacttctcgcaggaggcataaagttctgtgacctttttttcacatcgggggaagcaaagtacatttcaaaagccttttagacattcaaacttaaaaaacagctctagaggcaaattccagaaacgtatcaggaaagcatttcttacagtaaactagggaactcactacattttccttaacataatgtataatctagaaaaatgaagcaaaattttatgaaaacaaaaatgttatgttccaaataaaggctagcatgtacgacagtaccttatatacagcagagtctctttttagaaccagggcactttctgatgtcggtcatccccagtctgcacagcaggtgggaagaaaacatagttttttttttgtatttaaaactgaagcataataaatgaaaatgacttgctgagaccaagtaagagttggaaagatgccatcacccggctttcttctcttccttcactgatttagcaaattacatttcttcaagtgtggagatggagtagctgcccgacttttcagttcagcaactgaatctgcatcatagttgggtaggaggaggttctagcttgttcattttgatttgccactctacaaggtaaaatcacagaggaccaccctggtcaacaaagtataagaccacacctgcagcaactgtgcccatgtttatgctctgatccttgtattgcagtcttaagacttcttcttcttccagaatcccaaagtaggagtaattattatttaggtcgcaggtagttccataaacacgggcgttgaggacgctggctgttgtcaggaataggagtctctggggttgaaatctgggggctctgctgcctgccctttgcctcggagggtgtggaagaccctccgataggagctcctgaaggtggggctggagaagcagtataccacggggttgagcacactgtgcaggtaggtgaggctgcccgtgacatccgaggtatgagccactgcacaaagggccctgcagctccccagattctggaagatgtgcatcaggactctggccaggaagcagggcagaaagcacagagcaaacagcaccaccaccaaggtgaccagtgcctgggcccgctgaagcttgggctgtttctcaggctcccggagtcttttctggagagccctgatgatgcctgcattgcagaacacgatgaggccaaaggggaggacaaactgaaggcaggagagtgcttcctgccagatgatgctgaaggagccgtctgccctggagtagaaactgtggcacctggtggagttctgggcggcctcagagatgagcaagcccgggcaggtgagggcgaccatcaggagccagacgaggcccgagacccccagggccgcctgaggagacagcaggttgaccttaagccgagggtggaccacacggaggtaccggtccaaagccacggcggccaggaaggccatccccacgctgcggctgaggtccagcaggaagtgcagggcccagcagcccacacggcccagatgccaagcctggaggctcaggtagaaggcggccaggaaaggcaggcacgcagccaacagcaggtcagccagggccaggttgagcaggtagacagcgtacggcttccacaccctgacccggaacaggaaggtccacagcgccaccgcgttgcccagcagacccagcccacactccagccccagcaagacacccacagctgtggccaccacagtgctgggggctgagcagtttgggaatggcatcacccggccgtgaggggctgcaggcacagctggagcaggtacaggaggaactctgtgctctttcttacaaaatgaaagaaaaggccttttcctgccacagagtagacaagatctacatttgcccaacaagaacagttcctcagcagaatagagtccacagcaaaccaaaattcatttggggaaagaggatgagcaggggagggaaaagcccctttgcagttgtgttctgttttcttccgccataaaaaaggggaaatggtgtttcgcttcacatcaccgggctgcaaagctgaggagtaatgtcctataacgtctgggggtccagggctttgcatccacagtcctgaaagaaggaaaagtctaattatgcaaagactcctatgtctgtatacaattaaaataacaatggaatcaaaaagattgttctctactttgaatatgtttcatggggaaattttcttcttccttttcatacataaaggacgcttgctgggatccttctgcatggggcttgattttacacactggtcagatgtggtccccacacttaaacttgaaaggggatttgagacaacctgctcattccatagctgatggtttcacttgtacttgtgttttgttaaatacaaatttattttattttctctgctggagtctttcctacctagtacaccacttggattgggatctggaccagcagggcctggagtgggccctggaagcatggaaaaatcaatggcttgtaaaaatgcgtagaatccactagaaagttaggttcatcagccagggacatactccatatatccatgtgtcgctagtgacagacaatgcctggcacacagcattatcaacaagcatttctttgatgaataaacgtgtgcagtcatcattaccctctgatgaccctaatacatctcagtccttacccatcaatgaccctattatacttggttctcacccaatgttgaccctaatttaccttggtccttacccactattgaccctaattcatcctggtcttcactcaacgttgaccctacttcatcttgatcttttcccacttttgaccttactgcatcttggttcttacccactgatgatcctaatttatctcagtcctaaccattcttgatcctacttcatcttgatccttaccaactggtgaccctacttcatcataggtcttacccatattgactctaatttaagttggtcctctcccactgttgactctaatttatcttgggtccattcagcctggtttgaattttggagttaagtaaactttagttataattttttgtttctccatttattagcagtgtggttttgggaaagcaaattaacttctctgaactccaggctcttcacttgagaggtgaagatggtaacaccttcttgaagagttcttttgagtagtcaaggtactattacaggtaaagcacttagcgccatgtctgggtgttgtgagagcttgatgcttttactagagtatttattaagcctctctgatgcataggctttaaaaaactattcgttatctcttaacgcgataaaacacttttgtactaaatatccgttctatggtgttttgatgccttcaattatagtatccaagtttaaggctttaataattattattactaaagtatactgcatgttcattgcgtgtcagtcattgttagtgctggcctaagttatttcaatgaaccgtacaatagtgagatgaagtaggtacaatgttaagctctattttatgagtaaagaaatggaggcatggtaagattaggtaatttgctcaaggtcacaggcaggtaagtggtgggaccaggaccctcccagcccaaatttcaaccagaactggattcacagcttccctatagtcctatggctaatggtcaggcttcactctttttcaagtcccatagggctgtgatttgtatgatatcaaggtaatttgacttgcattcttcttgctttcattattccattatttttaaa

SEQ ID NO: 585198 - DNA, 4001 bp, Homo sapiens
ccaaaggctggcttgttggggtgtggtgttggtgagaggacacggggcgagcccttcagacctcgctgggagacctggaacgaaagggcactttggactggaaacagccacagagcaggagccacagggcgcgctggatctcctggttgcggaaggcatagatgatgggattgatcatggagttgtaggtggcgggcagcagggtggcgtaagtgtagaccgccgggtcctcatggctgcccaccacgcaatagatggcgaagggcagccagctggcgccgaaagtgcccagcaccacagccagtgtacccacaccctttctggtggcagcgagatggggtggcgccaggcagtgctgctgcagcgcgatctggtgcgcgtggcgccagaccacctggcagatgcgcacgtacaggtgcagcatgatgccgaagaccatgaagaaggcggcggagagcagagccacgtggctgcgcgccagcgggcgcaccacgctgcaggcggcgcgctctgccaggcagttccagcccagcacgggcagcagccccaggcctagggacacggtccaagtggcggcaagcaggaggtgcacgcccaacagggtccggcgcgagtaataggtgagcgcgttatacagggacaggtagcggtccaccgtaatggccagcaggctgctgacagaggcggcgaaggaggccacgaggaagcccaccgtgagcagactcacagtctccgagggcaccaagtactggaacacaaagtgcaagatgaggccacagcccgccaacaggtcagcggtggccaggctgcctaccagcacgaacatgggcgtgcgcagcgccggagtggacgcgatgagcgccaccaccagcgcgttttctccagcgatcactgtccccgacacgcacaggagcacgtcccacggattcaccgctggcagcaggagtcccggtggcccagccgacagctgcgaggacagctccagagacccattagctccgccgccggctcctagagccgccgcagcagggggtccccattcgcccgtgtccggcccccctgctgctgtggccgccgccgccgctccttcggccgccactaccaccacctgggagtcgttgagcgaggcggcgctcgcgttcatcgcggccggatttgcaccctgcatagggagggagtgcaggcgtcaggtgtacacttcaggctgccaggaaacttccccacgcgtagagcctcctctcgcattgccccacttgagttgcccaccccaccctgggaccccagagcaaatcggggaatcatgggttaagtgcgaacccaaaataaatacctgttgagtgagtgagtgaaatgcccacgcggacttctgagtttttgcagatatacaccaggacaacatgcactcacatgcacaaggatcaattctccaaggctgcctgtatttgcacacgcacccgagtgcaccaagctaggagtgtcatcctgggagagtcccgcctgggttgtggcggcgcgaccaggacatccccatggggctgggcagcagagacgctgtccgcggtgctgaaagcgaagtttctggcattgcgaagcctggagagtcctggagcccagagacccctgcgaagggggtctgggaggagagactagggtgtgtgtatgggggcagcagagggtgggagtcaaggttggctccatttctcctcttctggaaagacctgtcccctggatatctttctcccctcctctccccacatcctcaaagttccctgggaactcggccactcacctggggcgtcaggacttctggaagtcgctggtcatgggcgccgaggcggggcgccgggctgagctccccgcgcaaacagagcagctgcctgcaggaggcggccgggccggggaggaggcaagcgcggggcgcctgtcgctgtgccggctccgcgagtgagagatacagttggtggcagaaaaggcggctgcgagcggcgcgcgctgcagattgacaggcagggcgtggtgacgtcaggctcccggctcccggtgcgagcccagcactcactctcctcgccagcccatcctgtgccctccccgccgcactccccctgcccccaacactatctgagggtcctaggagggaggagaagccagagcaaccacctccagtccagaacttccaggaatgggatgggagagagacaaggagaggtagaaaggagtgaagaagaccctgagaccaggcggcgaagagggtgagctgggaggggaggggtgaaggatgagtgacacctgccgggcagcaaagcccagcgtcaaagatcactgagggatcaggtcaaaaaagaaaccccggagaagggggaggttgggacaggggtgtttgatgggaaagtagctacctttaaaaaaaaatgccgttcccgaaacaggaattatctgggaaaagaaattcactttttaaaaattttatttatttatttattgagacagagtctcactctgtcgcccaggctggagtgtagtcgcccgatctcggcccactgcaacctctgtctcctgggttctagcgattctcctgcctcagcctccccagtagctggaattacagatgtacgccaccacgcccagctaatttttgtagagatggggtttcgccatgttggtcaggctggtctcgaactcctgacctcgtgtgatccacccgcctcggcctcccaaagtgctgttattacaggtgtgagccacctcaccaggcctgaaatccaatttttaaaaaggatgtttgtggtacatgctcagttgagtagagtcagggaagaaattctgagttatggggagcagttaaaagatggataagacagggacatctgaggaaaacaatctcttcttttggaggttgcctgtgcaattcctctctttcccattatcttttctgaactctacacagcaggtttcactgtgaccttttcggcccatgttttcccgatttcggtagctgatatcgcccttggaacttgcgctttaattaaagaccaggtctgcatcttgctagagaaaaggaaaacagcaaaatgtgatttactttcttggcttcagactttgccctgttaattagtaccctataaaacaaattacaggacgaaaatcgtgataactcagctgcaccagacttcagtaggcaggagttttattttcagcccagataaatcatccttttgttttaaaggtgttttgttttgtcagtaagatacgaatattagtcttcttattctctttcttctcccagaatgtgcagtagctgtacctgggcaagagctaaaatagttgatgccatctgaggttctaaaatagatgattgcacattggcatgatggcattgcacagaggccacagccatacttttcagggaccacatggtctgggaaaagtgaaaattggcaacatttgttgctagtgctccccctacttctccctgtggaccctttcctcccttcactttgcctctagctccaaagaggggaaaaaagatattcagactgtccatgggttggaggataagtttaccctaggttgctgcctttaaacatgacccccaagtccagactattcctgcctcaatgcagccaacttaattacaagaacaagggacatatgacagttcaattatttggtgcaatagctgatgttggacagaaagtgagtttacacacaatttatccatttggagagcttaaaaaaatccacacaccactattttcttgaacccaaaacttggctgaagttctaaatttctgaaaagagccgttttgtgtttcggtacaagattgtcatctaagagtcaagaatgttatttcagagctgtcaagtgagccgtcaaaccactgtaacagcatgttaactgaggattttccaaatgatcagataaaagcccaaggggaggagaatcctccttaatatctaagtatgttccattttcacatgccacaatgtagcagaaagtatga

SEQ ID NO: 585199 - DNA, 4001 bp, Homo sapiens
aataaaccataaacaaaatctcaaggtgctcaagtaactctaggaactaagtcacatccacttaggaacactaaattcttactttcttgcttgcagtccagcaaacttaaggtaaaacagtaactacataggggttttagttatgtttatttttcctaagcaaatttttctccaagaatgttcagcttgctgaaattttcagaaaatgcttgagatggtgggttctttttttgagtttcggtactggtatactttacagcaaagtgacaaaactgtacttagagataaaaatctatatcccaaacaaaattttacagtattactggttattctgggatgattttcttcgaaaacttcccattacaaacaatatgtttcctacactatcccgtctgccttggtagtatacttttcacacacaaaattgtacgtaacgcatataccagaaatacgtcaaggcactcttttatttaaataagctcccacattctgtttttattgttcaaaatgatctgaatgctcataattgatgtaatcaattatgtcactaaaattttggctatgcaacattttacaaaatatagggacttttcatcagcaccttagatttgtagttggcaatgtgagtgaataaggcaaacaggaatagaggtgtggcagagacctaggggtgtgagaaaatggggcttcctttacccacgggacacgtgggaaaaaaaacttatccacgtctgcaataaatgtacttttatgttaggtttcattaaatgaaacacgtattacatacctcgtcaatggattagaatgtctgaagcagtatcagcttatgcaagaaacatgaggtttttatccatgattcttagaaacactactcctagaactggttgaaggcttcttaatctaagacataatgaaaaacaagctcacccaataaacaaagagaaatcctattttaaaaacatatggtttaaacttcatcctacctcactaaaaacctgcatgctactatagggatgcctgtattccctaagtgtcgagactcagtctcatccaagactaaacgatctctttgaaaatttgggcaagccctgggggaaattttcataaagatatgttgttggattttttttttaagcactctgagcctccacaacatattttattattaaaaagaagaatgtttccgaaaaggggcagaggagaaaagactgaaatcagggcgacgttgaaaaccggccaaggatgcaacacacagcgccgcaagctgaaccacatggaagagggaacctctcttaactgttggagcgcgaaaggacctttcgctctcgcaaacaaggtaaatttcagccctcaagcagcgagaccaccgtgtaaaagttcaagtggagctcatctccttcctctcactcccagcactgaattctcaaccagaacagcccagcaggaaaggagccggcatggggtgcccctctgcagccgaccgttttcctagaaggcctaaccgctcagacgggcaggggaggggggcgggcggcccgggagaaaccgagtccccgccgggtccccaccgtgtggcgccgaccgaaataactccagtccagctgcaaaaaccctcccgaaaacccaagcttctccggcacaacttcggtctctccagcctcattcctccccgcactccgccaaactgctcgccctgcccagcgcagcggatgcaagcgctccccgccccgagcggctacctgtcccgcgggccggggatcgcgggccggggatcccgagcctcacctcacctcaagcgaagggcagcgcgcgggcgcccgcggaagagcccagggagcatggctccatgtagtccctcccggaactttcctgacatagcacttctctcctccgctgcagagaacaacgctgccaggcggaggaggaaggaggacaacgaagaggaggtggtggcggcggcggcgatacaggcggcggtggcgggagctggagctgaaagtgaggagcatcgcggacgagcgccgccgcctcgcgagccgccgaggggttcccgcccccagggtaaccaacgctccctcttaaaggcgccggccccggttttagaccgggaggtgagtgagagaagagaaagagggaggaggcaagtaaaaagggagggggcaagtaaagagggaggaggcaagtaaagagggaggaggcaagtagagacggagagatccctggaggccacgcccgagctgccccagggcggatcgccggcccctttcgaccgctccctgccctgaacccctctatgctcaggtcgcatcgttcctccgcctgggcaaaggcatcgagggtaccgcaagtgcgcccacccggcactggggcaaccctcgtcgttggcctgcgccctgcaccccgcgcctcgctcccagacggtcgccccgcccctaatccctggcagtccttttagggtcctggtttcccgctcccacgggcccccagagtgcacctccagtggctactgcccagtggatttgcgttccccgaggctactcgcgtttcttctttggttattcttcctcatttccaacacaatgatgagggtctcacgcaggcgtccagaagactgaaataactaaaagccagctggggcccctagaccaatgcttgaaggtgtccctgatgtgtggcatgggagaattgccaggtatcctcctttacccggtgctctgttctcttccaatggccaatccccagctggcctcccactggatttctaaaacgattcactttcatcaacacatgggctgtaaagatgccaaacaactcaggaagaccccccagaaaaagtatcatcttgagacagtggaaaatgctgctttcagtgacaagtgatattttcagctattatcaacatatgtgatcattactgaggccacagcctcaggtggtgatgcccaggaggctcccagcatcagcagctatcgtcaccctaggaagagaccacagcagcagtgggcatgagcagcagagggttgctactgtccacggacttgtttttctacctcatagttccaacccttgcttcttggacctatgggacttcagtatagtgttgtgcagtttgtactctgcactgtgtcctctgtctgaggaggtgggcaggcaatttggagttaagatctagcctgggttccagagcaccagtcctagcaccaagctcggagagagtggcatttcctcattcacacaaaggcacttgcatatcactaccctgagactgaaccagaacatctcagttctttgcctcctgccacctacagctgtgaaagaagcacttgtgttgaacttgtagaagaataaggcaagaggagactatacaaaaggttgaagaaacttctgtaaccagatggagacgaaataagccctgggctcaataaaagcaggagacatggtcttgcctggaccaaacttttaagatgggaaaggagattatcagcgagcaaaagtgaagtcaggatagttggatgtggccagcacacaactcaaactgagttagcaaaacctgcagcaaagggcattggaatttattggttcatatgtttataaatcccataagtagaactggcgcgcgcacacacacacacacacacacacacacacacacgttcttagaaatcctttttactccagatactcaaagagcatcaggactcaatttctctccctgtcttcattgtgctttcactgcactggttttatttctctaaacagagggaagacctacatctccagtcttaacatccaacctccttagcaattagtcgcatcagaaagaaagcaagctgaagaatgtctcaccagacccacgtggatcctgcgttcatctctgaactaaccattgtaactatgggatggaatgcacactgccaggctggggttatttgcctttatctacaaaaaggtcaagggaaataattgtatgtacccttcatatatacccaaaccacagggac

SEQ ID NO: 585200 - DNA, 4001 bp, Homo sapiens
gggtaggagagggaataaagagaggtaggttagtgggtataaacatatagttagataaaagatagaagttcaatcgtttgacagcacagttactctagttagcaacaatgtattggatatttcaatgtagctagaagagaggacttgaattgttcccaatatatagaagtgacaataatcaaagtggtggacacctcaaaaagcctgacttgatcattacacattctaagcatataacaaaataccacatgtacctcataaatatgtaaactaatacgtatcaattaaaaaaagagaaacatagaagagaaaaaggtaaacgaataggttgtctgacattaaattgtataatattttcggagtccagcacatgtaagctccattagagttggaacctccttggtgtattcatgttggtgtgccagtgcctataatagggtacaggtaaggtaggcaattaataagtagttgtgcaatgttgagtgagtaccatttctcttgatgagtgacaaaaaggtaagagattttcaacggagtgattttttaaaataggaaatttccttatttggtcaaataactatttagtgttttccatccttaattgttggcctgcaattgtgggcctcaactctgcagtcattctttgtgtgccaacatagtgctctgaaaatcttcattaattattaacttttttttttaccattctctggtattcctgttaatcaatgattatgatgacaatagctaaaagtgcccaacttttagggagaatgccaagaaatcttagtgtgacagggaatcacattttatctaaaagtattcttagaggccttgggaaatacttcgttgataaagaaagaaaggtaagagaaaaaacaagattaaacttagacatagaaacataaaaatagaatgagaattttagagttggaaggaagcatgaagagcacattccatagcaacagcagctgatgctgcctgtgtccttagaggttatccaggcctttgttttacagatgagaaaatatacacaacagtgaaattggaactcagagtttaagtgatctacctaagtttacaaaattagcttgtcccaaaactgaaatgagaattagaatatcctgttctccttaaggaaaatccatttgcaacaccttccacccagctttacttttccacattatactgtgccagtgaaatgtctttctcataggtaagctctcacgacacaaagtgttcatccagcaggaaggagcactttgagttgaggagggtcttaatttatcaggaaagagttagactatttctggaatgaaatgaatgcagtgttgaaaaaaaatgttagtaagaaaaaattcaactatagtctattttaaacaaagcattaaataatagatctgtgtttaaaacaaaatacatgtgtgtgatagaaatacatgtgggttatgtatgcttgtagtgaaaaataggccacaatgtcttttcaagtgacttcaggcattgttttttaaaggcaaaatctaaattaatatattaatgaaaagcatgcatatcctctgcacttggaggttgtttcattatacatagagggctgttatagctctcttttaaagaaggattgcaagattaaccatatgcaacttaaaaatacatatgagtttatttttttaaatgatttagatattaatacaagttaacagtttatatgtcctagtctcatgacaatcttgaaatctaaacgtgttttttgagacttactcacccaacacactcctggatttgtggtcgtctgggagagtcttctgaggacaacattttttcatgaatagcaaacaaacctccaattatgatatgtcccggagaagtggcagccacaaagtcatcaggggtctggcaaggctgtgaagtagcaagaataatcacaaagcaggtaattagtataattaagaatgccatgtttctatctcatttgctcagttcatgtgagttcttaggaatcattaagtgcacggagtgccagcaagattcctatttcacctgtaaacaccttataaggtataggacagtgtcaaaggccagaaacactcagtattcagatacttgatgatagtcaaaacagttatttcaccaataagaacacaggctttttaacactccagtgttagagataatgtgatagcagtcatgtgatgtaaaagctgatagaattataaacacaagtttcactgtaatggtacttttttactctagtgatatgtcaagggccctgagtcacgttggcatttcttttgaagcagaatgtagaactttcaagaagaagcagtttggaaaagtttttccactttagaaatagacagttctgcattttaaaaaggtatcacattcaaggcacaaataattcaatatagtttatcaggtatttagaaaaaaccatcctgcttttatttttcctgaaaagttctgtttaaaaaatgaaattcagttaaatttaggtatttgtcacttccactttccctgtgttagaaatatgtagcttttgtgaagatgggtaaaactaaaaacaagatgaaacttgtccgatacagtattttgctttgaacaagaaaggtctgttcatagatcattgacatttccactattgtgggtgctatattttaataaatttgggactgatttcaggctacatattcttaagtacttaggattctctgaactaacataatttgttgggtgtcttttggaatttaacagaggatagagaaacctcaataatgtagtcaccattaagaaaaagtttaaagttttaaaatgtatttaataaaatcagtcttttaaaaatgttttattaaaaatgaatatctcatgggcaagcagtttcaaatccaatacatacagtttgtttgatgggtagcagatacatttttttttttttttgagatagagtctcattctgttgcccaggctggagtgcagtggcagatacatttaaagaaatttcaaaaaataaaagagtacaatggccactgtggcattttttcattatccaaattagcattagattccatagtcctatggggttatgacaactgaggagtggagaagtcacagctcatcatgcagcttcaaatgttttattaagtcttaccatttttactaatggcagaattttctattagaatgaaaaccggttaacttcagttgcccagaaagtttaacaaacatacatgagtctgaagactcttgagatgtttagcaattacattttactcatcttaatcttattatttattggtatatatgtgtgtgtatggtatcggatggatttatattttcatgaatttagttattttgctcagataacctcaaaggtcttatgtaattacaagttcaaaaatgattttgggaaaactaaactaaaaaatgggaaatccagataattcccagcaaaattatagtaagtattaagcaactcagagtgattctgaagatacattgttcagatgacatttatttgaaaaatcaatgacaaaaggtatgccaataatgtcttttaggttgcaattttaacaatatttagggtctttgtaatctgatgaaatgtaaacataaggcactttttaaattttaataaatataatctaagtttgaagaactatgtctttaaaggagcctctgaaggtaggaaaacaaaacatctaaaaagacttttgtgctgtaaaatgaagtatcatgtggcagaaagggcccaaactttggaatcggatagacctgggttgctctgcccactacttagctatgtgacactgaatgagttacttaacttctctgaaaaataattttctcatctataaaagagttaagatactctatctaatgaatatgttgtgagataagctggtttgatttgcaaagcttctgtattctggtacgcactgaataattagttcctttcccttctttcccttcccaaaactaaactgaaagttatcatttcctaaatt

SEQ ID NO: 585201 - DNA, 4001 bp, Homo sapiens
gaatagtcttaatctctcaggtgcccacccaccttcccttcttactgggaggaagggtagagctgtctctcaggttataacctctcaggtggaggcctgagccctcagaccctactgcctagtagcttgacaactggtggtgtccccacaagttagggaaaagactcccagccactccttgagatgggtgcctgggatcccccttactgcctcaagctcccatggacctgtgggcggggagttaaatccctgttccatctcgcctgttcccagagtttgaggactttcaccctgtccagttcccagggaaggtgatgtgggagatgaatattgagatttgtgccgtgtctttcagtctctggtacccctgccaagcaagagttgagggcatgcaatgggctgcccagctttgagaccagtggcaaggaagggctggttggggctcaagtctcagcaggtgtgtgtggggggccgggacctttgctcctccattcgacccccaccctgaactctcagcagcaactccaggagctcttgcccccctggagggaggggaggctctgaccgctgggcttccatccgctggcactggaggagtggagggagagggagagctttggtgagggtctgagaggaggaggttcttgagaggatcaagggttggtatggggaggcatataggaaacctgtgaaggcgatggggtgcctagggagaaacaggagtagagccccaaagagaacaggggccaagagaccaggaggcctgggtttgcctcctggggggatgtcttacctggtgactgaggatagtgctgtaaagctgttctctgtcctcgagaggacggagtggggcaggggctaggcttgaggggttttggggggtgtagaaggtggccctctgctcctccaggcggcgggactgggcttcagccaccaggtccagaaggagttcagtctgcagggagagcagggaggccgagcggggtcccagggctggggagaggggtgtggagggctcagagacccagagaggttggcagacaggagccgtgggggagtgtggacagggtgacgtgattagggactttggatcagaggagagggggtgcaatggggaatcccaaggggagtctggaggaggtggggagagggcccacaatggagtgggccttggtaatggggtcaggatgtgggcactagggtcggggctctccctgggtgggtaggggtacctgtgtggcgggtccctggaggaggaggggatggaggagcagatcgccaaggccgagtggtggagtttggagggggccagccttcctcatcctgaggggggccctgatgccaaaatatgtccattctagtcaagcagtggtggttgaagcgggaggagtggacagggggctaggccagtggcccgtttcctctctgtgtgtctctgttcctgcctcagtttgcccaagcctttcaaggcccctgtgtccctacatttctgccccaggtcctctcacctcccttctttcccagtgtcagcctccccaaccccgtgcccagctcacctgctcaccatcctcttcttcctggggtctctcagcctccatcccctagaggggagaaactggtgggggaggggtggctgggatttgggaggagggctggaaccttgggttcctgaggggagtgggggctggaaggggtgggggtgagctgggggctggatgcctgggtactgagcaggaagctgggttcctggtcagcccccccacgggccccgcccatccctgtcaacttcctccattctcttcccacccaaacagcttgttcagtctctctcgccccagggcagcactgagactgggaaaaactcctccagctgcaggagtggagggggctcatggtggggaaggactcctggcggtctcatctccagagcctcagtagtcccctaatccctggctctgctccctccaccccacctcctcttctgctctttctgtcaacacaggaactagctacacaggaagtggtttcactcctcagaatccccctccccccagccaggtcccttccctccctaagatagaccctggtgtaggatttggccctcccgatcttccctcttacttaccgggactgggaggggcatggttccagtgggaagtggaggattcagatccagggatgtggagctctcaaatatatacataaaaccctagcaccgggtccaacacatagtaagtattcaatatatatgtattgaataatcatccctgacctctaggtatttaaaatctattcaggagatggccggctgcggtggctcacacctgtaatcctagcacttcgggaggctgaggcgggtggattgcctgagctcaggagttggagaccagcctggggaacatggtgaaaccccatctttactaaaatacaaaaaattagctgggcgtggccacatgcgcctgtaatcccagctactcaggaggttgaggcaggagaattgcttgaacccgggaggcggaggttgcggtgaactgagattgtgccactgcgctccagcctaggtgacagagcgagactccgtctccaaaataaaataaaataaaaaatacactctattcaggagacaagatgtgtaccaaatagagtacgggaagggttcattttggaaacttatagtttagtgcagacaaggggcaggggaaattttattttgggcataagagatatagatatggaacaatgagaggctgaggtaggaagattgcttgagcccaggaggttgtggctgcagtgagccatttgtgccactgcactccaggctgggcaacagagcaataccctgtttcagaaaaagaaagaaatgaaatgaaattgaaaagggagaggactacctctctggcttggtctttgatcaatgctaatcaggctggttggcatcaaggaaggagcagggcagacaaccatttggtacctctaaatggcaacctgtcatgttagggagtttatagctgagtgatttggaatgtgaaatgtgatgaagagatctggtcctgccgcttattccttgcaatcttgggcagatctctgtgcctcaatttctgagtgaaatagggttttaatagcacctacttcatagggttgatgtattaataatgtaatgaagcacttgatgcatagtgaatacttaataaactgtagatattattggctttcaaaatgcctcatgactccatgtttcaaacctagcaacatattgctgcaaggtggacaaagtttcaagatactctctccatctacttgacttgtggccttaggaatctcctaagtggccataagtaaaagccctaggatgagggacaaagtgtgtgcatcatctagtgcagtggtctcctacctttttggcaccagggaagagtttcgtggaagacaattattccatggtcggtggcgacggagggctggtttcaggatgaaactgttccaccccagatcattaggcattagattcccgtaagaagcgagaaacttagatcccttgcatgcacagttcacaatagggttcgagttcctatgagaatttaatgcttatgctgatctgacaggaggtggagcttgggcagtaatgcttgctcacctcctgctgtgtggcccagttcctaagaggccatggaccagtaccagtctgtggcccaagggttggggacccctgacctagtgtgtgcggtttctcccttggctactagattcttgctttcagataataccctaaattatcatagggcccctaaatatacttattcttgcttttaaactatacttacatcctccatccaatccaaatgctgagccaaaagcacaaaatgctgacattatgcagtcactcccatcttttttcccattcttctccccaattcctccaaaaaaaggtaacacttcaaatcagctttattatgggtgacagatttagggttcttaaatagcgatagcagtggctagaagaa

SEQ ID NO: 585202 - DNA, 4001 bp, Homo sapiens
cactctattcaggagacaagatgtgtaccaaatagagtacgggaagggttcattttggaaacttatagtttagtgcagacaaggggcaggggaaattttattttgggcataagagatatagatatggaacaatgagaggctgaggtaggaagattgcttgagcccaggaggttgtggctgcagtgagccatttgtgccactgcactccaggctgggcaacagagcaataccctgtttcagaaaaagaaagaaatgaaatgaaattgaaaagggagaggactacctctctggcttggtctttgatcaatgctaatcaggctggttggcatcaaggaaggagcagggcagacaaccatttggtacctctaaatggcaacctgtcatgttagggagtttatagctgagtgatttggaatgtgaaatgtgatgaagagatctggtcctgccgcttattccttgcaatcttgggcagatctctgtgcctcaatttctgagtgaaatagggttttaatagcacctacttcatagggttgatgtattaataatgtaatgaagcacttgatgcatagtgaatacttaataaactgtagatattattggctttcaaaatgcctcatgactccatgtttcaaacctagcaacatattgctgcaaggtggacaaagtttcaagatactctctccatctacttgacttgtggccttaggaatctcctaagtggccataagtaaaagccctaggatgagggacaaagtgtgtgcatcatctagtgcagtggtctcctacctttttggcaccagggaagagtttcgtggaagacaattattccatggtcggtggcgacggagggctggtttcaggatgaaactgttccaccccagatcattaggcattagattcccgtaagaagcgagaaacttagatcccttgcatgcacagttcacaatagggttcgagttcctatgagaatttaatgcttatgctgatctgacaggaggtggagcttgggcagtaatgcttgctcacctcctgctgtgtggcccagttcctaagaggccatggaccagtaccagtctgtggcccaagggttggggacccctgacctagtgtgtgcggtttctcccttggctactagattcttgctttcagataataccctaaattatcatagggcccctaaatatacttattcttgcttttaaactatacttacatcctccatccaatccaaatgctgagccaaaagcacaaaatgctgacattatgcagtcactcccatcttttttcccattcttctccccaattcctccaaaaaaaggtaacacttcaaatcagctttattatgggtgacagatttagggttcttaaatagcgatagcagtggctagaagaagcgcttcatccccacagtggagttctttgttgtgaggggagggaatgcaaggagtcatcagcgggggtggcccttggccacttttcagcacctacacagtgcctggcacatagtaggtgcccaataaatatttgtcagccatttgtgggcagtggggacaatggatcataggggcaccctttggaaaccatatataggaaagaacatcttacatcccatatgcctgcaattcttggttccaacttaggggtatttccactccactctgccctcctgtggcctgtcttattttctggaggaggactgggcctgcctcatcctagcatcttaaaccctctttccagagctgcagcttctccacgtggaagatgtctgctctggtgggcatacattcattttaggagagaaactaaactcacaacccttcattttgggggatccatcttaaaaccaggaaggccttccagcctgccttttaatgggtaatcatttttggaattcctccctaccatgtattcttctattttttaccctctcctccttggtttatgggcatttcttggagggctgggggaccacagtcaagttgaggtgatccccgctccggggacggagtaaggcaaggaggcgggatcggaatgttggaggcagaaccgcaagctcccagggccacccaatcacagggccagtcatccgttgagaccctgcctccgcgcccggcagccactccgtatcttcctcgcattatcgcagggttgggccgaggcccgcgcatgcctgcagaaaacctacggccgcgaggggtcgggcctcctcctgctcctactcccgagaggctccggcaatgagaataggccccgcccccccgcgcagccaagtctacggaccaagtccgagcctgcagacaagctccgcccccacgagggcctgctccggctgacagcgtccggcagcgcggcagagccccgcccccatgcgggggcacgcttactgacaccgtccgtgcgcgcgggaagggcccagcctcgcggcccggcgtggctttgtgacgggcctctggtggcccagccccttccagcagcgtcagcagatcccagtggttacgttggtgagcgacgtccgccggcgctagcccagcctggtcccgcagctctcgggctgcccccagccccagcagtagctgggctacttccaccgctccttcccgcgccgccaggaatagcggcgtctgctcctgtacagaagagccagggccgatatcagggaaggccacgcccacaggactgggcctttctgccttcacttgcgcgaccactggcccctatcccttcaggctttgcgggttaccgcactttccatctctcgtgcgcctgactgttttgtgggaagccctctgtcccatctaaccctgttgtcctgggcatctttatcggctccggcctggagaagcgagcgggcggctcgggcgttgttcacggcagcagcccagtgcagcgcagttttccctaggggacgacgtgggaggttgttaccccagttgggggccagacgcctgggttccggtttcccacgggttctggccttgggggaagggctattcgggccggctggtccctcaaaggcgggaagcgttgcccaggagaccaccggcctgcaggaagtgttgccctggtgacgtcaccagtgcgcgggagggacaatggggcattgttctggggtcggtgagaccgggagacagtctccccccacgagattcccccccctttccacagacactgtgttccatgccagttccccagtaagctggagcggagggccagtgtggtgttgagggtgggagttggggggggaaactcacgcggcccgtacttccaccgcatctcagattgaccgccgtaacagcaggatgagagggaatgcccctctgctgcacctatattttgcacgctatctcccaccccatctgctcaacttctctatagcatacatcaccccttcctctacataccccatttatctctggcccccacgtctgcttgggctgcaatcagttcttcaaccaggtcttccaccgccagcctggcagccagcatcaagggtgtggtcccgtcctctgtgcgagcgtccactgcagtttgtctgctacggagcagaagctggggagacagagggccagtgacccctggggtaccttggactgccaactcgagttccttacactattaaccccactcgcaatccatattcagccatcctccgcagtttccctgtcaggttcccaatcacaccaatttcctccttgtcaaactctaggggatgcttctgtccagctttacttgtaagctcgccccattccctgtagggacctcagtgtgtgctaacctggcagacctcccgagcatcagcagccacagcagcatgaaggggtgtgcgccctgcccggtctggctggttggggttggctccagcctcaaggaggcggcgggcagcggttggccgggagaatcgggcagccaggtgcaggggggtctccccagtgcccacggtgtgagcctggggacaggcccctccatccagcagaggttcccagggctcaggacatcccaac

SEQ ID NO: 585203 - DNA, 4001 bp, Homo sapiens
catgaacatattaatatttgagcagacttccatgcaacatttgttaagttccacttaatataaattagccctgcctgaaattctcattgcatgttcttttattaaattcctctacaaggcaggtctcatcttactcctcctctgtctctacccttacagtgttcatgcagtaccccaagtgtaccgatgccacagtgctcaccagcacatgctgatcccttttcttatactggggaagctgccacaaattgctcatggaatacagaatatatatgacaggaatatgaaaaggaagctctatgtccaaaccatccggtgagaaaaaggtggaaaggaactggctggagaaaagagagaagggcattatttgataaggaatgtccagacaaactaggattaaactagacttcctggaaatgcagtagtctagtaaggattttggttgaacatcatctgccccccattcagagaaggagtaatgcaaaacaaagcaaaacaaaacacaacttttttctagtcctgttatcccactgattttatcaccagcatactaggttgtagctactcacttcttactcttgaggaaaaagatatttttctatgcaggtttttacacctttccctaaatttatacatatatacatgcaccagcaaaattgagggatctataaagagaatattgtgtaaaagtatctgtttctatctccatgttacctagtttcaagttaaacatttgcaagaatttgccttttttttttcttttgctactgcaatgacaatcactcacagtcatgttgggtaccagtatgcaaaagcttagagagactctcaatttgaagacttcctttagtccagtttacttctgatattgactgctgtttcaaatttattgaagtccatataacgtgtctcaattatctctagacgcagcttttattaagcaaattctgcagcccagagtctccacactcaattaagcaccacaggtaacataaaaaccatatcaattctcaaaatagaagttcacccaggatgttatctagttaattttagaggcgagggatggggagatgttattagaactgcattttgtagaatgtattatatgcataataattgttattcacccacccataaggtagttactgttacccataaatttacaatgagataacagaggttaatttgtccaaagtcaaaagtggtaacccattatgtaaatgaaagtttgcctttacctaacttcatgattattttctgcctccaagttatcgcattcattattatcctttcctaaactgccccttctgctgccagacacatgtgtcttatcaataaggtaacgagccatgaattgggcatagaactgaggccagaatccaagatgcctgactccaaatccagttgttttagggctctgattttttttttcatgttttatgtttctctgataactctctgattttatccatccttaaaacttccacattcgttttttcctcctcttcaaggggttgttgctgagctgtgtctgagacaagtccactcagcttctcctccaaaccccagtccccacctactctaaagcccatcgctgtcccagcctcagacccagctctgaagcagagactgatgtggccagagaggtctccaggggacctccacctgaagaaggtatggagaccctttcttccctagtcatatggagaccctttcttccctagtcatattcaacgcaaggaatacccatccataggaatgaagaagattcaaggagaaaaaaaagcaaggtttaggggaactggcaaagaagaagaaagcaggagttggagtcttacaagaaggagtggagggcagggtctagaagtaggacagaagagtaactaccatgccctctctgaagctcactcaccttcatcttctcctgcttgggacttgtttgcacaaagcaggctaggagaaggggaagcagatggacgacccttaactgtgtagtcatgactagtgtttgtagattgctagtctgggggcctgaggtctttgcccacctctgcagtcttttggtatcttggcagggacttagcccaagcccccacaggccagtcacagggctgcaaggattcccgacgcatgaggtcggggtgaggatcacagaactcaaaccacatcctgtcccacacacacccccgtgagcactcagcgcttaccactgcaatgaggacctgggactcataagttctgggaaaattataaatgggtgatagcaagccctctgaggtccttaaacacggctgtctgtttttcctcaatgtatggaagtgtctagatgctgatgcaacctcccagtaaagtcactgcaaaagggttggtctagacatttcaaatgttatttctaatattatttgagcttaaaaataaatcaaagaatgggccggccatctaggatctctcaaaaagagttaggaggaaactggctcgaggaggggaaatagtcacaatgtatgcgaaggacagcaaattaatacaaatccttagaaatgatttcaagtgcttatatatcagtaagaaaaaactaccagaccaacagaaaaaaatgggcatgaggcagaaaatcaaatggcatctgtggtaggatacagtgttctctctcaccaataatcaaagaagtataaatacgaaaagacacattccacacttatcagattggcaaaagttaaaaggaatggtgattcccagcctgggctccgtctggtataggagtctcttacacgatgggtgggggaatggcgaatactaatgttgccaactttctggacaataatctgacattctgaatgcagtgctttaaaaaagtaaataacttttaaaaaataatatatttacaaaaattgcaagcattcctcttttttttctattttttttaacttttattttaagttcaggggtacatgtgcaggtgtgttatataggtaaacttgtgtcataggggtttgttctacaaattatttcatcacccaggtattaagcctagtgcccagtagttatttttcctgatcccctccctccttccaccctccaccctctaataggccccagtgtgtgttgttcccctctatgtgtccaggtgctctcatcatttatcctccacttataagtgagaacatgtggtatttggttttctgttccttcattagtttgctaaggataatgccctctagctccatccatgtccctgcaaaggacatgatcttgtttttttttatgactgcatagtattccatggtgcatatgtaccatattttatctagtctattattggtgggcatttaggttgattccatgtctttgctattgtgaatagatagtggcaagtactactcttaatagcctggaagcccagagcccaagaagaatcatggaaatgagacacaagtccctctaaaaataaagttgctttgcctttcaactggtatacaagccccattcattcagcaacagtttccaatgacctctcagtagtcttggctaaaattttagactatatgaattgatgaatgcaggcctggagccccgggaatttctgggtttctcacataaataacatagttaatcactgctgacttcacaggagatggaccaagacattcttcccttttgtctaccatacagttttaatttttggacccctagcactaatatttaattaatcatgctcctaagttcacaatcatttgtccttgcaagtcccctctcttgttttatttattatttatatcctttgcttcccaaactccactttccttcccctcactatcataagtgtatttaatatgtttaatatgcatattatttgtattcttgaacaatttatatattcctcattagattattagctctttaaaattaaaaaaaattagttactcattttttccccctatttggacctgagtttcaaagggttgaattatactcttaaatttatggcatttgtcgtcattagg

SEQ ID NO: 585204 - DNA, 4001 bp, Homo sapiens
ccccatgcagggaaggaattgcctgtgggtgagctactgtgggcagagtggggcaagaaactctttatcatcttctgagtctgttaccacgacacaaggccacagcttctccttcattatccttggagagaaggaggcttgaccaaggggcaagccctttcaagtccatatttctgtacacatctgtgcatatacattagtcacaatatttgggaacattagcctaagaaacccactatgatggagttatcatctatatgcctgcattcgttttgccttcatgacaccttacgtctgagctaaataatttccagcatttgtctttcttgctactataataaaaagtcacacggaaatcaccatgtgagctgtcatttgtatgcctccattttcttgcctttgtgctaccttagctctgggtgcaacaacttccaaagatttggttctcatgaggatgtcactctgtgaaatgagatgcagaatcccacgaaaactgcagactcgaagagctcaatccttcctacccagttttcagttctgctctagtttgcttacatctgtttgaagaagacagaataccctagaacacagcttttaattcacaagatgctattttacatcgagaattccacacccaaccaggcagcagtggctgacatagatctgatgacccttggaggttgtccgttcaagtgatctgttacctttctggaaagtaagtaagtaagctgtcttatggcttgtaataggcaccatcttacacttcatatgaatccagtaacagagattaaagctcaaagcttcaggtgtggagacctgcatgagtatcaaccggaagcattttagaaatgcaaattcctgggctccccctaaaacttactgaatcagaaagtcttgggtggggcccagcaattgtgctttaaccagctatctcttaggtaagctcaagtctgggaatcactgcattatatgataggcattgtacgccaccttttatagaggacagaaaggaactaacaaaagatatataattggcatatggccaccactgaggctgcttttgaataaattcatctgattttaaagttaaaatttgcgggtgcctcaggtgatctgctcagtccgcatcctaagacatatatacacatctttcacaggggtgactatggacatccagtggggggacttttctaaatggcatcaggagatttgggagcaacaccaagatctgagaacaaagcctactctgagctgagctttgtctctacctcacctcatgaccttccctaaaattaatattagtggacaaccatattggccttatgcattttatttttctaggggtgtggtggtggggagctcctctttctgtgacctagaaactcctagtgcagatcgcaagcccagattctctcacctctccctctgggtttctggctgagcagcctctccaggagtaaccagggcagcctccctgtcaatccatttgcgacttcatgcctcatttgttgggatccacagcgctactccaagttatggaccagcatgaaggggacaggctctaggctatcaaggggccaccagggggaagtggcaaaggggaatgtgctgaggcagccccccaaccccactccacatacattcagttcaaagagctactaggtgcagaggaaaagatgcaagtaagagacagtggatttagggagagcctgctaaggatagcaatgtcaggatttgtgaagaagggctgggaatgcagatcttgtccttcgaaaggggagagtagagaactccttgcaactctggcagccaggttggtcatcacgtgctggaatcagctcggatcccctgccccatgctcaccttcctattttgaggctttagggtctgctgagcaaagccaaccaggaaaaacaggacaagacaggaggcctggaactgctggaacatggctaggagttttagacgactctgaggtccccaggatttcagccccttttgagcccctggcagggaccaatttgaagaagcaccctccaatcgcagagtggcattcatacacacccacctccactccctacacacacccccttcctcttcagttgtaaacccctcaccatcgagcctgctccacctgcgttgcctctgccagcttcacacaaaaggcattctctgcctcttgaaactaaagtctgggtggggttgagttcttatgaactctcttgaaagacaagcttttagttatctcagatttctgaactcttttcaaaagcctataatctatgtcctgatcactgatacctgatccagctatgcagctccttaaggcagcaggtcagatgcttgcctcttatggaacagacctacacacattcccaagttctttacccttctcctgcttttagctcaaaaaaatggctgaaactttgactacgaggctataaagaccattgaattcaatacctgtcagtgccactgactagctccttgaatctgaaatcaaagttaatgtgtctgtccccagttttctcatctgtgaaatcagaataataatattatctaccttgtagggctgctgtaacaattaaatgtgataataactataaagcacttaccacatggcctgacaatggtaaacaactagaactgtattcacatagtttcatgtatgagaaaactgaagctcagagagagagataacatataaaaagtcacaaggtgggtaacagtgaaatgaaggcaacttctgcgtcctactccagagctcttgctctggttccatttggatcataattactgtgatgaaatctttactatctgggacaatttacatttgctcaccttgtagtaatgagcccttgagaggtaaggagacatttcattatggacctcatcagtaggtcaaatggcctaaaaccccaacttcataggttttggtgttcccacattcttgatagacttttgagtaccttgggtccttgcctccagcaatgagaagtgaaggtacaggagcacacatggaacaggaggaaacaaggaacatttcatgtccctggtgcacctgaaggtatcatggggctgcaattgcccttcacccatccttctttggagccttagttccctgttatctccttccaggaattttgctttcatcccttagctatctcctcacttccaggatcttctccagtccctgtttccttcacactctgcctctatgacttttctaaaggtcaggtttgttgatatcacttatgttaaagtgccccaattcctcctaaattcttacacttttagtttgaaattctcccatgaagcactcaaggtcctttctgatttgacatcggccagatttccctgatgtaaccttccctccagaaatgttctgattctggtagatagaactgtcttcatcaccagagtccacctatctggggttgactctagatcaaatcttggcaagtactttgggatcattcctgagatattttatgatatacaaattacatatttttattcaaaatgatggatatagctttatcaaacaagacttctgaggtaactttctgagacttgagtcacaaatcagggttctggtgagcttgaccacgccttaatatatattaggagccagttcacatcctcaccctcctccttagaatttggcttgatttattaatttacattttaaaacctattctgtccacagatagaaacattatttcaggtctgatttcatcaatcaagagcatactctttagatactaatcagtagagtccaagatggcattattttctctagtatctttgaaacattattggttcacttattttagtttttaatttttattggttcacttttaacttaaggtcaaataaacatcaaagtttatatgaattgcccctgcaatgctggtgcctattattgtctatccacccaagcaattgatcttttaaatctgaattctatcatctatcagactagctatatttatcatcta

SEQ ID NO: 585205 - DNA, 4001 bp, Homo sapiens
acacacacatttccaatggtatacggacctgtttaatcctgtccacagaaacaatcattcctgtggatgcttgttgctaagagcaacgtgcttaagtaccatctaaaggcatgaaaaaagcatgaaaactactacagtgggaatccagctataacccagtgcctcttttatcatcagcaggctttttgactgtgggcatctatgtgtatgtgtggtcggtgaggttccctttttgaatgtatgtgaaacatccctacctttgttctacaaagcctaggagagatggtgaattttatcattggggggataaaacacacacatggtaaaatggaaagacaggagatgctgttggcatgatagaagatgcaggcaatcactcttcagtttaaatttgaccgagtgacttaatgtgtctgcttttatctcaaagacagatgctcaggattacatggtgtcctgcactctttggtctgaatccacttgaactgtcagaggaagtgcctacaatgggagcatttatcctgttggctttctcctttcttcctcttatctgctttagggaactttccctgactagttctgctcctactaaaactcctttggccatccagagaacctgagcatcgcccacgcttcattttctccaagcaatcactctgaccctctgaccagggtttccactggaatcccacgtttagattttccttcaagctccaaagaaaccctgattcttagaaaagcaatacatttccataaaaaaatgtaactacctaacgtctttcgtcttgccaaagtgaaagatgcagacttagtcaaccctccttaaacaactactcttccccaccgccccagatactatccttcattaattagtccataacgtccagaaagctgtgagagggggactcagcaagttaaaaacaaacaaaatgccgttctaattttgacgctatttcgttccagctaagtagcagcctccctgtgttaagtagaacctcgaatcttagaacattttttaaagctctgcatcccagtaagggcaccagggactggaaaagcggtgaaaacaatcgaaaaggctctctggaaaaagaaatcaaaagggttagtacctttcatttgcacgtgagaactgccctggtcactggcggaagcggacaggcgcaactcgccaaagagttaccaggtgttaactcaccagccccgcaagctgagaggcgtgcagccccggcgcgcacttttgcgcggaccgcgcacccctccaagctcgcagggcgccgggggagacaggcgggagtggcggctgaccgtgcctccatcgtcatcatcatctccgtggcaagctactgtggggaggtaatgcagagaccactaccacacattggccctcccttcaccctcccgcggctaaaaataaaaataaagaagagaagaaatgaaagcacaaggagttctttaaaagccccaggagacgacagagcagtgagcagatcagaatccacggagcccaccgccaggcagagcgaaccgcctgtttacatccggctgcctgggagcggataccaggcaaccaagagagatggggaatcttaccaaatcttaatacatgtgtggttccttgagaatatccaatccacagtaaacagagcaggagtttaacggtgcgcctgaagactggattacttagaatcgggaaaataatcttcatggtgtttctgtgcccacacgcacggcacccacttccccgatctagcgttcggctcctgggttcgggtagaaatgaggatgcgtcgagtggtgaccgcagacacgatcacggcatggtcatagagagaggaaggagtctccgcttcccaaacccattagcaatcgctgcatgttcttcactcactgcgccaaggaacaaccttccactgcaaggaatggtgggacatccatgttagtcggagagcatccgggagaaatccagcacgcacacccacaatgtccggccgcgcgagcctgtgaaagcagaggaggagggaaatcagtaggaaacccagccttggtaacggacgagatgtcgatagcgagccacagcccggcacaaaaggcgctttgctagcaaaggttttgccaggccctattctactgcactgctgcacagcttctgacgtgaagccaagattaagtgagaaagactgagatagctgctctcctcttaaggctcccggccagtgagctccccaatatctattatgcaaccgatctgacagcccgccttgagttgcaagaaagaagtaggatttatttatggggagaacattgcttttattttccatgagtatttgctgagagaatgactggtgtatgtaagcggacttcttacaatcaactgatgaatttcattaaattactagctaaatcaaagtcagtttgtctgggaactgtaaaaaagaaagtgatctaagacggaggaatttactgcaaatctaacttgtggttagattgaaagagtcttatttatacttttattttgaccaggaatgaatatagattggaatgcaattggagaggtaaacccactctttaaaaacttgactggggtattccttgattgctacccagaagtaggagaaatttcttcagtgaacttttatgggagaaatctcaaattaaaatggagaagttaaattttccacccattttttaagctcaaagaaaataattgtgcatatataaaaacaatgatgtttgaatgggtgcagcaaactctaaagccttcaataatttatgcccaaatttcttcgtattttggttttttgaacattctttttcctaaagaggcagaatatgagatcatagcatgagcgacattgagtgttacagattcctctaaaactgtcttatcatttgctagttttctggtaggaatatttagagtcactaggtagtgactctcttggctttcgttaggagtttattcaagaaataaagtacagaaatagaatttctttcaacataaaaatacatttttattattaaaataagtaatattctgtctatttattaaaaatatacaattttaatattttacactaagtaaaactaacttgtataataaatatatattgtcaacatttttaaaagattaaacatcacaaaaggcaaactgttggacctatatcttatcattaatctatttttcataaccaactaacagggcataggttaaatctcacaaaaaaatatcctatctgaaggctaatttttaaataaggagtgatatgagtgatatgaatattcgacttgctattttttcctccaaacagcaagaaaacactgtaatgttttcatttccttacagcgattttttaatttaaattttcttaagatattataaagtgctaatttaaagagaaatctacattttgcaaaggcattaagtggcattgattttttttaagatggaggcaataactgcagtgtcaaaaataagtatcatgaatggctagttctgcagtatagcaggcaattcaatcaaataattcgactgttcgagcaccttaaaaggaacacctagtgctaaaaccaagggtatctagcgactccttcagtccatgtttaaaatatctcttataaaacacatacacagcccaacacgttctgtcttctatttgctgtctcatttattccattctgtttgttcattttctttttgatcctagcagagataataatgactgccaggggaaaaaaataatccttcacatttttatctgccaatataactgatatctactacctgaaaatagcatgttttattgtgactaatcaaaatactgaaatttcacagtgtagctggcatttattggaacctgagaaaacaaaatgtaccacatctctttgttcatgtattccattaatataatgacattttacattatggttgcaacttttgcacttgaaactagtattctaaactatttattttggggggttatttggatgtctagttggaa

SEQ ID NO: 585206 - DNA, 4001 bp, Homo sapiens
atccccttttattaaaaaatgtatataacctaaggtgaagagagtctagaaaatctttatataaaaaatttttgaaaattcacatccataagtctctggaaaaatcaaagcttttaaccttaggttaatctattgcattttagaaagacattataaacctaatatctgctatccattcattagtattttataactgatctaactttaattctaatatgtaagttcattgtgttagaagaaaaaagactagaaaccaaaactcaaatccaagtggtcaccagtgttatttctcataaaacaagataattcttgggggagtgagggaatctggatgattttagcctataaagtaagaagaaaatacattatttaaattacttactttttctttgtaactaaggtactccagaagtaaaaatataagtttctgatatactgagggagatgactgcattaatcctacattcacaggaaagttttggatatgtaagaaggggtacaagaggacaaagaaaatcttcaactgttaaagaaagataaagctttgaagtcctatttgtggaatagtaacttctttttgccaatcactcacactgaattaactcattacacctggaaagtcatagccagtcactgaagggcaatataacaccttggacaaataagccttccaaacgcaaactcaaaatatgagggcaaacaagtattcaagtcaaatctactgctggacactttgcatggaaagtttgataccctttcagctcctattatcctcagatattctatggggtacaattttcctacactataattgtaaggaaatgaggataaaaggcaatgcctgggtgggcagtactgagaagggtaaactccgttccccacagtgctagaaataaacaggaacaatactatgatcccaggagcacatcatgcattgccctgactttctcagtacccttctttcccaaatataatgcctaccttccgtgtggactgcagagacataggtccaattgtaacgtttgactatgtcaagcatggcccttgcctgcaaagtgtcagaagggacaaccctcaggaagtatttgtacaaagttttgtcactcaggtcgatgcttgtggctgaataagcgatctgggggatgtcgaagagctggagcaggttctgcacttgaatggctacagagctggagccgggaccgatcactcccgcaatgggcttcttagtcctgcctggggggagggactggccgtcaggcagacaccggttgatcccatccttctcatctcgaatggaaatcagagagtccctaatgaactcaatgctctgttccagagccacggaagagtgccagcaggagtcccggatctcactgcccagggtgatgttgggcaggaggaccgggtccgcgttgatcttatccaacgtgtggaacatggcctccaccctctggatgccatactgctccctgatctccccacacttcctctcgggcactttctcggccggaggctggtgatggactgagaagagggctccaatgatgacatctccgtccattctggccaccgagcgctgagacgacgctcctgccagcaacactttcctgccggggcttctggggagaagggacacctccaaaaagatcgctgggaaaaaaaacaaaaggagcccgaccatggtggtgaggacgaggtccacagcctgccagccgcgttcccacgctggtcccgctgcaggctcccggcgcgcacccccaagacgcccagcgccgcctctcccggagtggtgcccctcgccaacaatggtcgtccaaggcctttgcctcctccaccaccgcctccttccccttcgtctcctcctctgggtcctccacgaccgcctctacaagctggaggcgtttgtaagggaattcgagtccccgttcttcaccggtagtgcatcaaggtaaattgatcaagagtacagtggaagtcgtgttggcagcggtgagctagatgctgctgacaaaagacagagaaaaatcacaaccttgtcatcagaggacctgtgttaaaactctggggtctataatgttaacagttgccttgtccgtttcatttcggcacatcctgatatcggctgcaggaacagcttggagcgcagctgtggtcactgaggaaggcggggtgtcctgccccctctgtcctcacgggtccaggcggcgcagagccccgccaactcgcccgctcctccaaccttaagtcgtttcctggtcccctaaaacctatcatgctttctaacttggagggcggtggggaaggtgagcagagaggaggggaggagctaggtccttcaacccaagagaactttccggattggaaaagatcaactttttttcagaagaaaatttggaaactcattgtaaaggtggaagcgcgactttaaaataaacgtaaacaaaggatgcaccttttactttaattttgaggggttgaagaagccctgacataaaatcagctgtaaatataaatttgccagcttgaagaaaatccacattagttactaaggcaacgcctggtaaagtctccgtatggaggagtttggtatgtttcccccgtaagaagtcaggcttgctgtgtatgttcaagaagaaggggtgcagataaggtaacttgtttcccgcggtgggtggacgggttagggggggtcctgcgcttgctttggggtttgcatagttgctagaaagggaacggaggggagcttccgggttgctctcgccgcggcagcctgagccctgccgccttcaggaccctggacagtgctcggtccagccagacattccctggcagggcctgcaagggacgctttgaccagtgagttgcaattccctgacccgctttgctctttcaacctccctcctctgagttctttacccatacacacacacacacacacacacacacacacacacacacacacacactcccttccactcgagtccccaccgcccctccgccctcattctcatcaccttgcaccgcttgtgcaggtatatatccaaacccacccgcttggggacagaggcgccaaatctcagccgcctgcggggctgaagttggctccctctcccgttcctcccctgctccttttctcaaggtgagagtcgacgaaaagggggctatgggagcgggcgaggagagcacaggaggtgaggcagaaaaaggagaaagaaaacccaggcacccattggtcccgactcttcctgaggatacaggacgaaaagaaatacataagcgagaatgcgcctgggacccggaggaaaatctgatagactgggactttgtctgccgttgtgggtgggtttcaccggaggaagtgtccgctcacctgagtctgtttggaggacatggacttgagacatacctgagtacctgagtcggggtagacagcgctatggtcccggggccagaggaccgtggccacgctcggcttgcagacgcctcagctctaatccagacggtgcaaggatgcgatctgggctgtacactagtgccctctttcttcagcactattttaccgcaagggaaaaagagggggagggaagaaaaaaaaaaacaggtcacccaaggcttgtctattatctcatgtataaaaatcagtcgtttgatagagggaggaggggagacaaactaggaggaagtggggaatattaattcctttactatatgaggggtcgtatagaagctgccagatacgtgaatagtcagacaatctggccaaagaagtggagaactgcctaggctgctttggggtagatatctttgtatatatatctcagggactcaaatatattttctctttctgcgagtaaagtccctacagagggaaacagagtgtaaacacatgtacagacatctaaagaaaggctctattagtagattgcaagggaaatcaggaagaggctgcatagggtgggagaagggaaaggacaggcatgcccattatgaattaaggtatg

SEQ ID NO: 585207 - DNA, 4001 bp, Homo sapiens
tcttatccaacgtgtggaacatggcctccaccctctggatgccatactgctccctgatctccccacacttcctctcgggcactttctcggccggaggctggtgatggactgagaagagggctccaatgatgacatctccgtccattctggccaccgagcgctgagacgacgctcctgccagcaacactttcctgccggggcttctggggagaagggacacctccaaaaagatcgctgggaaaaaaaacaaaaggagcccgaccatggtggtgaggacgaggtccacagcctgccagccgcgttcccacgctggtcccgctgcaggctcccggcgcgcacccccaagacgcccagcgccgcctctcccggagtggtgcccctcgccaacaatggtcgtccaaggcctttgcctcctccaccaccgcctccttccccttcgtctcctcctctgggtcctccacgaccgcctctacaagctggaggcgtttgtaagggaattcgagtccccgttcttcaccggtagtgcatcaaggtaaattgatcaagagtacagtggaagtcgtgttggcagcggtgagctagatgctgctgacaaaagacagagaaaaatcacaaccttgtcatcagaggacctgtgttaaaactctggggtctataatgttaacagttgccttgtccgtttcatttcggcacatcctgatatcggctgcaggaacagcttggagcgcagctgtggtcactgaggaaggcggggtgtcctgccccctctgtcctcacgggtccaggcggcgcagagccccgccaactcgcccgctcctccaaccttaagtcgtttcctggtcccctaaaacctatcatgctttctaacttggagggcggtggggaaggtgagcagagaggaggggaggagctaggtccttcaacccaagagaactttccggattggaaaagatcaactttttttcagaagaaaatttggaaactcattgtaaaggtggaagcgcgactttaaaataaacgtaaacaaaggatgcaccttttactttaattttgaggggttgaagaagccctgacataaaatcagctgtaaatataaatttgccagcttgaagaaaatccacattagttactaaggcaacgcctggtaaagtctccgtatggaggagtttggtatgtttcccccgtaagaagtcaggcttgctgtgtatgttcaagaagaaggggtgcagataaggtaacttgtttcccgcggtgggtggacgggttagggggggtcctgcgcttgctttggggtttgcatagttgctagaaagggaacggaggggagcttccgggttgctctcgccgcggcagcctgagccctgccgccttcaggaccctggacagtgctcggtccagccagacattccctggcagggcctgcaagggacgctttgaccagtgagttgcaattccctgacccgctttgctctttcaacctccctcctctgagttctttacccatacacacacacacacacacacacacacacacacacacacacacacactcccttccactcgagtccccaccgcccctccgccctcattctcatcaccttgcaccgcttgtgcaggtatatatccaaacccacccgcttggggacagaggcgccaaatctcagccgcctgcggggctgaagttggctccctctcccgttcctcccctgctccttttctcaaggtgagagtcgacgaaaagggggctatgggagcgggcgaggagagcacaggaggtgaggcagaaaaaggagaaagaaaacccaggcacccattggtcccgactcttcctgaggatacaggacgaaaagaaatacataagcgagaatgcgcctgggacccggaggaaaatctgatagactgggactttgtctgccgttgtgggtgggtttcaccggaggaagtgtccgctcacctgagtctgtttggaggacatggacttgagacatacctgagtacctgagtcggggtagacagcgctatggtcccggggccagaggaccgtggccacgctcggcttgcagacgcctcagctctaatccagacggtgcaaggatgcgatctgggctgtacactagtgccctctttcttcagcactattttaccgcaagggaaaaagagggggagggaagaaaaaaaaaaacaggtcacccaaggcttgtctattatctcatgtataaaaatcagtcgtttgatagagggaggaggggagacaaactaggaggaagtggggaatattaattcctttactatatgaggggtcgtatagaagctgccagatacgtgaatagtcagacaatctggccaaagaagtggagaactgcctaggctgctttggggtagatatctttgtatatatatctcagggactcaaatatattttctctttctgcgagtaaagtccctacagagggaaacagagtgtaaacacatgtacagacatctaaagaaaggctctattagtagattgcaagggaaatcaggaagaggctgcatagggtgggagaagggaaaggacaggcatgcccattatgaattaaggtatgccaaatgaagagagacatattgtggctgcattttcaggtcaagatgtaactaaattgagaatgagagtcaggtcacatgaaaatactggagtgacaaatacttatccaaattcctcccaggcggccatcaccttccctacaggtctatggtgttgcttctgactgtgtgaaaagcggaagttaaatcacattcctctgggaacatgttggctgagcagaatgtggcccggctttttcaggggaaaagacaagtgacagtgtgtctttctactcttgttcaaagctttctatttgtgtcatctgcagagcagagagatcagcttacgttggtcccttatgggtcagcttataatcgccttgctcaggtcattattatattatggaatggtgccatgtcagactggaggggacaaaccacatgaggcagtttcaaatactcttcagtgtgttccatgaaacttaggaaggaaaacaatacctctagtcaataacaaaaggtctttctcattctggttctgatctttttttccctaagtgtcagagttttctggattttttttttttagacagcccaaagagaatatatttttttctttttccacaaataatgcactaaacaacgttcacattttttagactaaatgatctcaattcgggaagtagccacatgtttacataaggaaaatgggaagaggtaagttctgatcatcacatatgggactaaatggctctctgcttctaccctaggaatatgtctgttcgaagaacagcaagccacaggtatgcacagagtcccatagtatctgacttcctctagtagccacttaagttcaattttagataagcccattagagtgtgataagctctaaatgttactttcctagaatattccagagatatagtgaatgtgcaaagatttctgtgcatatataccccttaattatgattttcagcattaaagaaagtaatgtctctgaagtccacatttagtgtcaatatgtgctcctaaagctgaacatctttaatatatcacattgctgtactgaaggaataattaaatgttcagatttattggttctcaaattcattttacagtccaagtaaaaactacacattcaggctggctgaaactaatcattttaaagacgatgaatttgaggattataacatgccagatgcatgcatatacaaaaagtgttaaagaaaaaaaatttcaaatgtattaatttgaaatgatcaattaaatttattgataattatttaagagctaactatagaaggtaccaggacaaaaacaatcaaagaagaaggcattgagacaaaagaagacaagatcacccaaatatactttctctttctataaatgaagacttcacataggaggcagggtataatacatgtgcagacatctaagg

SEQ ID NO: 585208 - DNA, 4001 bp, Homo sapiens
aggggcagggggcgctcgtacgttcgggcctcaggactccctgccgccgccgatgctgctgccccatctcagcacaaacagcctcagaccgccctggtgcgggggcgcctctcgcagtcgaggcctccacctcccggccccgcccccgcgcggggaggagacgcctcccacctgcgagcgccggggaagaccgaccccggagcggggacccccagcacacacgcgcgtacacacatgcacacacagagaccactgccggtccgctcgcccggcggccgcgtagacgcgcaggttcatcacggtcccggggagggacggtcccgagtgtccggagagagcctgaccctgaagtcctggggctgcagggagaccccagaccctagagacccccacaacctgccgaggccacgggcaagcggttgccgggctccggccgctggcgaaggcggcgctggggcgggcacgggagctggacgcggtgcctgggaaaggagccgaggcgcgcgaggctgggtgccctcccgccgggagactgccgggaagaggtgcaaataatgccccgcgcccccgcctgtcccgcctctccgcagaccgggatgcgctaatgccgccgcccccacctgaaagctggcacgaccctccatccggtggaagcccctgtatacagagacagtactttccaccgggcccgcaaaaaagcctctgccccattccctccctcaggggcacccggaaagcctgccttagccccgaggggagaccctctagttcagatcccgcgccctccggcccctagggctccgggggcgccagctctcctcggagcactccaagcgcgggagctcgccggaggccacctccccgagccccgatgtccccgccgcagccctcgccccaggaggccggagggcacggtcccctctgtcggtccccctcgggccacaactcaccgcgcgccagcaaggtttaagccgcggcgaggggtcggctgcgtgccggcctgccccgggggcgcaggcagtcgacggccggaggcacggttctcgcggtgcccagagcccgggccgcggcgggcagcgctgacgctgcggacccagcgcgccgcggagccgcccggagtccgggacgcagcagggatgagctggcggccgcccggccggagccgccgccaagcgcgcggcgttcggctgctgctccggcaagcgagcaagcgagagggagatcggcggcaacccctgctcctgctgcggcggagcccggcgtccgagccggaaggagcgggagaggcggcaagaggagctgggtctggccgagagctccgggctgggaagggagcggagcgggagcgaccagcgagcgcagccggccgaggtacgggcgcctggcggcgccgcaacagcggcaacagcagcaggaaaaaaaatgagagcgagctagagagcgcgctggagagcgagcgagagagggagcgagagacgagagagcgaggaaggcgctgagaggggaggctgcgggagagggcgggagagccgggaagcgcaagggggcgagggggccgcagccgcttgccccggcgcccacagccgctgctgcacccgaggaggcacgagaccaatccggcaagtttgcgctgaaagtgcgggccaagctcacggcgcttctgccggccttttaaagagagagcacctggagcccaccccctaccccacacctccacctccggaaggccagggctctcgcggcgctccgccacccctccacacccgccctgctggcagctcccccttccaccacaccccaccggcgccctcttccggaagccccccccttcctcctccccgtgcgcgtgccagctcacctaccccgaggacatggcggggaccccttctcaccccagagggggagggtcaggaacatagcctccctaacacacacccagaaaagtacagcaaagcacagggacgcagaggggcgcgctactcccaccctggtgcgtcactggaacctcacacatccgcgcgcacgtggcgtatgcccccatgtggcatgttcatttgcacaccccactgctcctgattcaagtatataacaaggggagaaactgaggcccagtgaggtgactccacttgccccagatctcacagcctgtccaggggacactttccacagagcccccttaccacctcaaaaccccaccaggctagggaaacaccccacccgctggtctccctccagcactggatggcaaaagtgtaacaggtggcctcctggtcggcaggctgcagtgagactcgggaagaatcccttagccaaccataaagccagctcgcccccttcccagagggggcttgaaaactctcaggagagtgttgctagaggcaggcagcgtggaagtgagggagccacgcagccctcttaggattgcaagagcatctcaccccagactgcagaagcggcttcaattagagccgtgatgtgtgactgtccttgtcctggggagggagcacaacactgtgccagagagctgggggaagaaggtggcaggcagcagagctggagaggttggccagaggcctccctccccatcagtacctcgacccccggctgacctgccaagtgctaccttgtgcttgacgatgcccaggcctggcaggactcggccaaccctaatttctacaggggaaattaggtgaggggaatgtctgggagggtctgggaataacagggacagacccccatcccttgcaactggactgccctttctccctccttgcccttttccatgctcctgccctttcctgaagacctgcttaggctccacctcctccagatctccagactatgctaggccaaaaccacatctcgttcagcatcatttggccatggagcctggcaccatgcctgaacggtagcgtaagctcaaggaatgtttggtgagtgaataaatgttggcaaagcttgcactctctttgctgtcacatgtaatgacccaaatacatgtctcatttacccaatcggtctgaagtctctgagggaagcacccagattgttcattcattcatgcttttattttttttaatgcaaacaacactgactgaggtcctgctccattcccagctctaggtgtaaacacacgactgaacgcagttctgcccttgaggagtgcaccccgtggccattcggacctcagcaccacacattttgtagagatataagcaaaggccttgaaagttcctgctgcccagcagctctgcccagccaagtgtgcactgctctgggcttgcagggaactcaagttattcctggagaggcagtgttcttgggaacagcctgcctgggttcaaacccgcctgtgtcacatgtgcatgtctgggtcacattgctcaaggtcctcagtttcctatctgtagaacaaggattacgacactaatctcaaagcagaactgcaggtatggggtgtgcatcgttcactgccaagaggccacccagttgagggggctcaggacagctcaaattcaccctgccttggtcttgacaagtgacacatcctgacttgtggctgtgtctgcccaaaagatgggtttcctttttctgatcttctcagaggtaccatatgggctagtgactggggccctacttacaaggtgttcataaaaacagaatgaaataatgtatgcccagcacctagtactgtatttaggcggctgtaagtgggagccactgaaatttttaacacagaacagaatcctcaatatacttttgttgaatgaatgaatgaatgaatgaatgaatgaactaattaaagtgaagataacatgggccatggtttattgagagataaaacaaacccagccactctccccaccccctgcccctcagtgttgctttcactctggccataattatcccaccccccgccccccaccagctgtgtcgcagaaggctgggcaggctatatttttcaggggttaaaaaaagaaacactgttggctggcagatgg

SEQ ID NO: 585209 - DNA, 4001 bp, Homo sapiens
cacctgtaatcctagcactttgggaggctgaggtgggcggatcacctgaggtcaggagttcaagaccagcctgaccaacatggtgaaaccccgtttctactaaaaatacaaaagttagccaggtgtgaaccccgtttctactaaaaatacaaaagttagccaggcgtggtggcacatgcctgtaatcccggctactggggaggctgaggcatgagaatcacttgaacctgggaggcagagattgcaatgaaccaagatcactccactgcactccaacctgacaacagagtgagactctgtctcaaaaaaaaaaaaaaaaagttgaagccaggaaagaccccctgtattcctgggaggccagcgccaggtccaggaccacatggggtgtttgggactgtctgtgggtgcgggctgaccctggcacagcactctcccaagtgtcacgctctgtgttaaaggctaggctctttccacagccacattcagccgtattcagcctgggctgtgacattccccactgcgtgggcacttgacctctccagcccaggtttcctcattggtaaggagaggaagataaagcccacagctcaggctgctgcgatggccctgtgagatggtgagcacggctccccgcacacacctcccctcaccgcggtcctgctccccgaccccagcccagcccagcccctgggccctctcgttctcacctctgtggccaaattaccttctcttcggcacccaaaagccccctcctcaactttcaaggcccagcttaagcagcacccctagtccagaattccgaggcatcccgctcactggtctgccttcccagaccggaaggaatgtgtcccttcccaccccatttctttggtccagctggtttacagtccttgggcaacaaatgtgacatgggtgggtggtcggatggacagacagatgggaggttagatggacggatggtcctgactacacacacacacacacacacacacacacacacacacactcttagacttcaggaagctcgtgggaaatgcgggacaaaaagcagcagcaggagggcagggagacagacacgtgggggggagtcggcaccccggcccggctctctgtgcccgcagaagggagtgccactgccccgggcaggccccttgcgccggcctcctcaggatggagggccagttcagccaccccagaaacgcggcaagatcgctgagaagaacgtgaggagcctcgattcccgcgcgcccgagcgcgagcctagcgccccaccagccaggctccccatcgcgggccagcaccgccgcccggtggccgaacgccctcattgcacccagcggccgggcctggggcgggtccgagcgggacccaggcccagtctacgcctcccacagtgctgggcacctccccgtcccacgcccggggacacgcccggattgagaggcttgtttttcacctgagcagattccggaaggaggcagcgggggcggcgggggtctatttcagggctgcttcccagctgggcggccgccccctcggattcgtgcgcggccaggctcacctgctctcctggcagggaggggcctcttgtgcgcacccacacacaccggcaaaatccaaaggacctgggcgggaggcggcaggtgaggtttccttggtgggaggaaggtggggtacaggggtggggtgcgatgcagaggcgtagaggggagcaaggaggggcgcgccagccgcaggaagctgcaactccaggctcccaagccggcatcctcccactctcagcatctcctgagctccctctgtgtgacaggccggcggttcgcaacctcgacgcacattggagttacctagagagctttaaaatttccctgtgtccaggccgcatcccaaaccaattaaaatctgtttttttgttttgggacagacagggtctcgccatgttgcccaggctggtcttgaattcctgggctcaagcgatcctccagcaaagcgctgggattacggacaggagctgcggcgccggcctaaaccagattgtgtgcgggaggacccaggctccagctatcccagaagatgccaggtgcagccacgcctgagacctccatgccaggcattacaggcgctgccaggcattataggcacagcgtcggcagactctggcagggggtagcccctttcatcttcatcacagccccagaggtacatagggcgttctctatcttcagaagctaagagaacttagccaggagttgggcttcaaccccctacgcccagccctgtgccatgtctgtccaggcaaactaaagccccatatgctgagagagattgtcactaacatgtgtcattacctgtgcaatattttaatatttttactaataatacagccatgtcctgccaggggcccaagcgctgaggacagagggacagagtggagagccagggcaggcaggcactccatgaaaagagctattttaggccgggtgcggtggctcatgcctgtaatcccaacactttgggaggccgaggagggtggatcatctgaggtcaggagtttgagaccagcctggccagcttggcgaaaccccgtctctactaaaaatacaaaaattaactaggcgcgtagtcccagcttctcaggaggctgaggcaggagaatcgctaaatccaggagatggaggttgcagtgagccaagattgcgccattgcactccagcctgggcgacagagcgagactccatctaagaaagaaagaaagagagaaagagagagagaaagaaagagagaaagaaaggaagaaaagaaaagagctattttaaaagttaaaagtgcaaatgtcaaggagtgtgtgggtagggagaggtgtgtgagtttcacacactggagccaactgaagctcaagtgctcccaggccccaccctctcaggcaaagtgggggagagggccctggggcctctgccctattccaggtccgttaacagaccgggatgtgaaaactgcagcactaacagctgtgtattgtcaccatctgccccatttgaaagacaaagggactgagtgggagatgtgaagtggtttgtccaagggcactggatgaatctccaagtcccgtcacttccaactccaaaacatattctgcatctacacatccacatggggggaactcagaggtaatgttgagcaaaagaagccagactcaagcagacatgcacaaactctatgtgattccatttctacaaagtataaaaaccggcctatagtgagagaagtcagaatattggttacctttgaagtgggtagagaccaaaagggacatgcaggggcccctgggggcttcttccttcacctgggtgctgttctgtccttcacctgggtgctgatgacatgggtgtgttcactctgaaagtgttttgtttcaataaatacatggagggggtgcagtggctcatgcctgtaatcccaacactttaggaggccaaggcaggaggatcgcttgagcccagaagtttgagaccagcctgagaaacataagaagaccctgtctctacaaaaaataaacaataaaaaaaaatagccaggtatggtggtatgtgcttgtggtcacagctactcaggaggctgaggtgggaggatcactggaacacaggacgttgaggctgccgtgagctgagattgcaccactgcactccaccctgggtgacagagtgagaccatgtctgtaaataaataaataaaggaattccaaaggtgtccagttcccagaaatgcccctgcactcgggatggcttgaaacaggagctccaagcatctccacctctccctccagctcacctccgcctcgccctgcaatccagcctcatccaggtggcaggaagtacgctgctgcatctaggattcttcagctgcaaacagcaggatgcctctggccaatttaagcaataaatgtaaaaattgtaaaagaaaataacaggaactgacttgacaacacacgtgtaacttgctga

SEQ ID NO: 585210 - DNA, 4001 bp, Homo sapiens
cctgtattgaggatctgcttccgccatctcctggctgcccaccgaggtcccctgctcacgaaggcactggcaccagccccccatccctgcctctcacctcccgtcctgtaccggtgcacctcgaggtcccctcccaggtagagtgcctgcaaccctcactcaggtctattccaggggacccacctgtgatagtgctttccaccgtcatctcccttcatgccacccctatagcagcccttcccagtaggaattatcacccgccactcggggtgaggacctggggactagagagaagttgccatcctcagctgccagcagctgactgaagcctaggcccatcaatgccaaagatcgaaacccttccttgctgctgcctggcctccctcctcccctgccagcaagagccaccagcacatctgggtcctgtccagacaatgaggggacaggcaggagatgcccgctggctccccctgtccaggttcgatgtgtccaattgccagcaactggtgatctgagctgacccactctgagagggaagcccctcgttgatcttagcccctcccaccctgtcccacccacccaggcccctgccccagaatcttcataaaaggtggaaggttgacaaagctctgccaccaccaacccaggcctcagtgggtccctgcaggggctgcctctggagcagagcctgcagaggggccacccaccccagtcagcaggcacggccaggcctcccgggcaccagcagacaatgggcatctgcagagtacattcaaagggaggcccaaagccctgcccagtcctccaaggcctccacaatgcctgctgcccagtctcaaaagccgatttctgttcaaacccacccatgtcacctggaaggaggcctttaaccatagactcttagctgtggagggcaggattaccctctacggtgtccctgactgtggcctctggcttctgcttgcctgcctcctgcaacaggcagctcaccacttcacacggtagtcaattccagcacctgcggctgccaggctttcaggatactgagctgaaatctgcctccctgtcactgtcatgtggttccaagttctctggagccatggagactctgactgtgccctcagctggaaggacctccaaggctctttgactctctgctccatgtacaccaccccccagcagcctgctgcccttcccttggtggtctaggtccacacatgtgcacacagacacacgggggacacaggtcacatgttcaggcacaaccgccacttaaaccatggtgtcccttgggaggctgaagcgggcagattccttgagcccaggagttcaagaccagcctgggcaatacagcaagactgtctctacaaaaaatttaaaattagccaggcatggcggtgcacaactatagttccagctactcgggaagctgaggtacgaggatcgcttgagcccgggaggtcgaggctgcagtgagccatggttgcgctactgcactatagcctgggtgaaagagcaagaccctgtctcaaaaacaacacccaccaaaaaaaaaaaaaaaaaaaaccccacatggtgtcccaagccctccccacgttgaaggaaagccgtggccctgtgtcagctcccctgcctcacttacctctgcacttaccagcccccctcccccacccgacctggccacactggcctccaccgagcaccctaagcatggccagcctcacagcctttgcatgtgcagtgccctctgccaactgggcttttccgcagaatatcctccttcacaccatccacatctctgattgaatgtcatcttctcagagaggttgttgctgaatatctcagccacagcagccctgctccctacccccttaccataccccttctcatccccaccttacatgacatgtctctccaggagcgtgtgtctgcctcagcctccccgctgtgccggggtgctgggctggtagcacctgcagcccgtgagtccccagggcatcagagatcaaagtggtgcccctccctggcccaggctgcaggccatctgtcttgcctggcagctctcctctgcccagccttcctccagctcaggcctggaggtgaggagatagcaggaagttccccccagggcaggctgggagtatggacagtaagagcccacaaggaacagcctctctccaggggaacgctgtgccccacagactgcaaggagccaagcggagacagggctccccatgggcaccctcaggctgccaaggcttgggggcagctccagacaatccgtctcatgcatttggatatcagctgacagcagcaggggccagggaggaggagacacacacaggccacatacacacacacacacacacacacacacacacacacacacacgccaggatccaacccttccaggagctggtggaggcatgctgtcagacaggcaagaacacttcaggcacatgggtgcactgagcatccctagacacccccaccccacacacattcaagagcagcagctcacacaggtgtgcccacacacatatgaggagccactccttgagtcccacacatactttcctggactcacactcacaggcctcttggtggtaagtacaaccaaccgtgcacacacacacacacacacacacaaacacacacacatagagtcagcactggtggaggcagcattaacagtgtattttggggagcacaagagagtgttcataacccacccctgatcttgccatcctgcccagctgcccatcaagcagctggaactcttaactgcccatggtaggcaagagagtgctgtcccccatccacaccccggcaggggacagctttctgcagggctggatcctgcccatgggagaaccagcctggcaggggcaaagctcaaggtgggcaagagctgatgggctgggtgggggtcagaatgggcagcagccaggtggcagtggggatggaggaggattaaggtcgctgggcactggcaccagcttggggatgcccagaggctgccccccgggacaccatgggctgatgttggcagcattgcccctctcctcagtcaccagcctgcccaggaattggcactgcttgggggagtgtggccagaccagacgcacccccacctgttccatttcctgattgtccagatcttattgaggtttctcaataagaaaaggagacttgcctggagattctgaaatggggaggtctcctcactcaccccaagttgcacctaaataaacgtagtggaagggggggacatgatcactcctggaaagccctgcttcagcccagggaggagaaagcagtgcctgtaatttgttttaataatcctgctgaactgggagaaaattaacaaatgagaaaccagattgaaattaatcaaacttctccctgtccatccccccaccttccatcttaatgaaggttatttatccaacgagcgataaaacacggaattaaattaaatagcccctttcttttcctcctctcccccgccccagggaggcagcatctccctgcttacagctctataagccatgctgggctggcggccatggcagacccatgattcctggacaccaatcagaggggtttcccagaaggagcccctcaattagtgcattccctgtttgggtctcactgccagctctctgccaaaaatatgaaaggcagttaactcaaccaccctcctgaggtgggagagagggaggtccctgttgttgggtcttatctgatgcagctggggggactcaccagtttctctgtgggggagagaagggcctgagtgtggaaggtggggagtgtgagcttccccccaaatgaggacactttagtgcccatggcaggttccagctggaaaccctatcctggccccaacttcttggtgggaaggggttggaggcggcaggggaagctcaggaaaaacctctagtgaaaacaggactcagccccccgccctatcccctgcctggctccctcccttgcct

SEQ ID NO: 585211 - DNA, 4001 bp, Homo sapiens
ccttggtaaccctcaccacggccccgaggtaggaagccagagcccgatcctcagaagagaagctgcccctccgaagctgaggaacatgcctgggttcacacccaggcccacccaatggcaagccaggcttcctctgtgccacagtgctgtctgtgggccaggacacaggcaatgatgaccttaggtcacacccaaatgtccaaggggcagagagagctgggggcagcccagggaggctgcgggacccaaaggggcgaggctgagggtggagcagggtgggcttccccggggctggggacatggagcaggctgggccagggccaggcatccttgccagtgggcaggaggcggcagcagcacgaggctactggagtgttcgtgtcatcataacaggactggtggctgttggctaacgagcacctactctgtgccaagcacttcgtgtggattattcacttctccctcacacaataatcccatgaagtgaacactacttattaccttcatttttcagatgaggaaatggaggcccaagaatacatggaaacaggatgacacagcaagtggcaaagtgagatttgaacccaggtctgtctggccccagcccctaagcactctcaccccctgctccccacctggcacacactgcgtgtccattcccagcctcctgccctttgcctacaccatccccgcacccaggaagcagccaggatggggagctgagagtccctgttccaggtgtttccccaccacatcccttgggtgccacttcacatctctgagcctcagtttctgcatctgttcaatgggggcttaattacatgacccctgctgcactgacgggtaaggacagggaggcctccacaaggtgggagtaacatccaaaagcccgttctgcaaaagccgacaatcctcacacaggccgtgggaggcaggggcggggctgggaaaacctcagtgtagcgtctggggtgtcggtaactgcaccccatgtcctgatgaccacatcaccaggagcactgagtgccagcagtggggcgtggccaggccgagaaaattaaccatggtgtctgcccagtgcgttctcgagtcaagttaatgtgcagtgctgtatgtaatatattgcactatattaatataatatgatataatgggatatattaccattattgaacacatgagccgataaaagtcacatcaccatctttccacataatttatatcacagccaggccagggccaggctggcagccccaagctggcagagaggaggcccccctggggctctgggggcttccactggggaaaagggtcctgacccctgggaggggagtcaaaaaccagcttggaaggaagatggaggcaaggctaggtgaccggccgggctgggggtgctgagctgtggctggggatgctcagtcccctctccccgatgccagtcctcattgcacttggccccactgcagtatttgacccggtagtcccttcctcgcttggtggtcccgctcctggcgctccttgtcccctccttcctctcagcttcctttgctgtcctgcctcctctccctgatccgaccctggtggtccccagggctcagcgctcccttccctctgtctgcctctccactcactccctggggcctgggactgccttctcaggggttcaccagatctcaccatggcaggcgaggagacacagcatgcacccctgaactccaggctcccatccagctgctgctcccctgggctatccaatgggtgtcgcaaattcagcaggttcaaagtccgtccccgccaggtaactgctactctgccttccagttatgcaggccagagtgttgggcaaatccttgagtccttttctcacacatcccaaacctgatttatcagcaaatattgttggctctacttgaaaaggatccaaaatccaaccacgactcacctcctccaccaggaccgcccaggtccacagctccagcatctctgtctgggctatcacaacagggcccttagcctcctattgggctccggcctcccacacttgccactcccacacacatgcacagtgcactcccacctggcagctagaggaacccgattaaaacctgagtgacaccacaggggtcctctctttaagaggatcccatcatggccaggcatggtggctcatgcctgtaatcccagcactttgggaggccgaggcaggtggatcacctgaggttaggagtttgagactaaccttgccaacatggtgaaaccccatctctaccaaaaatacaaaaattagccaggggtggtggccggcgcctgtaatcccagctactcaggaggctggggcaggagaatcacttgaacccaggaggcggagattgcagtgagctgagatcgcaccactgcactccaacctgggagacagagcaaggctcagtctcaaaaaaaaaaaaaagaaagaaagaaaaaacagaggctcccttctcatagagtgaaaaccacagctttcaatggctcccaaggcctctacacgacctgcaccattagccccctggcctcccttcctaccaccctccccctcactcaccctgtccagccactccaacgtccatgttgttcctcccaacagagcaggcaggagcccacctcagggcctttgcactggctgtttccacacaccactccctgcaacaccacacctttcattcacgcatctagtgaggactgtttgcctcccgctggcacgtcagtcccatgagggcaggggatttgtcggccttgctcactgctagagccccaggacttaggacaatgcctggcacccacactgtcatcttgcaggttctgcaaataaatattaatgacaactacaaacaggcgagcctgagcggcagttggctttcacctgcttctcattatcaggtttcttcaagattctgttgggggaaactttctccttccaaagagaatctggaaactcctggcctggtgtggatgaggcagctgaggaatggacgggccaagtggcagcaattcagccaagaccacaggtggctggaggctggcccctccctctgcccagcacggcctccatggccctagggtagagctggctgctgagcactcaggctgcagggggtatctccgaagccaggggtgagaaggaccccaggggatctttgcctgattcctggctgcctcccacggctgtccttggacactggcggccccttgctctgacctgatctctggtggtgtctgcaggaaggggcccacatacaggtactcatggtaagcttccactccctctagcccctggcaaggggggagaggcgatatggctccaccccatgatggacacattcagaatatacctcctgagcaccctctatgtgcctggcgccatggcaagcaccaggaggccacagtgagcaaaagcagacaaagccgtatgctcgtattgctgagtccagaaggagagctggcctctcaccggacccacacacgaatacacacaaaatcgtgatgaccgagaggcgatggggatgagagcccggaacaaggtcctggatctagccagggtagcaatggagcactccccttagaaggcagcattacgctgacacctggaagagaggtaggcaaaacccaggtgaagaggggagggaagcacatcccagacagaagaggcagcaggtacaaaggccctgtggccaagggcccatggcaggtccaagaaactaaaaggccaaaacagaggatgggagacacagcttgacgggcaggatgagccctggatacccacgggaggccactgcaatggtccaggtgagagaagacagcagcctggaccggggtgtctatggagatggagagaaatacaaccctccctcaaaccctctggctcccaggtgtctcctccttgtgacaaacagttgacaagcccttgcctagacactgagcccaccaaaaacacaagggcctggagccaggagacaaggctaacaagt

SEQ ID NO: 585212 - DNA, 4001 bp, Homo sapiens
gtctcatgctgcacacttggtgagtgttgggtcagccttaacttctgattgcaggtccagagcttttccactccacctcataacctggctctcagctcctgtctgagaagttgttttgtattttcctattaaatatatattagccaaataaatgttggaaggagaggacgagaggggaacatctaattcctgagttcctcctgttagcaacttttcaggggcttgcttggaagaaaaaattgataaaactgtgactttctctgatttgacaacctaaaaatcagagtgagttgaggactagtataattactttacatcaataattaacttacatcaattaaaaaatgggcttgttttgaaaggaatataagctctcataattccaggagtaaattaaaggagttacatttacatctctgaggtggtcccaatgacactgtttcttatcagagagaagggagaatgagataaactatgactccttccattatgagattcataaatgcagtaggttgtttaatctctgagcctcaattttctcttcttagaatagagatagttatttctacttttgagggttgttgagaaagttaaatgagataatgtacaaaaaattcatagtaggaacacagcaatgggtgtttgctcttgtcccagtgcttggaagatgggtgagtctctggacatattgagtagcccatggatcctctttctttgatctatctatccatcaattattttactgaccaacaatctatgtatatgtatctatttataatctctgtctacccatccatgtatgtattattttatctatcaatcgttctatgtatctatctctttgtaatctgtctcttcatcatctattatctgtcttgtatccatttctctggttctctatattttgttcatagaactcgagtaggaataagattttatatgaatccagacttatatcaaatctgtcatatgatggctctctgtttctctctctctttcctttttagctcctgtacagaagatattgatattcactaatcagtccacctggattaacaggaaattttcagtgaatgtccaagcagtggggcacatcagtaacacagccttgcttagccccatgaggtcatgtagtcccatggttctcaaccagggggattttgctcctctgctccagaggacattgagcaaggtctagagacattttgggttgtcatatctgcggggagggaaagggggttacaaatcagataggtagaggccagggatgcctagaaacatcctagagtgagcaggacagatctccattcaaagaattacacagtttaaagggcagcaacagtcggagcctctttcttagctatcctctatattggccatgagttggtagaactccagagacagaatatgacttgtctttgagctaattagtggcaaaggctcaactagaatctagttctcctgacattcaaactaatttattctaattatactaaacctgagttttgtattttcacagccaatatagaattacagtgtcacaatttacaattgtgtgttgactacttacacagagaaataaatttttgcatacattgccacttcttccagcactgattattctcagattgtttaaaatgctaccatttcttttttctcttcatgtcattgtttcccataccattaaatgctgaagccctggttttctaaattcttcatttttacaattctgtaaagatgtatccaacagaaaagaaataaacaattcttgaactgtcacccaagcacaccaagacggcacaatatgagtaaaaacagacttttccttgtgctaaggacacatattagcatatttttctaggaggctagagaggagggtgtgaggcaatgtagagaaatttataagatcagtacttactttgttaaacgctgtcaccgtcctggctcgacaactgaattccaggtcctaatgtatttataagctctttgttcctctcaatagttctctcccactgaaagaagagtcaagttagggaaaagccactcccacacatttcatggccaaggggccacctactggattctaagacatgaggcaagtgatctgcttatcagaagacactggttaatgtgttccttttcaaggttggcaatcaaagtttacacaatacatttcaccgagattttgctctttttgcaagtcagcagaaactggctttttaaagatgctttttttcatgagttgggtgcaaagactagggcaactgaaaaatctctattgtgagcatagctgggagaggatgtctgtgaagggcaagctgatgccaccgttttcttactgggttgccaaataaaatataggacatccatgtaaatgtgaatttcaggcaaacaatcaacaattttttagttatagctatgttccaaacacggtatgaaaccagattatactgaaatattatttattgtttatctgaaattcacatttaggtgggtatcctgtattttatctgacaaatccagagaccctatttgcatatgctatcctctttgcgtcactcaaattgcccataatataacaaatctgaaagtattcatcacctggattcatcaattgcaaataatcttatttcacctataccatgtagggggttatgttggcccccaagaaagataggtccatatagaaatccctagatcctgtgaacttgatcttatttggaaaaaggctctttgcagatgtaatgaagtaaaagaatttgagatgagatcatcttggtatatctggataggccccaaatccaatgacaattgtcctcacagcagagagaagagaagacacaacacacagggggtgaggtgctggaacacagaggcagaaattagagtgatgtggtcatgatccatgaaagtccagaaaggccaagagcccccagaagctagaagacgcagggaaggattcctggaaatcacttctaatccaaacacgctggcacaatgacacaccagggaaaaataattttgcatatagttacttatatgtaattcgcatataccatctgtatcttcgcagccaggcctgagtggcactgaaggaactgagggaaggcttatgcccgggtccccacagagccttgaggagagtgaggatgagccaggagcacatgcactgtaagggatgacaagttggcctgagagcagagggtgggtctgtttgctcttcaatatttcctcaccccttacaaaactgagggatccatagcagacagaaaggttgtttgaaaatgcataagaaaaagtgttttcatgagaaataaaatggatgtcaaggaaaaaagaaaatttcattttgccattccccagaatgataactgttttcttgtgcagaatgtcagaagtaaatttctatacatgactttctgataggccatttgacaaatgttgcaggacaattcttgaaaaagtcaaacaaaccacatagtctacattttacttttttactaaatttttaattccaagaaaatttatggggagtttggaaatctgatttcatatcagatactaatgaaaagaaatcaattttaactaaatctggtcataggcattttactatgtaattagcacataatttttaaaaagtttattaacttcacaatagccacaaccaacatttagataaagcaatttattgttgcaaaactttagaatattggtattgcatgttcttggcatccatgcctgttttatcaaaccttgaaaatctttgttgcttcttctaaacctttcgcatttatgggaagctccctcaggctgccaggctgcaaaaacttcttcactgtggggagtttgctgattctgattttcagggcccgcaatgcacaaagcacagcctcagagtgaagccaagggctaacaccaccattaacacaacccagggaatctgcgcccctcctacacaaagaccaactaagttccctctatcagcaccagtagggaggcag

SEQ ID NO: 585213 - DNA, 4001 bp, Homo sapiens
ttagctcctgtacagaggtcaatgatattcactaatcagcccacctggattaacaggaagttttcagtgaatgtccaagcagtggggcacatcggtaacacagccttgcttagccccatgaggtcatgtagtcccatggttctcaaccagggggattttgttcctctgctccagaggacattgagcaaggtctagagacattttgggttgctatatctgcagagagggaggggggctacaaatcagataggtagagggcagggatgtgtggggaaaagaaagagagatcagactgttactatgtctatgtagaaagaagtagacataagagactccattttgttctgtactaagagaaattcttctgccttgagatgctgttaatctgtaaccctacccccagccctgtgctcacagaaacatgtactgtgtggactcaaggtttaatggatttagggctatggaggatgtgctttgtaaacaaatgcctgaaggcagtatgcttgttaaaagtcatcactattcagtaatgtcaagtacccagggacacaaaacactgcggaaggccgcagggacctctgcctaggaaagccaggtattgtccaaggtttctccccatgtgatagtctgaaatatggcctcgtgggaagggaaagacctgatagtcccccagcccgacacccataaacggtctgtgctgaggaggattagtaaaagaggaaggcctctttgcagttgagataagaggaaggcatctgtctcccgcttatccctgggcaatggaatgtcttggtgtaaaacccaattgtatgttccatctactgacataggagaaaactgccttaaggctggaggtgagacatgctggcggcaatactgctctttaatgcaccagatatgtttatgtatgtgcacatcaaaacacagcacattttctaaccttgtttatgacacagagacgtgagtttgttcacgttttcctgctgaccctctccccactattatcctattgtcctgccacatccccctctctgagatggtagagataatgatcaataaatactgagggaactcagagactggcgccagcgcaggtcctccatatgctgagccccggtcccctggacccacttttctttctctatactttgtctctgtgtctctttcttttctcagtctctcatcccacccaacaagaaacacccacaggtgtggaggggcaggccaccccttcagggatgcttagaaatatcctagagtgggcaggacagatctccgttcaaagaattacacagttcgcagcaacagtcagagcctctttcttagctattctctatattggccatgagttggtagtactccagagacagaatatgacttgtcgtcgagctaattagtggcagaggctcaactagaatctagtcctcctaacattcaaactaattttttctaattataataaaccttagttttgaattttcacagccaatatagaattacagtgtcacaatttacaattgtgtgttgactatatatataaagaaatttttgcatacattgccacttcttccagcactgattattctcagattgtttaaaatgctaccatttcttttttctcctcatgtcattgtttcccatacctttaaatgctgaggccctggttttctaaactcttcatttttacatttctgtaaagatgtatccaacagaaaagaaataaacagttcttgaactgtcacccaaacacaccaagatggcatgatatgagtaaaaacaaactttttcttgtgctaaggacacatattagtgtatttttctaggaggctagagaggagggtgtgaggcaatgtagagagatttataagatcagtacttactttgttaaatgctgtcacctttgtggctggacaaccgaattccaggtcctaatgtatttataagctctttgttcctctcaatagttccctcccactgaaagaagggtcaagttagggaaaagccactcccacacatttcatggccaaggggccacctactggattctaagacatgaggcaagtgatctgcttatcagaagacactggttaatatgttccttttcaaggttggtaatcaaagtttaaacaatacatttcacctagattttgctctttttgcaagtcagcagaaactggctttttaaagatactttttttcatgagttggatgcaaagactagggcaactgaaaaaaccctattgtgagcatagctgggagaggatgtctgtgaagggcaagctgatgccaccgttttcttactgggttgccaaataaaatataggacatccatgtaaatgtgaatttcaggcaaacaatcaacaattttttagttatagctatgttccaaacacggtatgaaaccagattatactgaaatattatttatcgtttacctgaaattcacatttaggtgggtatcctgcattttatctgacaaatccgggaaccctatttgcatatgctatcctctttgcgtcactcaaattgcccataatataacaaatatgaaagtatccatcacctggattcatcaattgcaaatattctttcttcatctacaccatgtagggggttatgttggaccccaagaaagacaggtccatatataaatccctagatcctgtgaacttgatcttatttggaaaaaggctctttgcagatgtaatgaagtaaaagaatttgagatgagatcatcttggtatatctggataggccccaaatccaatgacaattgtcctcacagcagagagaagagaagacacaacacacagggggtgaggtgcaggaagacagaggcagaaattagagtgatgtggtcatgatccatgaaagtccagaaaggccaagagccccccgaaactagaagacgcagggaaggattcctggaaatcacttctaatccaaacacgctggcacaatgacacaccagggaaaaataattttaaatatagttacttatacgtaattcacatataccatctgtatcttcgcagccaggcctgagtggcactgaacgaactgagggaaggcttatgcccgggtccccacagagccttaaggaggagagtgaggatgagccaggagcacatgcactgtaagggatgacaagttggcctgagagcagagggtgggtctgtttgctcttcaatatttcctcacctcctagaaaactgagggatccatagcagacagaaaggttgtttgaaaatgcataagaaaaagtgttttcatgagaaataaaatggatgtcaaggaaaaaagaaaatttcattttgccattccccagaatgataactgttttcttgtgcagaatgtcagaagtaaatttctatacatgagtttttgataggcaatttcacaaatgttgcaggacaattcttgaaaaagtcaaacaaaccacatagtctacattgtactttttactaaatttttaattccaagaaaatttatgggcagttcggaaatctgatttcatatcagatactaatgaaaagaaatcaattttaactaaatctggtcataggcattttactatgtaattagcatacaatttttaaaaagtttattaacttcacaatagccacaaccaacatttagataaagcaatttattgttgcaaaactttagaatattggtattgcatgttcttggcatccatgcctgctttatcaaaccttgaaaatctttgttgcttcttgtaaaccttttgcatctatgggaagcttcctcaggctgccaggctgcaaaaacttcttcactgtggggagtttgctgattctgattttcagggcccgcaatgcacaaagcacagcctcagagtgaagccaaggactgacaccaccattaacacaacccagggaatctgcgcccctcctacacaaagaccaactaagttccctctatcagcaccagtagggaggcagaaagagacactacgtgagaaatgaagataagaggaa

SEQ ID NO: 585214 - DNA, 4001 bp, Homo sapiens
cattctcagcaaactatcgcaaggacaaaaaaaccaaacaccgcatgttctcactcataggtgggaattgaacaatgagaacacttggacacaggaaggggaatatcacactctggggactgttgtggggtggggggaggggggagggatagcattgggagatatacctagtgctggatgatgagttggtgggtgcagcacaccagcatggcacatgtatgcatatgtaacgaacctgcacattgtgcacatgtaccctacaacttaaagtataataataataaataaataaattaaaaaaaaaagaagttaccatttttatgtcccccacccctcaaactgtgagctcccgggaagcagagaagttgtcatagtctttaagcacagtgtagtgcattgctcaaagttcagtccgtgctttataggatataacatggctagatatctcaagagcaatctttttttttttttttttgccatttgcctatagcgctcactgttttagactacagtagcatagagtaattaaaaaacaaactagggctgggcatggtggctcatacttataatcccagcacttcggaaggctgaggagggaagattgcttgagctcaggagttcaggactggcctgggcaattaaataaagtctctatttaaaaaaaaaattagccaggattggtgtcccacacctgtagtcccagatacccaggaggctgaggcaggaagatcacttgagcccaagatgttaaggctgcagtgaaacatggccacatcactgcattccagcctgggtgacagaatgagactgtctcaaaacaaacaaaaagcatgaaaaaagccaagctaggattatggcaataaaataaccaatcctaattatgaaacccaccaatctgctgtttaaaaagaattatcaaagcaaccaaactctcccacatagtagaaacatcgtgactacacaaaaaatatttttttttaattggataagtgctttggcagggtagcccagggtaatatttcatttggcaaatagaaagaacttgcatatagaaggaatgtgcatgttctgttggacagggaatataacagcttaagagggggttattattattcttagatctacttgcctactaccctaaaagtcctatatatttagattcacttgcaattttgagactttaaaccctgctcaccctttggtcccagatacttcgaacaagaaggaggaggaggaagaagaggcagaagaggaaaaagaggaggaggaagaagaaagagggcaaagagaacaaagagaaggagggaagaaggaggagaagaagaaggaaaaatagcatgctgcttggtgctcaatcacaaagtcacttatataagcagtaaactaatctgtgtaaaatcaatgatggaagtgtaaatttagatcctgattgtcaagcattggtgattggtttcccatttggaagtgccagctctagaggaatacgaccatccagatgtattttcttttcattgatcaagtggtgctcccaaatgtgtgaccctgccagctttaaatctagtataattgtgtgttgactcctgtgaatcacaggaatgaatcacacgaatacatgtttttaataaacagcttttccataagcaacctttggcatgtggcctggcactgatgtggttgtattttcagattgcccacaatgataccactcttacttttctcatatcatcaaattctttgcccttgttttctaaattgttgaatattatttttctttaccgacctgtccttcaggaactaacaaacaatgcttaaattgtctcctaagcacacagaaaaacagcaagaacataaagtactcacacaaactaacacatttaaatttgtttttcttagtgaagtagacatgagaacatttatgaagatgtttaaggtcaatactaacttgagtaaagtctagccggtctccgctcagcttctcaaggccacctcctgatgtgtatgttagctgttttaatactatgacaactcctgccttctgaagggggtggagtctagttgggagcagccactcccacaccactttagtctccagagttccatgatctgctaggaagaaaatgacagcaattaatttcaaggctatccataaatgcacaaaaagatttcatatctatttggctgcctcagaaggtcactggggaccaagtatcctgtgaacactgcttaaggaggatcttgttaaataggctgcagatttatgacagatgagaaaacattgtggggagaggaggaaagtgtcataggagagtcataggagatgtcaggaaaggggacttgataaagagcatagggagattgccttctaaatttgtttaaaaagactaaattacaaataatgtcacaaaattttataggcccaaagaatctggctgagttgtccttgccctgggcagacaaaagacctcagctgcattccccgaggtcatttgcagatttttctctgtgacttaccagttagcctttctccctagcccaaggctctgcatgctgtttctcctatttggagcactcttttctcccctgctccaaggcatcctgtgcttcctctatcacatcactctttctacattccgtgcatcatgtctgctttccccctgttgagtatgagctccttgaggcagggcctcaagtcctggtggttaaccaagtccccgtggctaaccacagtgcctggacatagaaagggcttaatacacgtatatgtaatttctacttttctaaaggaaattgtctgatatacataaatctggaaagaacactacaaagccttgatgtacccatcaccttgcttcaaaaattattgacaatatttgaagcaaatctcagacttagtttttttcctctataatctaatctgtatcttttaaacttgtgggtgggggagttatttatgtaacagaaaaattgcaaaactagtacaagtttcccaaatacccctcacccagcatccgctaatgttaacatcttatgtaaccatagtacaatgattgaatccaggaatttaatgttgatacactattgactaaactccaggccttacttgaatttcaccagtttttcaatcagtatcttttttctaacccaggatcccatccaggaccccagcactgcatttcgttgtcacatctccttagttacctccaaactatggcagttcctcagtcttttcttgtctttcatgatggtggcatttttgaagagtaatggtcaattattttgtggaatgtacctcaatttgggtctatctgatgttttctcatgactcgattgacgacatacattttttgcaaaatgtcacagcagttgttccagtctcagctgatcatttccacccataatttcatatccgagacatggtatgtcttattaattttgatcttaaccttaatcccttgattaaagtagcgtctgccaggttcatcaaccgtaatattactatttatccctttggaattcataaatatcttgtggaagatactttgtgactataaaaatagtcagtttcaaaataagcttctgctcactaactttagcatccattatggatcttgcctgcagcaaatattactgtagtgtttgtctaatagtgactttctatttccctcattccatctacatttaataattcgaattcttctgtaaagaaaagctgtctcttctcctttatttatccttccattcattcaattattttcttagtacagatttatagatattttattctaaaggttacaatctaataccatcgatatctattttattgctcaaattgatccacctttagcctgtgggagctccttcagattggcttctgtgtcttttatggcaaacctcctctcttattgtgagcatttccagatactttctgtgccaaagatgttccaggcttatcttgtcttgtctgtgtcccagccttgaagtcaaccatttctccaaagatc

SEQ ID NO: 585215 - DNA, 4001 bp, Homo sapiens
tagatccaaactaaaacaaactataaaaacaaacaaacaaacaaaatgcctgtttgagacaatcagactgaaggttagatgacaaagaattgctaattttgttggatgtgataataatattgttacattttaaaatcctcatctgttagaggaaaatgttgaggaactcccagatgaaatgttatgatgtttggattttgctttaaaatactcccacaaaacaagggaagggaggtgatagatgaaacaagattagcatagagctgatgattgctgaagtcgggtgatgagtacatagaattcatggcaatgttctctctacatttattggtatttgaaaatttccatactaagaagctaaaagaacagaacgaaaacaaaaacagacacacacacatatgtaagcaagataccaaggctgccagtttgaagccactgaagaaaacaagaaatttaccctgagaatgcataattaataagagctcagagtaactgacaattttcaggtaaatttcctttcttcttattaataaatattcactggtgctagatcagaagccaataattaagtaaaagtcaaaaggaaaatagaattccatcaactacgttctaattataaagaaaaatcccttcagggatggtatctgactcagtgaagcgtgcctgtgattttggtggacgagaactagaactgaacggtgcttcaaaacgtatttttctttcaaaggtctcaaaagctgtatgacaaatccgtgaagaaacagcatataaggtacctcgactccggcggcagctaaaacccatctcacggactccatccggcctcttccgttgggatagtggagcttgggccttgctgccatgatagcttttcaggctttctgaaatacaaatgcagcagctcgtcgcagaccaacagtcccaatttcgcgtcttcaacccagtgctcaggggcgaaatgaatattcaggattttggcacgggaaactgttctttatttttgttgctgcattttccctcactcaagaaaaaaaaaccaccattttaaaacatggagaaaaaaaccttggcttttatatgatttctatttatgacttcttatcctggatcttgggaagctggggccatttgttgtaaaaacatatgtgctagcagtacgggatttcacaaattcagaatattatatattttgacctcgagaatctcagattttccaaattcagctgggggatagggggtggcaggcgttgaagagggtagcgaaggaaaatcgcacagccactggaagctcttcaagtattcatgcttttacatacatcatcatattttattatcacggcaactggaaggtgaacaggccgagtactactactgtctgcaaaatgtgcgtccaccgtcacgcatgcggtggctgcgccccccgggtcccgcgtgtccaccacccctacagggagatgagcccccggccttgtaaaacgagccgggggccagggcttggccatctgagatcgcactctcccatgctcgtcttccccgctcagcccatgcaggggcgtagcggcagcccagccaggcccggggacgatccgagcccaccttccaccaatgcattcagactccgcagaaggggtttaaaaaaaaatacgcacactgagccaagaaggaccccagctccagccaaggggcccacctctgcccagactggatggagcaggaggacaaaggacaagaggaagaaaagacaagagaaggactgaactgggggagtgagggaagaatgcgagagtgagactcagagagtaaaggggagggaaaaaaaagaagagagaaagggcgaggaagggggcgaccgcaggagggagacagacctggagtccactcggaggcctggagccgcacaaagcgccaggtcagcggtcccggctgggtgagaccagcaggcggctctagcgcgcgggagctgggcgaggctccgggacgacctcaccaatggagactgcagtatttagcatgccccacccatctgcaaggcattctggatagtgtcaaaacagccggaaatcaagtccgtttatctcaaactttagcattttgggaataaatgatatttgctatgctggttaaattagattttagttaaatttcctgctgaagctctagtacgataagcaacttgacctaagtgtaaagttgagacttccttcaggtttatatagcttgtgcgccgcttgggtacctcggatgtgagggcgatctggctgcgacatctgtcaccccattgatcgccagggttgattcggctgatctggctggctaggcgggtgtccccttcctccctcaccgctccatgtgcgtccctcccgaagctgcgcgctcggtcgaagaggacgaccatccccgatagaggaggaccggtcttcggtcaagggtatacgagtagctgcgctcccctgctagaacctccaaacaagctctcaaggtccatttgtaggagaacgtagggtagtcaagcttccaagactccagacacatccaaatgaggcgctgcatgtggcagtctgcctttcttttgacccattacccatctaagttagatgcttttttaaatgttttttaatttttaaatttttaatttttttcattatttattttttatttttgagacggatctcggctcactgtaacctccacctcccgggttcaagcgattctcctgactcagcctcccgagtagctgggattacaggcgcgcgccaccatgcccggctaatttttctatttttagtaaagacggggtttcgccatgttgaccagggtggtcttgaactcctgacgtcaggtgatcctcctgcctcgtgctgggattgcaggcgtgagccaccgctcccggcccttagatgctttttaatcagcaagtacgcaatgctttcctgacaggaatgtcaagtccgtcaggaaatccacataagggtgttaagcaggcaaagtaccacatacagattaaaatcaaaagcactgtcaacgcttatttaatttatacagtagaccctaacttttctaattttgtgtatacatatatatacatgtatacatgtatacaaacatacatattttcttctttctttcttcatctcagtgggacatcttgagatttctcttcattttgtacattttagagacaagtgctctatagtcacggtctcaagtcagcacctgtttggaagggggtctttggagttgggggtggtgctaaaagaataatttggctggcaagttagttaaaacattaaaaatatattaaaactatcagggctatattatggaacaattgcaaaattcacatggatttcaaagtttgaaatatatgccttcgaaaataaattttgtttttagaggcagcttctgctatttctcaggctatagatgttgttattttcttcacccacgggggcgctcgagagtaccttgcttgacaagcctgggtgctgaacaattgcagccgctaacatgatcagattttattttcaataggtttctctggccaaagtgaggcgaatgaattggggtagtaggggtagagaaagaaacctcttgtgtctgtgtaaattaaagtagcaccatgagtttgaagaatatgagtaagaaaaggtgaaatactaaggaggtaggtggtaaagcaattgctaatcagatcaaagggaagggaggaggaagaaaagtctagaatgatgccctgtccaacacacacacacacacacacacacacacacacacacacacacacacacacacacacttcttgtcttttttttaataacatgtattgtcatctaacaggacttttttatttatttgtctgtagattcctagaatgtaaattccacgagatcgaggatttttgcgcttttggttttccttttgtacatcctggttagtatagagtaggtattcagagaacacttgttgaatgaatgaatgagcaatgctttggtttctagttc

SEQ ID NO: 585216 - DNA, 4001 bp, Homo sapiens
ctgggaaatggctcctaatagccattcaatgggtacattgagtttcagaaagctaaagcacctatctcatgctgcacacttggtgagtgttgggtcagcctgaactccttctgattgcaggaccagagcttttccactccacctcataatctggctctctgctcctgtctgattatgttgttttatatttttctattcatagtatattagccaactaaatgttggaaggagagggtgagaggggaacatctaattcatgagttcttactcttagcaacttttcaggggcttgcttggaaggaaaaagtaatgaaagtgtgtctttctctactttgacaacctaaaatccagagtgagttgaagactagtataactgtatttacatcaattaaaaatgggcttaatttgaaaggaatataagctatggtaattccaggagtaaattaaaagaattacatctctgaggtggtcccaatgacactgtttcttatcggagagaagggagaatgagataaaccatgactcctcccattacaaggttcataaaagctgtaggttgtttagtctctgagcctcaattttctcttcttagagtagaggtagttatttctacttttgagggttgttgagaaagttaaatgagataacgtacaaaaaattcatagtaggaactcagcaatgggtgtttgctcttgtcccagtgcttggaagatgggtgagtctctggacacattgagtagcccatggatcttctttctttgatctatctatccattaattattttacctaccaacaatctatgtatatgtatctatttataatccttatctgtctacccatccaagtatgtattattttatctatcaatcgttctatgcatttgtctgtaatctgtctgtctcttcatcatctattatctatctatccatatctctagatctctatattttgtccatggaactctagtaggaataaatttttatatgaatccagacatatcaaatctgtcatatggtggctctctgtttctctctctctttcctttttagcttctgtacagaggttaatgatattcactaatcagtccacctggattaacaggaagtttccagtgaatgtccaagcagtggggcacattggtaacatagccttgcttagccccatgaattcatgtagtcccatggttctcaactggggagattttgctcctctgctccagaggacattgagcaaggtctagagacattttgggttgtcacatctgcggggagggagagggcgctacaaatcagataggtaaagggcagggacgcttagaaacctcctagagtgggccggacagatctccattcaaagaattacacagttcaaagggcatcaacagtcagagcctctttcttagctatcctgtagattggccgtgagttggtagtactccagagacagaatatgacttgtcgtcaagctaattagtggcagaggctcaactagaatctagtcctcctgacattcaaactaatttattctaattataataaaccttagttttgaattttcacagccaatatagtattacaggatcacaacttacaacaattatgttttgactacttatatagagaaagaaatttttgcatacattgccacttcttccagcactgattattctcagattgtttaaaatgctaccatttcttttttctcctcatgtcattgtttcccataccattaaatgctgaggccctggttttctaaattcttcatttttacatttctgtaaagatgtatccaacagaaaagaaataaacaattcttgaactgtcacccaaacacaccaagatggcacgatatgagtaaaaacagacttttccttgtgctaaggacacatattagcatatttttctgggaggctagagaggagcatgtgaggcaatgtagagggatttataagatcagtacttagtttgttaaactctgtcactgtcgtggctgggcaactgaattccaggtcttaatgtatttataagctctttgttcctttcaatagttccctcccactgaaaggagaaaggtcaagttagggaaaacccactcccacacatttcatggccaaggggccacctactggattctaagacatgaggcaagtgatctgcttatcagaagacactggttaatatgttccttttcaaggttggcaattagtttaaacaatacatttcacctagattttgctctcttttcaagtcagcagaaactggctttttaaagatgcttttttttgtgagttggatgcaaggactagggcaactgaaaaatctctattgtgagcatagctgggaagggatgtctgtgaagggcaagttgatggcacccttttcttactgggttgccaaataaaatataagacatccatgtaaatgtgaatttcaggcaaacaatcaataattttttagttatacctatgttccaaacacggtatgaaaccagattatactgaaatattatttactgtttatctgaaattcacatttaggtgggtgtcctgtattttatctgacaaatccgggaaccctatctgcatatgctttcctctttgcgtcactcaaattgcccataatataacaaatctgaaagcatccatcacctggattcatcaattgcaaataatctttcttcatctataccatatagggggttatgttggccccctagaaagacaggtccatatagaaatccctagatcctgtgaacgtgatcttatttggaaaaaggctctttgcagatgtaatgaagtaaaagaatttgagatgagatcatcttggtatatctggaaaggccctgaatccaatgacaattgtcctcactgcagagagaagagaagtcacaacacacagagggtgaggtgcaggaagacagaggcagaaattagagtggtgtggtcacgatccatgaaagtccagaaaggccaagagcccccagaagctagaagatgcagggaaggattcctggaaatcactcctaatccaagcacaatggcacaatgacacaccagggaaaaataattttgcatatacttacttatatgtaattcgcatataccatttgtatcttggcagcccaggcctgagtggcactgaaggaactgagggaaggctcatgcctggggcctcacagagccttaaggaggcagagtgaggatgagccaggagcacacacactgtaagggaaaacagggtggcctgagagcagaggatgggtctgtttgctcttcaatatttcctcacctcctagaaaactgaggaatccacagcagaaagaatggttgtcttgtaaatggataaggaagaatgcttttatcagaaataaaatgatggtccaagaaaagaagaaaatgtctttatgtcattacccagaatggtaactcttctcctgtgcatacctgaaaatgtcagaagtatatttctacactgacattttaatagattgtatgacaaattgaatgttgcagggcaattcttggaaaagtcaaacaaaccacataatctacattatttttttactaagcttttaattccaagaaagtggtaggttaggaggagattggaaatctgaattcatatcagatcctaaggaaaagaaattaattttaaccaagtcgacaaataggagatttattatttaattagtatgtaattggaaagagttcattagcttcacaacaggcacaatcaacacttaggtaaagtactttattgttgcaaaactttagaatattggtcttgcatgttcttggcctccatggctgctttattaaaatctgaaaatcttccttgcttcttctaaagatttctcatccatgagagacttccttgggctgccaggctgtagaaatttcttcaccatgggcaggttgctgattctggttttcagggcctgtaattcacaatgcacagcctcagagtgaagccaaggcctgccaccaccgtttataccaccc

SEQ ID NO: 585217 - DNA, 4001 bp, Homo sapiens
tcctaaaggagttcccaacgtggagaccacaaggttctggggaggcccccaggagctccccctcccaaagtttaattagtggtttaataagcagcagttcccctgccctagcttaggaagagagagaagtgacatacccacccagaagggcaatgcggaggttctggcggaaaatggggttgaggatgaggccctggagcccgcctgggagcagctgtgtgtgccagatccggaggccgctcagcagccctgtactttcctcctgagccctggaacagaagcagagaggtgagtagggtatttggaaaacaaaaaggaggcccataaaagccaccatctctgcctgttctgaacttgctgacccttggaacactgttccacagagtgaaattagtatcttcctaagacaaattctttactgcattacttatcagagcctcattacagatatcacacataactctttaagagggaagatacatttgaaagcaagatctcagctgggaaataaataaaagggaaaaggcaatatgcagagtttcccaaatgtatttatttttaagttttgtgatatatctattaacacttcctggaagtgctccaaggaacagcagtttgggaaatgtagctgttgagaaatttgtatctggctgagacttacttgctgaattccttctttacccacagagctacagcagcctgtggcaaaggctgctccagaaagagcatccgcatcacccagttcttagccaaggatgggagctccctgtacaggaacagaggtcaaaggttagtatcagaagctgcattgtatctgcatctctgccctcaattacctctcaaacatctcatctcactccagcacaactttaccagtcctgctgttttggcctccacactttagagcaatttccaacccttgcccccagtccccaccccgactccaggctgctacacttttacctatgatattttattccactccgcagaccccattacatttccctgccatgaaggggcttctcacctgaagacagccagacatgtggcagggtgcccatacaatcggtccaataccccagggctcaggccccctaagaattcctgcagattcctgcattgtaggtgtactcggttcagtccccttgaaggggtgctctccatcacctgaggaatgcaaacgtcagaagtgcaacctcaccatccatgccagtgtcacccctgacctttctaactgattccagatccatcagtccccacaataaccccaccttttctgtggtctcctttcccatgtcactcatctcctctggtttctcccaaacctgaccaatctccctccctttcttgcctcctcaccctatttctgcccttcaactccagtcttccctcaattaccaagtgacagaattgttaactgtccagtgtttgcaagatcattttgtatttcaatgacttgtctcatctttggctaaacagggacaaagaaaattgagcccacacctctctcttccatcccatcctggtcagaccagtctacaagctccaaatctgcccgtccttcctatcttctatctcttagcccacttctgctaagtacggcggtaacctctcccctccatgcttcccaaatctaaagccacctcttttcccttcccaagtctacttcacgtcattcaccctgacccacgccttccgatctcctagcttctccctgccttcctctcactcttcgcctcccactcacctctctctctctcatacctctgccactcccgccctcctaggtcccctcaccactctgtcgatcctcctcgcgcaccccgagtctcgggccgtcgcttaatcggagccaaagtctcgcattggctcctggagattgagggaaagatggtgaaaaaatgcgaggaaaagatggggaaagcaaagaaagatttcacaggcaagagcccagaatggagaattcagaagagaagggaggtaaggggaggagtggaaaagtgaagaggatgagaatagacgctgcactctccgggcgcgggggatgctgggaattggagtcttgcctttgctctccttagagccggctgaagcgcgtctgactacaaatcccgaaaggcaccgtggggaagccgaaaggagaggagctggcttttaattgagcgaggggagacaccagaagctggaccagttggttccgcgaaggcagaaccaactccgcccacgctgctaacggcgcgtgtaaccggctggagcgggaggcgggtccgggaaagtagaagtgcctggagggcttccttgcggaggcgcgctctggcgacttggtggtgagccgagtgagcacaattactccccataaaattgggataatacacactccaggccgggcgcggtgactcacgcctgtaatcctagcactttgggaggccgaggcggcgaatcacccgaggtcaggagttcgagaccatcctggccaacatggtgaaacccccgtctttactaaaaatacaaaaattagccgggcgtggtggtgggcacctgtaatcccagctactctggaggctgaggcaggtgaatcgcttgaaccctggaggcggagttgcagtgagccaggaccatgccattacacgccagcctgggcgacaagagtgaaactccgtctcaaaaaaaaagaaaaggaaagaaaagaaagaaagcgtacacactctgggcggtttccacgagttaacgattaacacgatccagtgcaccttacttgaccctaagtactcagtaaatcttaatttctgcctccaccactcctcaaaccgtttacttagaagacccagataaatacagtttttaagacaccaactatttgctctgatttgatttatgaacctactacaaaagtggaggtcttcacccaaacccagaactacacgtttccccaaattcctatatgcaaattttgttattcccaccttatagactggaagactggagcccggcaagattaagaaatttgcctgcagcctggcgaggtggctcagagctgtgacccccagctacttgggaggctgaggcaggaggatcgcttgagactaggagtttgaggctacagtgagctatgatcgcaccagcctgggtgacagagggagacccccatttctctctctcttttttttttttttttgaaacggagtctctcactctgtcacccaggctggagtgcagttgcatgatctcagctcacggcaacctcagcctcccgggttcaagcgattctcttacctcagcctcccaagtagctgggactacaggtgtgtgccaccacgcccggctaattctggtatttttagtagagatagggtttcaacatgttggccaggctagtctcaaactcctgacctcaggtgacccacctgcctcagcttcccaaagtgttgggattacaggcatgagccactgagcccaacctgagatgcccatctctaaaaaaaaaaaaattaaaaaaaaaatccctacaatcagacaggaagtgcccaagctgggatttgaagcacatttgcaagcaaccagggatcaaaatggtaatgactatgcaagactttttatactttgtagcccacccatgttttctgttgtccctgtctttttagcaattaatgttttaaaatcttcaaagaaaagctaaaaattgacagagcttctttatggcaaactttaggtaaggttgaaagacaatttacaatctaggaagaaatggttgatgaaataaacaaaatacaaaaagctgttacaaagcaataagaaaaagaaacataatagaaagattgggacagaccactgcttactagttagccctgctcagcaaggagcagcttaaaaaaaaaaaaagaagaagaaaagaaaaagaaaagaaagaggcctggcggggtggctcaggcctgtaatcccaacactttgggaggccaaagaaggtggatcattttagctcaggagttccagaccagcctggg

SEQ ID NO: 585218 - DNA, 4001 bp, Homo sapiens
gacagttaacattaagaaaaaagacattctgattttttaacaaaattaaaatgagtctacttggaatattaatgccacatcttactcgccagccaattctacccaaggtcaattagccctaatagaagcaagaggcctaactctacaccagtgtgcccaacccaggtataaaccgtccattattcaaaggatttcttttcccattcaggagaatgacaaagggtaagatcctgggagacaggaatcaaagaagatagttctgaaaggtgcttcaaaaattatacagtgagcccaaccacctccttttagtttatattttattttactgagacagggtctggctctgccgcccaggctgtagtgcagtggcgcgatctctgctccctgcaacctcttgcctcctgggttcaagcgatcctcccacctcagcctcccgagtagctgggactacaggcatgcactactaagcccagctaatgtactgtgttgtatcgtgtgtgtgtgtgtgtatatatatacacacttttatatataatatataatatacaatatataatatataatatacaatatattatatataatatacaatatattatataatatataatatacaatatattatataatatataatatacaatatattatataatatatattatatattatataatatacaatatattatatgtaatatacaatatatgtaatatacaatatattatatgtaatatacaatatatgtaatatacaatatattatatataatatacaatatattatatataatatacagtatattatatataatatactgtatattatatataatatacaatatattatataatatacaatatattatatataatatacaatataatatatataatatataatatatataatatacaatatattatatataatatataatatacaatataatattatatataatatataatatacatattatatatatgtattatatataatatacgtattatatataatatacataatatacatattatatattatatataaaataaatatatattatatataaaatacatatataatatatatatatgtatatatacacttcgagacagagtctcactctgtcgcccaggctggagcgcagtgtcgtgatgtcggctcactgcaacctctgcctcccgggctcaagcgattctcctgcctcagcctcccaagcagcggggactacaggcgcccgccaccacgccaggccaaattttgtatttttagtagaggcagggtttcaccatgttggccaggctggtctcgaactcctgatctcaaatgatccacctacctcggcctcccaaagtgctgggacaacaggtgtgagccaccgcgccaggccaatttattgtatttttagtggagacggggtttcaccatgttggccaggctggtctcgaactcctggcctcaagtgatttgcccgcctcggcctcccaatgtgctgggattgcaggcgtgagccaccgcgcccggcctcagccacctcattttacatatgaggagaccaaaggaagagattaagccgtagttcctggccaaaggaaaaaagtacaagccagatctccagatcttgtgccccttcactaaataaatcacgtcccgtgcggacctaggctggaaacaaaccactcagcgtacgcccatttaattaacttccacttacacctgggcgcagggcgagccctagccccacaggaaacccacgattaaacgagggggggactgccgtgcggccccgccaggaagggcccggagagagtgggggacaccgccctgtgcccccagcacccggtggacaggcttctggggcttttctcttcctctcccctttctttgggacccctcagtgttcccacaccccactttccccagccgctcggacgctcgccacacacctcggcccacagatgcagaagcgcctcggcgttgccggcagagtgcgcctgcgccgatacgccatcgcgctagggacgctattgtgggtggagccagccggcgggaggcgggcccagagcgggccgagggggcggggtcacgagccgccagccgccgggtggagggtcccggccgggagccgcggaaagagtagggctccccagacaacggggtccgacgagcagttgggcacgggctgagtccgcctgccggcaggtaggacgtgaaggcaggggtggtgtgggggcggacgggggcgtcggcgcagctgggcgcggtggggagcggagaatggggagggcagggaccgggcacggccgagcaccgccgtctggcgcgcggaccggaccgaccagctgacgctcggctgggcgtgagggcctctctctctggtggtcgcgagcctgactcgtctttccctgtcgctgcctttctctggctgctgtcgaggccttggggagtgcacctgccggtccgtcttcccgggctcggtagtcacggagagatgaggaggaggaggaaagggcctcaccagtcacttctgagccttgcagaccaccgcttcctgctccctctctaaccccagagatggaatagattgaatgctgagagagctctaaactcggcaacggtcattttaaagtgaaagaccccagaaggttctaaagttactccctttccccaagtctgttctgtaagtctaaaggaacactgtcattatttttactagttgagatatgagattcttgttttctgttccttaggttaaattgtacttcccgcattaagctcatgctgccttttttttttttttttttgagatggagtctcggtctgtctgccaggctggagtgcagtggcgcgatctgggctcactgcaacctccgtctcctgggttcaagcaattatcctgcctcattctccctagtaactgggattacaggcgtgcgctaccacgcccggctgattttcgtatttttagtagacacggggtttgtccatgttggccaggctggtctggaattcctgacatcaggtgatcccccgcctcggcctcccagagtgctgcgattacaggtgtgagccaccgcgcccgacctcatgctgcctttttttttttttttttttttttaacatcgtgtgtgttcatgtgatcgctaaggaacccagctcttccatttagttccctctttctatccctcaaatcttttccaactggtgatttccatattgttgcactctctttaaaataaaaaaattgcctccaagtcttcttcttcccaagtatcttttatttgctttttttcatcttgcatacattctcttccttgatctcatcagttccatttttgtgcacttgatgtgtgtcagctattattctagacgcttgggatacaatggtgaacaggtaactaattttggtgggggcagagagactctgaaatcagttaaggaataagtaccatttggtgatgtgataaagagtgactagaggggttattttggccagggggatgtcagaaatggccttaatttctgcatttaaaaacttctgtataccagtaacaattaactaggagttttaataataaaaagacactattcataatggcattcaaaactaaaggtacctagaaatagatgaacctaaagctgtgtagtcctttagacagaaaattgtaaggctctgttggaacacaaaagatgacccaagtaaatggtgagatataccgtattaatagatggaaagactcaacaaaaagatgtcagttttcctcagttctacgaattcagtgtaatgccaattaaaatcaccatattgttttatggaatttgccatgctgaacttaaaatttatatggaaaggcaagggaccaagaatagtgaagtcaattttgaagaagaagaaaaataaggtctctccctatcagataccaaagcttaatataaagttgtaattattaagatggtatgatattgattcagggatagagaattagattcatgga

SEQ ID NO: 585219 - DNA, 4001 bp, Homo sapiens
tacaaaggcaaattgttgagaagagctaccatctctgaaaagcccatatcagaaagagttccatctatctgacatcctcctaccttcatactccccagcaaagacacagctgtccacttgcagaatgggcctctcagtgtcaatgccctacaacagaataaaggatcataaaaaaaaaacataattagaaaaaggcttcaacattgtaaccttgctaccaaggaaactaatctccaaaactggggaacctctagagcatcttgtcctaccaagtacaggataaactacaactgctctgatcacagcagttacaacctgaagactacttaattcatactcaagtaacaaggtttatttcaatcaacatcctgttcaagagtaagctaaaaacagaggaagttttgtcaacagtagtgcaaagagtctatctgtcatctatttattttttgagacagtgtctagctctgtcacccaggctggaatgcagtggcatgatcatgttcaggcaatcctcccacctcagcctcctgagcagcagggaccacaggcgcatgccaccatccccagctaatttattattattattattttttttttttattgagatggagttttgccctttgttgcccaggctggagtacagtggcgcgatctcggctcactgcaacctctgcctccagggatcacgcgattctcctgtctcggcctcccgagtagctgggattacaggcgcccaccaccatgcctggctaatttttgtatttcagtagagacggggttacaccatgttggccaggctggtctcgaactcctgggctcgtgatctacccgcctcggcctcccagtattgggattacaggcgtgagccaccgcgcctggccatttttttttattattattttagagaaggggtctcgttatgttgcctaggatggtctccaattcctgggctcaagtgatcctcccacctctgcctcccaaagtgctgagaatacaggaatatatgtacggttccatatcacaatgttacttcctccaaatctgtaactttctcttcagccacacattcaaacaggcaagcaaagttagccattttctcctatctgctcccatagtccccgctgtacttctacattatacttaattacatattaattaattatacttagtatacttcttatccttagagttcactactttgtaaggtgaaataaatatatcaatacttgcggataggtatttcaccattgattcttgttttacatttaagacactctagaacaatccccccaagtctagaaaactcaccaaaaccttgcatttattttcacattttgagaggaagtctgaatcaataattcctgataattccaccagaaccaactgctcctggtgaaagaaagaggggttaacatgctagcacgcgagcggccaagagggagcaattagcaaaagaagccaaatttcccacatttgtgaaaaccggaccctgttttcagcaagaggaaactacgctacctaaggtaacttcccggtacttcccatcccaagtacggggtgacgattagggctaaggtcccaagctgcccggctcctcgcgcccaggagcaagaagccggtgaggagcagtggggcctccctccggcccgcagctccccaactcccttccccacacacagccagcacaggcatcaccgccactgcggtgcaggcttttggcgtagcgcttactacctcctcttcctcgtcttctccgtcctctggactccgctcgtccgccgccgccgccatggtcccgcggcgcctcgccttctagtcactggccacgcccgcccggagccgccatcttgagtacgggcttcagctccgaggcgaagcagcttattgggttcctgccgctccgctcctcgccgcgcaaattgcttctgccagaactcgagatgtcggcttccggcgggcgggtggctacgggcgccgagagcgccggtacccacgtggagactcgccacgggcctcctcgtttctcggtgcctcagagcaggggctgggggtgggctgccgtaggcagcggagcccgctcggtcacgcaagagtcgccgggctctcggccccgctggcggggaggactggcaaggcagaagggataaaggcgaaaacaaggaaaccatggtttcaggcggatcatggacagaaaggccttgtgtttgacccgagcacatttcttggaaagaaattcttaatattgtgtgagcgctcatcctcaattcaacgtaccccaagccaagttaaaggcacattcagtttaatactaatgagcgcctacacagtaaaaagcactgcaccaggagctatgaaaaatagaaagtgggcttaagtttcaggcctgcaggagcataagatctgtgagaggtacataaatggatccaagcaagtgctgtaagagatacacattgttataggaacacagagacctgggcaagagaagtttgaacagaattttcagaagtatcccatagatgtttgtgattgtgaaagaaacggtcttcgtacttgcgatagcgtgatctagtggttaagatcgtgagttttggatttttatttatttatttatttggagatggagttttgctcttgttacccaggctggagtgcaatggtgcaatctcggctcactgcagcctccacctcccgggttcaagcgattctcctgcctcagcctcccgagtagctgggattataggcatgcgccaccacgcccggcgaattctgttatttttagtagagacggggtttctccatgttggtcaggctggtctcgaactcccgacctcaggcgatccccctgcctgggcctcccaaaatgctgggattacaggtgtgagccaccgtccccagcctgagctttggattttaataccagtcaagttctgctgcattattaacagcaaggctttgggcagattggtggttgtgaggattaaatgagacaatacatataaaataaatttagcccagtattcagcacatagtaagcatttaaagtgcatttaatctattattagtagtaatatataaattttttagtatgatgctctttctctctttcttttattcattgtttgtttctttctttctctctttctttcctttcttttttgtgacagggtctggctctgtcgcccagcctggagtgcagtggcgccatcgtagctccctgtaccctcaaactcctgggctcaaagggagcctcctacctctgcttcctgagtaactgggactacaggtgcacgccacagcgcctgtctttacataatggttgtatgagtgtgccataacttgatcctctattttttaacacataggttatttacaatttgtggatattgtaaataacactcttttgtgtatatttttgtccagttgcctaattaaatgtataggatttcatagcttaaaaaagtagaaggaacactggacctgttagaagtacatttcaattctagctctgaagcttaataattgtgaagttttccaacctcagttttcttatttattatatgaggatgaaaataattatacttaacaccgggtgcggtgtctcaagcctgtaatcccagcactttaggatgctgaggcgggcggatcacaaggtcaggagattgagaccattctggctaacacgatgaaaccctgtccctactaaaaacacaaaaaaattagctgggcatggtggtgtgcacctgtagtcccagctactccggaggctgaggcaggagaatggcgtgaacccgggaggcggagcttgcagtgagccaagattgtgccactgcactccagcctggccgacagagcaagactccgtctcaaaaaataataataatacttactgtgtcttttttgcttggaaagcaaaaattcaatcgtatatctaaaaatacttggtaaactgaaaaattacataaattgtcagattttgagggagatgtggggagagtaaggag

SEQ ID NO: 585220 - DNA, 4001 bp, Homo sapiens
cccatgcacctctcccttgctgttaaagcccaggatctcgaagctgatgctggaggttcggccagactgaatctcatgcaggtggcggaaaaggttgagccgagcccggccccgcccattgtccagctctccctgggtcaggactccaagcagagttgacttcccagagtccacattccccaggacggccacacggaggtctaggaactgtggatgaattgccagagataagaactccaatctctcacccctctaactgaagactgggtcaagggcagtgacgctccctagggagcaagtgatgaactggaagcccccaggatcccaggccaggagacagcctgccaccacagggcccttccacagtgtggacatgagagacagggatgggtgtgtgctcacctgttggttgtcagggacctttcgtactagcacctcggtgatcttccggggcatgtcgctatcataatccacttctcgctctcgaagaacggttatgtctgccccaaccctgtcacagcaaggccacagctgccatatctcacctgtccttctcctattccaggctcgctctggacctacagacttcctgcacctcccacagagctcccaataccttagtgcacttcctaccaccctccaatctattcctcattcacagttccctttaaaacaaatatacatatcttaattcaaggagcaaaacagcctaggtccagtgaggaggggaccaaaacactaaccctccccacttcagccctttgtcaagagaaggaaagtcccaccttggcccctcaggccctaggtaactgggtatgcatgggtccccccaagtcaggtaaaggagaactggtggggaaggggaagcatacttctctgccatccggtgcagggtcttgagcgaagctcgcatttcctcctcagccagccccaccagcagcccattgtcctctaccccaatctggtagacggcctcaccacgtccctcctggagccgccacttcatttgtgtcaccaggtgctcaaagcggtactgggatggattcaccagcttcaacttagggcaagtggggtatcataaggtgaaatcagaggtgttcctcccaaacctacatggtccccacctgttctgctgcaaggaccaggactttctctttccacttaaactcatacctgatccccctccaacagaacgaggtacagagcccttaacctgaaccatatccttaaactgctataattatgaagttggaaggctctcagagaacttatcccatgctggtggatcaccagaggtcagcagttcgagaccagcctgaccaacatggagaaacctcatctctactaaaaatacaaaattagccaggcatggtggcgcatgcctgtaatcccagctacttgggaggctgaggcaggagaatctgagattgcgccactgcactccagcctaggcaacaagagcaaaacttcatctcaaaaaaaaaaaagaaagaaagaaaaaagaaattatcccacactggcaaggacaacctaccccagcccctgcttttccccagcctaggactcactttatattcaatgtttccatcttcagcctgaaaagaaacagtgagcagttaccatacactgtacagacccaatccctacttcccctcaattcccactgggtccaggtagctaacttgagaaagcaggaagccccactggcacttggttaggcaagtgcctgtcaaaggtcagtggcagacaagatcctctattcacccccagcatagcctctatgaagggaaggcctataaggacacaaggagtcacccatttaagccaggaacagaacactgaatcaatccattctttgatcactggcagcacgttcttcctagatgcaagatcatcccttcctccccacctccagggcctcaaacctgcttttcccagaagtctatgtctcctctgtgcccaggctgttaaaacctttctttgtcactggtctaggaaacaccatttcctccctgcctgcccctttcagctgatgtcatctagagtaagaggctgcaagaggttctggatcagagccaaagggtgagctcagcaatggtcactacaagcctgatgaccgagaagatctaggtgagagaggagaagagctccaaagctggggctgagaggaacagaaaaactcagaaaatgtaatgaagcggacagactcgctatggcctttacctcttgccccctaacctcagtggaggtgaaatcctgaatccaccccacagtctcttctagctccagtgggtagcacagcacagaagcaccctgttacctgaggcttcccctcccaggtacaaagggatatgggatttgcctgtttggccagtctgcatttttctacccgcctctctggatattttagttttcctcttcccttcctatcattccatcccttcaaggctgtctggctcccaggccctaacaggtcttcactcataatctccacttcatggtgtgttaaggagattattttttttccccatcaataaaaaccttttaatcatttttctggggatgggtggcttcaaaaaatgtggtacaagaatgacagtctagggcccagaccaatggttcccaaagtgaggtcctgggaccagcagcattagtatcacacgggaacttataagaaatgcaaattctcaggcccatcctcactagtaagaaagaatcagaaattctaggctgggcacggaggctcacgcctgcaatcccagcactttgggaggccgaggcgggtggatcacctgaggtcaggagtttgagaccagcctggccaacatggtgaaaccccatctctactaaaaatacaaaaattatctgggcgtggtggcgggcacctgtaatgccagctactcgggaggctgcagcagaagaatcgcttgagaacccgggaggccgaggttgcagtgagctgagatagccctacagcactccagcctgggtaacagagactccgtctcaaaaaaaataaataaataaataataaaaaaataaaattggccaggcgttgggggccagcaatccgggtgattcgatacatgccaaagtttgataaccactggcttaggctgtgtgtgtgtgtgtgtgtgtgtgtgtgtgtgtgtagtgaacatactgctcttttcccgagtactgtgtgtgtgtccgtgtggaacatattgctcttttcccgggtactccccttctccctgtggaacaagtttagaagaagtggtggttactgtctgcctctcgtcccaggatgcagtctctcttgccctatggcggcacacgcagttggtcggggtgctcttcctgggatcccctttctctacttctctcctggggtaatctagatcagaagggggagtcctccctctccactcttcctccctgaggtcctgtcacctgagagtccagtctctgcccttcctccctggggtcccgggacctgaaagaggtgttctcctcccgtgcccctcctccctggggtctcgacaccggaaggggagattaattatctgggtcccgcctccctagagtcctgggccggaaagagtggcttcttcccgccctaccacttctcaggtgctcacctcggggggcaaatacggggggttgttggctttgccccctctgttccttccgttcttcttctttccctttggccccccgcagccgctgctgctgccggcccccctagccttgagggttccgcccacggccgggccccctccgggccggcagcagccgccgaacagctccgatacccgcgagtccatccgccgctgccgccagccccccgcccggcccctcccccgaccgccgccgccgtcgccgccgcccttactgccactgccgtgtccggccggcctgagcagagtggggtggggctctgcacaagctacgccccccacctccctggcctccgggtcgcgtcagaaacagccgcggggcaccacgggatatagagt

SEQ ID NO: 585221 - DNA, 4001 bp, Homo sapiens
atcccttcctccccacctccagggcctcaaacctgcttttcccagaagtctatgtctcctctgtgcccaggctgttaaaacctttctttgtcactggtctaggaaacaccatttcctccctgcctgcccctttcagctgatgtcatctagagtaagaggctgcaagaggttctggatcagagccaaagggtgagctcagcaatggtcactacaagcctgatgaccgagaagatctaggtgagagaggagaagagctccaaagctggggctgagaggaacagaaaaactcagaaaatgtaatgaagcggacagactcgctatggcctttacctcttgccccctaacctcagtggaggtgaaatcctgaatccaccccacagtctcttctagctccagtgggtagcacagcacagaagcaccctgttacctgaggcttcccctcccaggtacaaagggatatgggatttgcctgtttggccagtctgcatttttctacccgcctctctggatattttagttttcctcttcccttcctatcattccatcccttcaaggctgtctggctcccaggccctaacaggtcttcactcataatctccacttcatggtgtgttaaggagattattttttttccccatcaataaaaaccttttaatcatttttctggggatgggtggcttcaaaaaatgtggtacaagaatgacagtctagggcccagaccaatggttcccaaagtgaggtcctgggaccagcagcattagtatcacacgggaacttataagaaatgcaaattctcaggcccatcctcactagtaagaaagaatcagaaattctaggctgggcacggaggctcacgcctgcaatcccagcactttgggaggccgaggcgggtggatcacctgaggtcaggagtttgagaccagcctggccaacatggtgaaaccccatctctactaaaaatacaaaaattatctgggcgtggtggcgggcacctgtaatgccagctactcgggaggctgcagcagaagaatcgcttgagaacccgggaggccgaggttgcagtgagctgagatagccctacagcactccagcctgggtaacagagactccgtctcaaaaaaaataaataaataaataataaaaaaataaaattggccaggcgttgggggccagcaatccgggtgattcgatacatgccaaagtttgataaccactggcttaggctgtgtgtgtgtgtgtgtgtgtgtgtgtgtgtgtgtagtgaacatactgctcttttcccgagtactgtgtgtgtgtccgtgtggaacatattgctcttttcccgggtactccccttctccctgtggaacaagtttagaagaagtggtggttactgtctgcctctcgtcccaggatgcagtctctcttgccctatggcggcacacgcagttggtcggggtgctcttcctgggatcccctttctctacttctctcctggggtaatctagatcagaagggggagtcctccctctccactcttcctccctgaggtcctgtcacctgagagtccagtctctgcccttcctccctggggtcccgggacctgaaagaggtgttctcctcccgtgcccctcctccctggggtctcgacaccggaaggggagattaattatctgggtcccgcctccctagagtcctgggccggaaagagtggcttcttcccgccctaccacttctcaggtgctcacctcggggggcaaatacggggggttgttggctttgccccctctgttccttccgttcttcttctttccctttggccccccgcagccgctgctgctgccggcccccctagccttgagggttccgcccacggccgggccccctccgggccggcagcagccgccgaacagctccgatacccgcgagtccatccgccgctgccgccagccccccgcccggcccctcccccgaccgccgccgccgtcgccgccgcccttactgccactgccgtgtccggccggcctgagcagagtggggtggggctctgcacaagctacgccccccacctccctggcctccgggtcgcgtcagaaacagccgcggggcaccacgggatatagagtccccaggcctgggaattcacttaaatgacacgtcgccgccctacaactcccaggaggcatcgcggcgcaagtggccgcgggagtcgtcggaggcgtggggaaggagcgcgccttggcgcgcaaaggcttaagggagctgtagtctgacttccagtcctcgcgctatgttctttttctaggacttggggggaatttagagcctcgaggcctggggtggggacgcgaggacaccagcgtagaagagcttacatcagaatcgagctttgtgggcgctccgggatttggccctttagcgcggatcctagacaacaggttttggacctcgagagctgcagaactgaggctactggtgccgccagcctgctggctccgcctctgcctcagtttcttcccctatggcccgcgtgccgctggggtgagtcagggcgaacgccagggcggaggcggatggtgattagccaaattacggctgttattgttgggatgattatgctacctttacatagtagtcactgctttattaccaggctggcaccgtccaggggctggttttaataaccggaggcaccgcggtggccccgacacgagacccgaacccgtaaaccagcttcctccccgaaggctgcaagcatacccaaagcgagtattcctcctcccctttgttttgaagcagaaccaatcgggaagaactgagtttggttttaaacggccaagactgtaggaggggcctggcccctacttcgggcggggctagggctcgggttacaccaaccaccacgagggcggggcagtggccgggaatagaaacttggcctagggccacaggggatttttggcttttgactctcttgtgaagcaatctccagctctttagtgctgttgcactctacagagtacatacattcagcgacataagccagtgcacagaacacagaaaggcagggtggaaaagcagttatgttgctgagctgcgagtcaggacgctagggctcaattcacagccgcatggctgtctcatgactcagaccactcacagtgtgtccacttctcccctcttctcgaactgcgaggtgctcatacacggtcaagaaattaaacaactcagccgggtgcggtgcctcacgcctgtaaatcacagcactttgggaggccaaggagtgtgcggatcacctgaagtcaggtgttcgagaccagcctggccaacacagcgaaaccccgtctctactaaaaatacaaaaattagctgggcgtggtggcgcatgcctgtaatcccggctgctcgcgaggctgaggcaggagaatcgcttgaacccgggaggcggaggttgcagtgacccgagatcacgccattgcactccagcctgggcaacagagcgagactccaactaaaaaaaaaaaaaaaaaattagcccagcatgatggtgcacatctgtggtcccagctgctcgggagactgaggcaggagaatcgcttgaactcgggaggtagaggttatagtgaactgagatcatgccactgcactccagcctgggtgacagaacgagacttcgtctcaaaaaaaaaaaaaaaaaaaaaaagaaagaaaaagaaattaagcaactcttctctccagacctcagttgtccttggaaaactagaagcagcaataatgacttacctctggtgatcccttcaggggttcagacttggtagagtccatggcttcctcccagggccacaaggagggaggcaggtttactgatcatgctgtccacatagcataatttcccaaagcagtgagagcagagagaccaaaatctgcaaaagggcctagctgaccataggccaattatgtgggtcttcagtggttgaaagcacatgtgacttttcttagtcctgtgccactgaaggaaa

SEQ ID NO: 585222 - DNA, 4001 bp, Homo sapiens
tgtgatggtgcacgcctgtaatcccagctacttgggaggctgaggcaggagaatcacttgaatcagggaggaggaggttacagggaggaggaggttacggggagctgagatcagccaatgcactccagcctaagtgacagagtgagaccttgtctcagaaaaaagaaatatcccttcataacccccatccccacaggcggaccccacaaaggcctttcagatgcacagtacacatgtattaatatgtacatatatactaatatgcgtttgtcccttatgccggggtttagagtgaggaagtgcatgactcaagagtggggctttctgagtagggcaagaagatctcatctgtgatattactacaggttttctaggaaggcaccctgtcctctcaaatcctccagggccataggcacatggccttgcccagtgagaaattccacctgtagcctcctcactctgggggaaggccttgtgccttattgaaatgcaaatagcacttgggtgtgaaggctggtgagggcccccaggggcacgtggtgctgtccaatgtgccttggctttggtgtttgaaggtctgagctctgggcctgaccctgttcttacaggtcaggcgaccttgggcaagtggctgagcctctttgagcttcaggggcctcatctgcaaaatggggataataaggctatctaattcaccagcttgtggtggggtgccatgagtgctgggaacggtaaaggcacagtgcaaatagtcattactctcagcctctcgggcagttacaccgtggtttcacacacatacctgtctgaacctataggagagcacgtttccctttgggggagcacaggggctttgaagggagtggttagggaagccgggggtaggcctcagcttcctcatgtgactgggtagcatgagagcctggagccagctaccccagttcaaattccagttccctgcagggcccggtggctcacacctgtaattcagcgggaggttgaagtgggaggattgcttgagctcaaaagttcaagaccagcctgggcaacattgagagacctcatctctattttataaaaaagtaaaaaaaaaaaaaaaagaaaaaaaaatggctgagcacagtggctcacgcctgtaatcccagcactttgggaggccgaggcaggagaatcacttgaggtcaggagttcgggaccagcctggtcaacatggtgaaaccccgtctctactaaaaatacaaaaaaattagccgggcgtggtggcaggtgcctgtaatcccagccacttgggaggctgaggtgggggaatcatttgaacacaggaggcggaggttgcacttagctgagattgtgccactgcactccagcctgggcaacaaagcgagtctcaaaaaaaaaataaatagaattccagccctctcactcactagctgcctgatccttaggcaaattataatctctgtacctcaattttccgaagtataatgtgggaataacaagagctctacctcatagggttcatgtgaggacttaatgagctagtccatgtaaggtgcctagacctcttaagcactcaaactttagctacaattattatttatctcaagtttgccttggagatggtgtaacacgaaccaaacagtccaggacacactttacagcagtgaaggggcagaggaagcaagatggagggtgtcctgttccctctctccatctccccagagagatcgcagaggtccgacagctggggagtacaaggcaggcagcagcaccagcaccagcacccaactaagccttttgtaagaggacctacctcccagccgcacatgtgaggctggctggggctttcatgctctttcctgcccatcaggcttcttgtgaccccgagctgaccttccccagccctgtgatttcatcacaccttgcacatcctggaccagggcctttcttgatggtgaggtggaacttctggtggtcagggaggactcttggcaggatactgagagtgccaaggtggggagaacttgtatggggcagggggcattgtgacacctctttacaacacaattccttctgtcttcccaaggagacatgaggccagggctggggactgacgtttcaggacctggaagggtcttttaaccttgacactggcccactatgctattccctcttcccacaaacccatagaaccctaaaactgtgggcaggaggtgaatggagagagatcatcctaattatcaaggtgcctccagaagtcctaatatccccccatgtcccaatatcactgtcaggaaggaaatgtaccttggcaactcttcattctatctatctatctaatctatctatttatttatctatctatttatctatctatctatcatctatcatctaccacctgtcaatcatctatttatcatctatctatcatctatctgccttccaaattacagagatgagtggatgaatggatgggtggacatgagtgggagggtggatggacaggtggatggactgggttggcagatagatggtggatgggccaacccttgtgatttgagccctgctcatctccttagcctcatctcttgctatctttcccttgctctctatggagtagctagtttcttagacatgccccactctctcccctctgagcctctacatatgccattccttctcatggattgctttgaacagagggttgggagataaagggatggatgaacaggtggatagacagatggctgaataggagtgaccatgtgtgagtggatggatggatggtcagtaaatggacagatggtgatggctgtggtatagaggattgcaggtctgggagttagaatgcctgagcttgaattctggctgtactactttactagtgtgtaactttgggaaaattaattgacatctctatgcttctgttttctcatctgtaaaatgggtaaagtccctacctaatagagttgggcaaagcacttaggacagtgcctggtacagagtaagcattgagtaaacatcagctatgactatgtgtgggtgggtaattggattgatgggtgggtggttgaatgggctgtcctgtccccatcttcaaaaatcagctcccctacctccctagggtcctgtctccccaataccacacttggtaggcagcttccaggagtaatgtcagaaatcccacatgtaggaatgacatgggcttctcccttggttgaggggaaggagagagttccagcgggaggtagatagagctattgggtgccttcctgccacaccagcttgggctgggcccggaattatttgttttcttcctggccctgagtcaacgctgacaagatgcactttggggccgaaggcagactggaaattggggtgttgatgacttgtgtgctgtccctagatctcacaccctgatggtaatgacccctaatttctaaggaggctgggaggcaccaggagagaaagagaaggagcagcggagcattaactgggcttcccctgccacagcctctgaccggcaatctccaagcgctctggggagggtggagtcttgtttggaagggaggctggggacatggcattctggacagagtgcccagcatctctgcatctgggggaaaatggcctgaaggagctatcaggagggagcccaggtgtctgggtgtgggtttgggggagccacggcttagcacacattgtactttgtctcagccaaagtggggtgaggtgctgggctgataaccaggagaactgggtgacctgagacaagtcctgtcccctctccaggctcagtgtcttatgtgtatcatgaggacattgtgtccctccaccttggatacttgatgtccaaggtggggagaacttgtgtggggcaggaggcattgacatctggtggtaggcccctgccagcagtgtacccagcccaggccatgtcagcctcactgtggggagctcaagaggaggcagtggctggggagatcgcctttaggaagtcc

SEQ ID NO: 585223 - DNA, 4001 bp, Homo sapiens
gtatatgtataaattatgtatcatgtatatgtatatatacttataggatacattatatatatgtatgtatacagagagaggcagaatgataaagtaaatgatataaaatgtgaataactggggaaatttggataaattgcatatgggagttacttgtatcattcttataactcttctgtaaatttagaatcatagtaaaattaaaaagttattcaaaaaggaaaaaacattgatgaacatcatatgccgatttataagaagagatgaggtataaggagtacaactatatgcctaggggcttaatcagccctttggatcttgaatcatgatcgtattgatttttagatgaatctggggaagattgatggacttaaatgagtcttattatttatgacctgatatatttgtttacttttcttacattttaaaaaaacatcaattattttaaaaagtcatcttctctctttaaaaaacctgccttctaggcaggagcacttaagaccttgggcaaatcgattcattcccttttgcccagctttctcatcatttaatttggaataacaaaagtctgcccctcccacccagggttgctgctgattcagaggagacctaagagaggcggagcgctgagaagtccgaaactggctctgtgccctgtggggtggtcgatggggttcatctctaaggaggttctgttgaattgaaggtgctgacctcaccctcctgtcccgggacaggcactgtggggacgtgcactgactggtaccagcgacaggatgagacctgaagtggcattcccagtgattcagcttagaaagctaagttctccacgcactgaggaatggagaactgacactttcttcagattaaattggtatttgaggcaaataccagggcatttgaggtatttgaggtatttgaggattgccagggcactgaactggataaccttaaataatcaaggggtttttaactgaattgaaatttaaaattcaatcccctggtgcatttacaagatgtgttatcttcttagctgctagtgacattgtgggcttagagaaactctagtctgaatgatttaatgaaaccttccaggacttgaagagctgaaaggggcttttgcagtcattcgcccagtctcccaatacatgcaggagcctcttccagcattcttgacagggaggatctgaccagtctcagaagaaccccaacaagagggagctcatagcccatgctaagataccttgtctcatttagaacatctcttttgctcctagtgtttagagtgacaggggctctggcagatgcgaaaacccggtcattgggctgcagagtcttggtcaaaaatacacaaagagaggacctggactgtctgccagtcgcccttcagctctcaagaagaggacacagggagcatcagccgacagctaagagatggagggagggaaggagagacagagaagatggaaagggacaaaaggaagagaagagacagaagggtttggtgagtgagacagaaaaggtaaagagagacggagtggaaagaagagcagagaaagagccgaggagtggggaactgggagctctccctgaggacacttgtggaggaaggcgccaggtggactggccactggtccttcccttcagggtgccttaccccattcttgtcgaaggctcggaacatgccctctacatactgggaggcctcctcatcgtctgtgaccttgaagaagcgcttaaactcatgcataaagagtgtgccgctggggcactccatcacaaacttcttgtaccactcctggagctccgccacatctatctcgccagctgcctccgcctcctcccagctaaactcctgccccatgctagccctgaggagcatcagggagcaagggtctgtatctcctccctggcttctgctgatggatctctccaactagggccctcttcctccctttccaggaggcctgatcagcctctccatcatctcctgggtgactgaacatgatcagtcggtgcagggggcaggtggcaagggaggtgggtccaggccagctaagctgccctaagactattagaagattccccaggtggccgggtgcggtggctcatgcctgtaatcccagcactttgggaggccgaggtgggtggatcacaaggtcaggagttcgagaccagcctggccaacatggtgaaatcctgtctctactaaaaatacaaaaaattagctgggcatggtggtgggtacctgtaatcccagctattcaggaggctgaggcaggagaatcacttgaacctgggagatagaggttgcagtgagctgcgatcacaccactgcactccagcctgggggacagagtgagactctgtctcaaaaaaaaaaaaaaaaaaaaaaaaagagattccccaggaagttctgacctccagcctaaactcctccagcctcactccttcccttagccttgtcaacaaagcaaccaagctggccctggtagactctgaagaggtagaaggggaagaaactgagaggtaagcagagagatgcagagtgaagaaagagtcggggtgctaggctgggatcctcccatctcactcactccctatctctttagctgggcctcacattgcttcagggaggcccatcttggagacaggagactcaaatccagagaggaagtgagatcaagtcctaggccataaaacagaatctgctggtgatctgggactcgcccctcagacggtctagtgaaaagaggcagaatctatgatgggaagggctctaggtgagcaactctcttcccaggctaactcggtccctgaagctcctttccagattacacctttcatcttgggagcttttcactttctgatttaaactacaaatgcctccctccaacccttcacacaagacctaggggtagtgcctttttcacatttcctccaaaatactaacatgtgagaaggatctgggagcatggcctaaaatatctttgaaggctcttacttttacattataggtcatgtaaaatttgcttttgaacaattacatattcatgcttattttaatgtaacataaaaatgacacctccaagaaatcaaaagaccagggacacacatttttctttttctttgctttttttttttaaatttctattttttgagacagggtctcgctctgtcgcccaggctggagtgcagtggtgtgatctcggctcactgcaacttccgcctccgggttcaagtgattctcatgcctcagcctcccgagcagctgggattacaggtgcacaccacaacacccagctattttttcttcttttttttttttttattatactttaagttctagggtacatgtgcacaacatacaggtttgttacataggtatacatgtgccatgttggtttgatgcacccagcagccagctaatttttgtatttttagtagagatggggtttcatcatgttggccaggctggtttcaaactcctgacctcaagtgatccacccgccttggtctcccaaagtgctgggattataggcatgagccaccacgcccagtgacactcatttttctagaagacttcagaggcagcagttccagtgaatctatccttaacctacccatccctcactgggtgttcagcctgaattgttttgcacatctccaggcctgacctcctctctcactgttctctgcctccagacgtcactgagctctgaaagctcttttaactttcttgctattcctgaaggagaaatgtgatttcttctgtcatcctttcaagtggtggtgggtttttctcccccacacacacctcaaggtctagataacagggctagtgtcctcctcgcttctaactcttgcctccaaatggccttttacttttttctccccaaaaaaggccagtccctttgaagccacatctgactccttgccactatttacttctcctcattactgtcattcactggtgacttccctgcttgtctcaaagcatc

SEQ ID NO: 585224 - DNA, 4001 bp, Homo sapiens
gcactccagcctgggcgacagagtgagactccgtctcaaaaaaaaaaaaaaaaaaggatgttttctaaacacaaaataaaagactatatgcaacatgattttaacttgttagggagggaaaaagaaataacaatggtaacactgtttataactggatggtgaaatgacatatttttttctatttttctttattttccaaattttctacaatgaaactatattacttttaaaaccaagtaacattatcaaagtcttctaaatcacatttatgtaaaaaatatcgggattcaaactagacaatataaattatacatgtagtcttcataaagctataccaataattcgactacgaaaaataagtaagagtagcacttaagaaatggattcaaaggtggaagttggaaagaaaatatagaaaaagttgaagctagaatctagttaccaaaatctgaattctaaatagagactagagaccattttttcaagaagattatccccaggccaggcgcggtggctcacatctgtaatcccaacactttggggggagcagggtgcggatcacttgagcccaggagttcaagaccagcctggggaacatagtgagacctcatctctataaaagaaaggaaagaaaattatcgccaaagtacccaatcccacatttctttcatgaccgtctgccaaggtctccttccctatcctacaaaccacccagcagcaattcaaagagagttttgaaaaagtaagataaactactacaattaagaaaaaagctattcaccagctacaacctcctcccaacccttctctcacttgggcataaagagccaaaagcttcttagaagcagcactgctgtctcccatcaccactaaaatgtctgaattcctgacgctgcaaacaaaactgcttattttctctccttgttattagcagagttttacctgtcctgagggaaccctggcacgctgaactaaaagtcctgatcctcagggaccatgccttattcctctttgcagatgcgtcctagttaccagctagcccactcaatactagtctgatgaataaatgaagaatgaaggcaggcatgcatattaaagaaaaatatattgtgtttacccatacagtactttaagagtacctgtttgatgtttgacaaccctttgtttgcctgttatcaaaacaaggcagtgccccacattttaaaaaataacaaaaataaaagcccgcctggccccccgatgcagcttaaagtaaacagtatctttggatcatctctatccccagctactgttaaatgacccgcaattatgatgttttctgactccgggtctcgggcctccggctggtattcctgcccctttgccaagacccctaatcgacagacgttgcgagacctttgtctcgctcctcccagcagcggaacccccaccaacccagtttcctcccgaaaactcccacctgccggggtgggagcgtcgggccaggggagttcggggcccggggccgcctctcagctctggaaagtaaaagtgggcgttttctcagctttcagttagtttttccacccgaccttgacgcggccggagctcctgccccactggccgcccccagccccgcggccagcctggccccgcgacccggctcaccctcgggcaactccacggtgcgcgcgcggcgcagcgagcgcgtcaggcggttgagttgctccatcgctctctccatcctcggcgcgccctccgcgatcctccgcgatcagccgccccaccggcggcctccgcgcccagagccctacatctcgcctgggcccgtccagcaggcggagacgcgggcttgccccggctagagcactgagctgcgagggctgcctggggccacgtcctgcgtccgggggccgggctgctgccggaccgaccacctacagtacacccgccgccgcctctgctcgcgcctttcctgcagcccccgccgccgcgtccctcccgggctcgcgtggccttctgggaactgtagtttccagctggcagaacggagcgccctgggcggagtcacgttgggggcgcccaggccacgccaacgcgggcgcagggctgagtatgcgggaagccacgcagcgactgggcgtactcctaagcttctggaaaggcattctcacgccctgctcctcctaccctcctccaaagttgtacaggagcagtttcctccaattctataactttactataaaacagattagaaattggcacaattgttcttaaatccgtcaccacctttctagtactgtattagtgcctttgtttcaggtaccctacatgaactgttttaagtatggtattttcatatgtcaaacttaaagagtaataaaatcaaacaaatccaaaagcatattgtgcttttgtcttcattgtaaataacttgacaatagcttaattagttgtttttcctgccgggcggctttatgagggcagggacatttaatcttgaactgtgttgtatccctgtacttaacaaggcacctagcacaaagttaaagctctggggaagatatgaatgatgacaacctgaaaaaattttttcatttatttggtacaatgctaaagtgtctatgtgatgacacagcctagtgggaaatccaaaggatttgactttgtaagttacaaaaaatttggatacctacattgtggaagaaatgaactcagtggcgaaaaatcatattcataagctctgcacagaagttgaacacttgaaacaacagaagttggaacttcaaaaaattaacccaatcaaaggggtaaatgtgagcctggctaacaccaatatatcttggatatattaccagtgccaagatgatgctggagtgagggagaaacaaaaggcttgtctttttcagcttctcttcctcaaagagacaaagctgttcctgaaatgaatgggcacatgtacgttgatgatgtatgttggctggccaagtgaaagagagtctcacctgcccattcaggatatgaaggggcagatggtggttggcatgtgttttccctgccagtgccgtcctaaatcagttccagctagtgaccatttgtgccagtggtgccacaggcacggggaagacctctgtaatcttcacctaatcagatgatacctaaaccagtctggcaacaaggtggtagaggtcaaagtttcaaaagaataccagaggctgggcgcagtggctcatgcctgtaatcccagcactttgtgaggccaaggcaggcggatcacttgaggtcaggagtttgagaccagcctggccaacatggtaaaaccctgtctctactaaaaatatgtatatacaaaaattagccgggcgtggtggtgtgcctctgaaatcccagctactcgggaggcttaggcaggagaatcgcttgaacccgagagacagaggctgcagtgagctgagatcctgccattgcactccagcctgggtgacagagcgagaccctgtctcaaaaaaaaaggaaaggaagaaagaaataccagacgttatggaccagtctagcccaggctcaaccatttgcaacctggcttcaactaaaaatgttccagtcttgcttggcctcttatgctattcaaaaagtcaggattcccactgctgtacagaagttggcccctcagcttctctcagctgctgttatcaccattgctctctaggctgttgctccatataaattacctccaacgtcctgtgaggaccaagcctggagtttgtgggcaggggtaggagcccccagcagcctccatggtgggcattgcatctcatgctggtcactgttcaccacaggagcagaagataatggaacaggtaatgctgatgtgaattgtcagttccaaattctgcaatatgatgccgtctcccaatagctctgcttcaaaatgtataaagctgcagtactactatcagcttatcacctcctgtccaacagaactttctgcaatgatagaaatattctataatctgcaatgtcca

SEQ ID NO: 585225 - DNA, 4001 bp, Homo sapiens
aaactctctctaatgaggttatatttcttaacagaatttttaaattattattctgagaattcaagagaaagcctaactgggaagaagagaaataaactggaccttaatgagtacaacttttataaacaagaaaaggggatgaacctccttaatgttacaggaacagcttggttatgatgtcaccaattgtttcaaagaagcatgacaacatgacaacctaacctcaagaagccaaggtgctccctgaggccaaccacctctcctccatgaagcattccttaacgtagaaatcctgcttaaattccccccaatccattctgaattaagtgttctcatctgtgtatccctcccatagcgttttctcagtaccttttgtagcatttttcatactctaataatctgtaactcgtataatcttctccttttagaccaccctcaaatatcttactttcagtcctcaaagcttagaacagtactctaagcactaacttaatggtggttgaggaaatgataaacaactattaaagaaatgaatgaataataaataggcctattcatgtactttatatttgcaaaaatctctctcaatctaaagtcatttcttaggtgacaatggtccacatgcaataccatccactgcaatatttatttaaaagggcctccattctaaagtaaccaccagaaaattcacatgttctagacggactgaggtcacaggttccaaatggagaacagggtgttagctgccctcactctagttaaagcatactgatgttctataataatctactggggtgccaatgacaatcaccaacatattaagcactacatgttctgcacttcgtaaagcatagttctttattcttctcctgcattagttcatttttgtttatatttttagtttatgtgatgcttggtgatgcctatagttatctactgcatgaagagggatgtgctcctcctaaaaataattctaactcctgttaactcctacagaacattcatacagacatttttatttcattttttaatatcaaaaagtcctttcctatacactctttcctctagtactgccgtttatttacatttcaaaatacatttatatcaagcattaccagccaagaactaagtataaacttcaagatccatctgatcgactcattctttgggcctttttaacatgtgtcttttctaccgtctcctaagtttccactttgaaattcgttgaaaaataaattagcgcaaactgattctgcactaggtatgtatggacatacacaaaaggtttaccatgtaaatctaacacaggtacacgtccgttgaatgtattaagtcaatctgtgttttacaaataagcaacgtttcatggacatttctcaaaggggatctgggagagaggagctagaagcaggcacgttagtgcccaacatgggaggaaacaatggaagaggtgataatgcttacgtgcctaaatatcaccggatctcaacctcaccaatatcctacccatatgacgctatgcagcacctccccctccccaaataaaatcaaccccagagggcagaaatcatgacttaaaaacgacggcatttgaaagcactagaaggcctgttatattccccaactggggctctcccaatcccgacagggcaacactgacgagaaactcacagattgaagtggatgccaacgggctaggatcccagctgtagccgggaaaagaacgtcccggcatgaccctgccacctaccttcatcgtagttatagcctcgaacattccgatgccgggccatgacggcggagagggcgtttgccacagccccttaactccttccaaaacactccgcttagatactgataaggcgccaactgcagcctggagaacccctatgcgccatcttggcttcccgcaggcctctgcgccgagcgcctgcgcaagcgcgacgtcttagctgtgcaccgcgcgacggcaatgcctcagggtcactgtccgcctccctgagggcgcatgcgcactgctgtgcatggcgggacgaggggagggagcgtttgggagtggccccacccaaaggttgggcgacggagggggatggggaaatccgccgcctagaattgactggtttggactaaatgttgcaagcggggaaccttgagctacctacgccagcgttctggattattttccaaatttggttcctgataatctgagaaagctatgcgctcagtaagagcagggaccttgttttatcaaactttgatctttcattaagcacacagtgggcattcaacaaacttgtgtaaacttggaatcagatttagcccaggccggtgcggtggctccttcctgtaatcccagcactttgggaagcctaggagggcggatcgcttgaactcaggtgttcgagaccagcctgagcaacatagcgaggctccgtctctacaaaaaatacaaacactagccggccctgtggtgcagacctgtagtcccagctactgaagaggctgaggtgggaggatcccctgagcccaggcggtcgaggctgcagtgagctgagatcgggcctctccattccagcccgggcgacaaagtgagtgagaccttatctcaaaaaaaaaaagagtccaagctttagagaaggaaataaggctatttttaaacgggtatatattattaaattgagaccctggctatattaggtcaccctgcattcatataatttacgacttcatgtattcactccgttcggcattactatccctagtaaacagcgatttgcccttagctatgtaaacgattttagctatatagacgatatttatcagcatcataaagaaggattcactgaacattcattgaagacataattgtgtgtaacattgcgagtattaaatatagctttttagacatagcactggccttaggtggtaatgctgaatgttgttgatgcatgaatctataacctgctattaaatgtcctcatttctcagaacataaagttaataatgctatataagaaaccaacctcattatactgaacaccacttcagttttagcttgtgtttttgaaatgatgatacttcacatcaaaggcaaatgttgagttctagagataattaaaagcttcctcagctttttgctatgcacaatagaaagaaataagagtaatccaaatttagtttatatttgtaagtggcttggaacgtaatttattcatgcatttgaatgtgtttgactacaaaaatagttgtttaatgtggctccaaaataaaagtttacagaaaaatagagatagttgctaatgttacatggcttaagtgtttttattattttacacccttaggtaatttttattttgcagcctgtttctttgtaaaaaggagatagagacactaactcgcgagctgtgaataatgtatccgtataagaggatttatcacagatcatagtaggtgcttaaaaatattgtgttattggccgggcgcggtggctgactcctgtgatcccaacactttgggaggctgaagcaggcggatcatgaggtcaagagatcaagaccattctggccaacatggtgaaactccctgtctactaaaaatacaaaaattagctaggcatggtggcgcgtgcctatagtcctagctactcgggaggctgaggcaggagaatcgcttgaacccgggaggcagaggttgcagtgagctaagattgtgccactgcactccagcctggagacagagtgagactctgcacccccccaaaaaaattgtgttattaaaatacaaatggcagcttccactccactgtaattgtcaattacaagcttaactacaactcactgaggtatgaagtgaatgagttatagaccacataagcaaagtactacaggaacaatgaataagaaaacgttacttctgtcagataatatataatttgcccttaggtcgtcaataacgcactcctttaaaactctaaatattgcacagcatctactgcatctcaa

SEQ ID NO: 585226 - DNA, 4001 bp, Homo sapiens
aaaataatatttaaaaatgtactaaagttctcagaggtttcttgtctcctcaaataacattctaccaacactctggagaactcctgtcattcacatactatcatctattctgcctgctgagttggtgagagactactcgggatgatttctacccagaccaacacacttgggagagaaggcaaaaatcaggttagtctgaaagcctgataatttccttgtcagtccccattgcagctacaagttctttgcttttgactgcaaagcctcccagcctatctcacctcactcaccttcttcttcttttataaatgaaaatcaagagcaactcctagcctcctccatctcctgtcattttcagcagagacttcctccacactgccctctgcatgtgaaaagtctcccagccttctactcttcattcatcaaggtacactctccttccattcacaatttatttcaagttatccctcccttccaaagccccttttctggaggtatattccccaactgccctaatacattccatcatcgcactcaccatgttgccatctcaccccctccccaaccctcagaaattgtttagggggagggggatgaggggtcgaggaaacccgtgtttgcatacagacctagaccgggacaaatagcctagcattaagcttagtctcatctttggagaaaacaaaacaaaacaaaacaacaacaaacagttgacatgaataattcctgagcctggcaacaagcagactgaaaaaaaaaaatatttggctgaatggatgtaagaatgaatggatggatggatgattgagatctctgtggtacttttctccgatgcccctccttcttgctccaggcatggatcctgtttaattcagcttctatgagtgagtgcacttccctgctttgcctccgtctccactccctgctggttcattaccacctcttgactggagactaaacctcctcgccaaagggcaatgccacctagctcacaaatgctttgtgacttccacagccacagagagcttgctccttagggatgtagctttgtattctgcaagctctgtctcgtcccaacccccctgaaacacccagccacgttacacaaagggatgactgactcccccacctacccacccacacacacacacactcaacaaaatccacctggagatccctgccgcggcccctctccctgcgcttgtaatctaggtgctcgaaaaagaaacgcggtttccccgttattcctgcaaaacagggaataacctttccagggctcggtcccggttcggaaaatcagaaaactttctattattattattattttattagaaaaccccatccgagagcagcgacctctttgtttgcttcccgggggagggaggggtctctttagagccttctcagcccggggcggagagggggtgatagcccctaggagggctgcccgggaggagactcacccaggacgttcccaatgagagccacgacgaacacgatgatgtacccggcgatcaggacccactcatattctttcgggtgcaggtattccctccacaggtaccgcaggaattcctcgtcgtcatagtcggtggggtttaaaaagggctcttgagtttcattcagctccgaagcagatgaccagttgcgacaagggggggagtcctccaatttggtgccggacatcacgggctcaagtccggttccgctcaatgctgcaagctcctctccgcctgccccatgagcactggtgatttgcggtgggaaaggctgcgcggagaggctagaaggggctcccgagcagaaaatgacgtgaaaagttactgagccaatgcctccggagtcttctgccgggcaacttctgcggtggctttgctgtctttacaggcgatgttgcaccgggaagataggcagctgaggaactagggacccggcactggaggctgcagcaatgacaccaggaggagaaagctacgtccggctcagctgaagctcaattactcctcattccagcactcagtccgcagcccacagcctcctccctcgctgagggagagctgaagctgaagaaaaaaaaaaaagtaatgaaaactaatttaatctgtttttttggggggtggggggtgagagttaaatctctctctttttctacttattttctctatttttacgtgcacttattataaaccatgcacagacatgcatcagtctgtggatatgacaaaaatgtcaacatacaattaatacagagcatgttgatacatttgtctttgtaaagcaaatataaaagcaataaggaggtgcctctgtgtttctcaagcaggacaatggaaaagtcattccaggcaaacactttaacatttaatataaacttattttaacatttgacatttgccaacttagtacttgccgagtctttaagacatctccgtcttcactttctccttaaaatttgagaatgagactgtttttaaactgaagggtctatttagctggaatttgtatttgcgatagttaagtgtcatgtgaaatagagctacaaattcttgaaggacgccaagtgtcataaatatgatcatagttaatgttgtcaagcatgacagaccaccaatatactcaatgatattaaacattcactgtaggatgtagcaatctaagcagaagtgctctctctggtaaataccacatcccattgggtctttcttcccattgattcagggctgatgtcacctgccattctctcatgcactggttttgtctctaataataagtattctagcatttgtcagaatgtgaattcatgatccttttattcttaataaacatggtaaaaatattgcatttaagtaattacaatcttgcacttgggaagagcctggaaatcttgtctgaacttcagcttcagagtagaagcctcctgataacattgctgacatgtccccatctagcttgaatgtgaccaccacaattcactacttccatccttatgggagtgctctaagggtgagaaaactgtttcttacattaaaccaaggtctcaagccacgatttgtctttttgagacttttacctctaattcctagtttgcatcttggtgctacacagaataaatcttccacatgacaatgcttcacagattcaaaataaacatcacagccccagcgctcctttatatgccctcatgtttcttttttagtatttttcttttcaatgttgttcaaatgacagtagctcccacctacatctgtttggtcttcctttagacaattgtcaatatcttgcaaaatatgtaactgggaggaagtaacaataatatggtttgagtcttgccagtgcaaaaagtacattattctttggatgcaaccagtttttatatgtaattattttttcaacacacacaagacattggtggtttacactgagatttagttaactaccccaccccctcctccaatcataatttttcatatttgttttgtgctttatggtttataaaattatttcatatgcatttttaaacccctgagggcttagctattactaaccccctttaatagatgaggaagctgttcctggggaaattagatgatttacgaaagataaatggattaatcagcagcaaaaccatctgttctttcttctatttatagaatactttttgggacatagtacttctgttattgtatagatatcacattttatgagaaatattgttgtatttccccaatctgcactaattaaatttctttttaagagaagggcatcaatgggcattttattattttaccaaatatttcctgagggttatttttccactcttagtgatacaaagttaaacaggttgctgtttccatgcattttactttctagtaaagttagattaaaaaaaaacaaactaacaaatacatagggaaaacgttaggaagggatagatgctataatgcaaaccaaacaggatgaggtgatgatgagtagaaaatcccaaaggtcacattagaaat

SEQ ID NO: 585227 - DNA, 4001 bp, Homo sapiens
aatttcaaatcaacttatataatgcatatctagtcctctgaaaaatcatttttaaaagtagggctgttattattctgtcctagctatcgcagatcaatttagatttgttctgtaagatttcagattttccccaaatgacacaggtggttattttatatgtatcagtcattaaaagattaatcctttttaactaaaaagagacagtacggtcatttacaagttaaagtagatttattctgagctggtgctctggggtcttacttctctaaaattttgtgatttacaatacaccacatgtaggaaacagcttccaaaatttgtattgcttcctacaaatcagacaggactttcaggagaaggagcctaggatagattctctgttaaattttggaatcccttctctcaagagtaacctactataaactatttaccaagcctttgtgaaatctgtataacaggttactactccattgagcaagaaaacacaggaaacaggattcgaagatttaatgttactgctcatactccaaattatagaatgcttaagataattaaattatctgacttttataattcactacacggtgacctcaaatttacctcattagaatatttagtacttctgcacttctcccacttctcaaagttttcccataccaggattccccaccacctaggaacagcctttgcaagataccaatgctctctaaatccccaaagcagggtctatttcctgatcgaacaaagagcaacaaagaagtgggtggtaaccacctctctgaggcaagccaggacccatggagtctgatctacaacacaagcagtagcagttccacatctccctaccacctcttatttcctacgaagtctttctgcctgaaactggaaaacccgaactattattgaggaagtgaagcccttccatttgaatcctgagaaagacgcgctcaaagaacccagcgaacaaaggagagggttggagcccacgcaaaacatgggtgtgataaagccacacgcgacctgagcccccaccctcagtaactactctccagcgcccaccgggaggaggggtccggggaaagggtaagccgaggaaggagaagacgctccggccagaccgaacgcagggtaggggaggcgagcaggcgaggaggagggaaggggacgggaggggcggagctctcgcggccgcggggctttgtgtagagtcaaggccgggatagaaattttgcctcgcgggggacgggtcgagggggtaggaggccgacgcggggcaccccaaacctgcgttgccacgaatggtgggcgggagaagggagagaatgggccgcccccttcgccgccgccaccaccaaggcggggtaggccggcgccgtccccagcggcggccaccttcgaggctgcggactgcacggccgaagggggagaggcaggagacaagacgggcgggccccctgattcccgcccgcaggaaccgcgggggctgcgccaggaagagggtctcgttctaactgtgccgggccgggaacgggttaagatgcggccaaatgtcggtccctcctccttcccacccctcagccccggcgcccactcgcgacggcagccgcggaacccagcgcccggccccgcgcgcccaccccgacaccggcccggccgctcaccgtcgtagtagtagcagactttttttttgccgcctccttgactgtacgccatgggctccccggccaccgccgccaccgggctcctcctcctgctgctgctgctgctgctgctgccgccgcggctcggccgggagagaaaagggctgagggaaacgtgggggcgatagtcccgcggggaagggcaggccggtgggaggagaggagggggcgccgggaaggctcggtaccacccggcagaggtgccgaaagctcggaatcggaggtggcagcggcaccaactcgcgaggagggggccaccaaaccacctcaggaggccgcagggaggtgagcgcatccactgcggcctccacgggggaggaaggggcacggctggagaaggaggccgtttcgggctcgaggttagaggccctgttagggtgaacaacctgcgcaaggcggcgccatacacagtgttaaaatgaggaagaagacaagctttcgctgcgcaagtagatccagggagcgtgcagccgggtggacgttctccccctcaggtctgcgcgcagtggttgcgcctgtccccgagcctgcgcagtcggcgcctcgtagccttggcggtctggacccctcctcggcgtcccacgctgctcccctcccccactgtcgcgaagctcccgcccaagccgaccacgtgccgcgagcccggcggggagagcccactcccgcgccccttccgggcccactaccccgccgggctgtggcccatcgccccagtgcctggtagcctagttttctcgtttgtcgtttgttcacttatttattattattattattattttgactcgtaatgggtatgaggtgtaagggggcctattacggatgttaaggggagagggcaccgctcgggttttaataagcatctgtggagctcatttataaggtacagttctaagcacttgcatttataatatattccattgataatctatttataatatttaatctcatttaagactctcaacaactctaggaggtaagtggcaattgtactccttctttataggtggaggcagattaaggaacttgttcttactgctaactgataagtctggaggtttgaactcattctgcaaactccacgcaccctagctgttccactctgcagcaatgctgctggctagacactggaagattggagcagaaagactttcgaaactcttggaggttatgaatacaagtgttcctctgttaaataaatccacatttatcaagtacctaccttaagccagccaccttgcaggtgagggctggaggctaacagcctgttttatagcacccaatcccagttatataaaattgctatccctaccccccaaatacacccctattaaaaaaaaaaaaaggctgtattgatgctggaatttaagagccactaccaaaaataccccttttaatttgctgtttgacttcaaaatcccgaaagtgttcatgcttaaagcagcaattttccccaacctcacccccaagagatttagaaaaagttaagtccagggtggcccctgccctccctccgccccctcctctgtatttttaacaagaccccaggtgactgatgaagttgctagagaaattacggtgagtgaaacactggcctagaggtaaagttaattgaccttctaagttgtgctctatcaagtacaaaatcaacttggaagattctgagaacagaataagtgaatttagtagaagtgaatgttcttccccagggccaacacaatgaagtctgaaatgacactttgtttcttttgggaagacttccctgacccctctcccgccaagactgttctccatgccatgtacgttgtatgctgtagctcaacacttaaccatgttgcagttgcccacaactcgtctgaatgtcccactatgaatggagtgtcataaatgaagggaccaggtttatcttgcatgtaatagtttctctagtgcctgtgacttagggcaagtcacttaaacgttttttgaattgccttatctgtaaaatggggcagtattacttggagagtaatattcagaatctcaaataagaaaattaatatggaatacttttaaaaaatgaagaattatgtgaataagggattattaggattactataataacagtgacaattactaaattactgtttgcacccacagcacctaacattgaacttgtgagaagagcctggacatatcttttgactagctgagaaacgtatttattatttaataattttaaaccaatagaagcaagttacattacctttagaaactggtgtgggaggagttttatcccatgataggagttggccaagagaattc

SEQ ID NO: 585228 - DNA, 4001 bp, Homo sapiens
tacctctttctcagctatgtcttgcacacacaactccaaaaggaagcctcacgaatggatactactatccataaaaggcactaggaaagagcacacagtgtactaatacaatgctagaattttagacataacacactcaccttcaaggccccaatatcacacttaagtttcccctgataccctaggcaggctctatcacttgccaacagaaaccccagattgcagtttacaacaactgaggcaacataacccacatcctaaatttgtatggtttgcttcaaataatttttcttgacctataaactaacctacaaggatttgacatgggtctcagtagtaaaaacgggtgcacacccatagaccagaatctctcacgagcatcaaagtccagctcagcttaccggtctttgttaagacggtcatctttgatcaccatagccataactgccatccggtacatgtgatctgaaacgctctccggcctctggacatttctgtatacccagccagttcgtgggactctctgataaatatgaagaagaaaaagaagttttaaagaacaaatattaactatctgctatgctcttcaagagatgtccaggatataacacacagaagccgggtcataatttcagaacctattacaaaatgttttgctaaactagctaaaatgatagacatctggaatcaaatgaactagagagctcagagaatgaaaggggtagaagacagagagagataagtcacaaagtccattcgtcaaattattctgttactgatgtataattatggaacatatgcaagtcctttaaacaaaaacaaaactgcatttttccgaacaagagttgcggctttttgccttcaaataatcctacacaagcagaaaacactgtattgaagggtctgaacgtgaacgagtgataggcttccaaattctgaggcacaagggataagggcacttctaattgcttgatgctaccagccgtgactcttccttttattcacatcataacttcatcttgtgaaactgcatttcttcctcagaattctacatctctaaggaatgttataaatagtagtcagagtggcatgaaacggataatttactttgaacttgggagagagacggggaagacgcacatgatgaaactcgtgtgtattacattaaatcccgtttggggggtggccgggagaaaagtcttgtttctggaagtaactgtgagacagacataaaaagctccacttaaaatctgaggagccgacagattctgttcttcccacccgtgctcagaagcagccgcgctttacacacacacacacacacacacgagttctggggtcgtgagcacacacacacacacacacacacacgagttctggggtcgtgagccccggaaaagctcagtgcaggcagggccaggccggctgctctccgggaactggcgcggctgcagtgcggacctcgcggcgccaggctctaggctcagactccgggccgccccagctggccagcctgtcccgccggctgcttcctccgtccaccgtcggcaacgcgcggccgcatccgcaggactggggcctttccggaattcggcgtggcggacgcggcgcaggaagggcaaagaccgccggccgagcggggaggccggaagctccgccgccccacagtcccgcccgctcggccgcggcctcccggcctggtgcccgctcaccttgagctgccctaccagccgcaggaactgcagtagggaccgagccccgtggcccgagaaggtcgcagaggagaccgaagccatgcggccaccgaccccggctgggcggagcaggccgcggcgaagctcctccccgtcctcctcctcctccccttccccttgtctttcttccccctcctcttactcttctatctctttctcctccccctcttcttcttccttctgcccctcttcctgctccccctcttcctcctccccttccaactcctcctcctcctcccccacttccgctttctcctcttcctcttcctcctgcccctcttcctctctccccctcctcttcctcctcctcctgttcttattcctcctccccctcctcctcctgttcttattcctcctccccctcctccatattctcacggttttctcaggaccttctgtccagccttcgccttcttggccttggtgtccgctgcttgggcattgctccgtcagtggcagacaccttgcttggcacatacttgacactcagtactctttatgaaaaataaagctctcctttctaaatttatgaacctcgttattcttcagttgacagtgtaaaaccatgaaactggatgaggtcacctggcaagagggtgtgaatgaagaagaaaagacacccaagacctgaaccccaacatttaggctttgtgagatcaagagggaacagccagtgaggtaggaagaggattagtaggtaggatagttgtgtcctggaagccatgtacaaaaatatttcaagaaggaaggaatatggtcaaccaagtcaatgtgaggaccaaggtttgacttccagacttagtaaattcaatattattggttaccctgacaaaagcagttttcagtgtagtgggccaagcagaacctagtgagataattccgaagagaataggagcaagtattacagcacattggagatggggttggggtgctgttaactagtggagagattgtttcaaaacaggagatattatgtatgtttactgatgaaggggatctagtagaaagggaaacattgattatgtaagagacaaagaagagaaatatttgaatgtcggccttgagtaaggaaaaatattcccatctggtgtacaagataaaagatgggctttagataggaatatggagaattcattcaaatattggaggaggacagagtatagggtgactaatcagtcgcacatgtggtcatgggaggttgtagaagttctcttctgattgcttctattttctcaccaaattaggaagcaaagtataggctgggatgttataataacaaacaacctccttatttcctgtatctcagcagtttaacacatcaaaggtttatttctctctcatgctaagtgtctattgtagatcagctagaggatgctgcttgctctaaccttactcagggagctaggaggctttctttgctctcttttgccaaaattggaaaaaagaaaagtggcactctggctcttaaagcctgtctctggaagtgatatatgaccttttgtctacgtatcattggtgaaataagtaacactgccacgtctaacttcaaagggggcctgtggagtgcaatcttgctaggcctctgggaagaaaggaggctagaatgtttgtgaatagaggaggaggcatttgaggtttaaggagtgatatagtttggctctgtgaccccacccaaatatcatgtcaaactgtaatcctcaaagttggaggaggggcctggtgggaggtgattggatcatggtggcagacttcccccttgcagttcttgtgatagtgagtgagttctcatgggatctggttaatggtgtgtagcacttcccccctttgctctctttctcttctgctctgccaggtgaagacgatgcctgcttccccttcaccttctaccatgattgtgagtttctgcagccatgcttcctgtacagccaatgaaataccttttctttataaattacctagtcttaagtagttctttatagcaatgcaagaatggactaatacaaggagaaagaaggcatgaaataatttttttgaagactggttcagcaacaagattaaatatgactaagaaccaaataaatgccaaggacattggggcttgtattaaacgtggttaggataatgacctggaagccatttttatgatggtaagtggtgctaaataaaggaaatatcaagccaggtgtggtttgtgcctttatcccagctacttgggaggcttagatgggaggatcacttgagcccaga

SEQ ID NO: 585229 - DNA, 4001 bp, Homo sapiens
acctgttgatgggaccaggtgatggtacctgaatggaaaatgacactgtgacgaacagcaaagcctgactacaagtcataaaacttcaaacagaaagggagccttccagtttgtctcagcaatggaacagcaatgggaaagctagggccagcgtggaggcacacctagaggtagttcttaaaaattcttcttggaacttccttttattaaaaagattttataaaatatgtgtcttttcttctacgcctgagtgatatatatgacggtagggtggccttgaggctgtggggagagaaagcggcagccaaggatcttcccagggcatcccatcagtggccccagagatctaaatgggacagatatttctcacggtccccaaccaggatattgggcaaagttaagttttcagatctcacaaacaacttggaagcccccaaacgttttgatgaaaaacggcaactcccagaacttcctgggtcagcaaaaggatttgtggaaggcggggggcattccccacatgctgccccttttccctaaatgtctgaagctggcaggtatggcaggcatggacaggagctcaggaagatgtcgctctcctgcccgctaactaccacagcttgaagactgctcatcccaggccctgcaagtgccctctgctctttatctgccaggcctttcactcctacccatattcctaagcagaggttcataatgcctggggaagcaggaggggtggagaggggtgtctagaggtgaaaacagcctgcctgaaccccaagtcggaaacggaatcaggcaacgagtgggcgggggtggggtggggtggggtggcgggtagaggggggagaagagggagccggaagctgggatggtggcctcactttatcccagggagggaactgaggccctgactcagatcacagaggcgtgggggcacagaggtgagagtcaggtggcctgccatcctggggcccggcagggcaaaggagcgcgggttggaggaggacgggctgaggagagggaaaggcagtcccagtttgcacgccgtggtcagattccccaagaacggccaggccgcagcaggaacggggcaggggctcttctggaaacgctggtaactacaggctgtcgcgatctccgccgcccggtgcctcggcatgccactcctgggaggcctcctcgtccgcgacttcttcctcccggagctcctcctcctctggctgaggcggctcgcagaccaggcccggctcgctaggggcgctgccgttctccaccgccacgaggaacggactctcctcgtcgacggccgtcgccgccgccgccgccgccgccctctccgcttccgccgccctctccgcctccgcctcctcctcttggtcgggggctgcctccttgggtcgtttgggggcgtcctccggcgggtcccccgcgctcctcttcagcggccccttctcctcctcagtgggcttgtcgtcgtccggcttccccaattcgtcgccgccgccaccagcgtgggtcggcttgtcctcgtcgccctctgcggcctcgggctccggccaaggcccgtctccgctgcccttctctgaggctaatgggcagtcggaggcctggaccgtggggttgttctcgatttcccacagccccgcgctgaagccgcgcctcttgttgggcttgccgaacttctccttgcactccttgtacgggaacaggcgtttgggactcaggaaggccgtctcgtgggtcccgaagaaaaacacctggtagcggttgggctgggtcatgtgctctatcctcgccggccagtgggcatagccctttaacttggcaaacaccaggtccccgctcttgtacatgggcatgccgtaggccgacatagctggttctgcggaccccgcctgggccacaccggaagtagacgccgaagtctgcgcgcgcgcagtaagggcggctgctgggcgggagttgttgagcgacctgttcgaggggaccggcgccacctaatgggcgggcaacgctcggggccccgagaagatccactgcgaagtgtgcattatctcccgaacactcgaagcccgttggacccaccctcggacgccatgatgtctagaatgctggaggaaatagctgggatggccgggtggcggttgtgcttgtggtggccttgtgctactgatcaatctctacggcacctgggccagatggttgcacagtttaaataaacggtgccagagcggcctagaaagggggcagtgtgacaagaaaacacagtgacacaattagtacatatttccatgaaactagtaacagcccagtgcaagcatgcagtgtccctgtaggccccgatctgctcactacaggaaactgtacacctgcgttaggaggagctaaagagatggctgtgtcagtggtttcaacccttttctgatttcctccgggactagcactggagcctgcagtgaggctcaagaactacgtgaaagtctattaaagggttagagtcagcagtgtggttaggatgtcttaagtccacattactggctaacaaaaatgtcaaacattattatatctttagggtcacaaaaagtatataggaacaccaccaccacggcaaacagacatctaaatatttcctactttctatggaaatgttcaccttggatgccagacatgaagtttaaacttcgttggtgattgtaccgtattgtgaaagatgaggctacatggttgtaacattgagatcacgacacatgttttcagtatctttctagaagagatgaaaattgggttcattatgcataagaattaggtagagatctactcatatcgaacatgctcttggcaactagaacttcctgtgagctacacactaaaaaagtataatctcagctgagaaactattttaaaaagaattttcttcagatatgtctcttctaaacatatgaatgaaagtgtcagtgcaattgcagttgtttacacaactttctgcatcttttttggatcctccttgctagctgtgagcaagcactctgaaacctacccaaatttatcataccggtactcttgactattataactagacagatgttccttcccagtgtaaccaacacactagacgagaattagagcccttaacccatttcagtaaaactcaaatttgtttcccatttgctgggctggaacagccattttaactctgaatggttgagacatgctctaggcaaaaggagatatcctctccctaacaaggtgaaatgaacatgaagccctttgataattctaaaattctaaacaagttctttcagctcttatgtcaagccattttcttagaatgcctatctgccctgctaatatctattatacctttattaaataagtaacatcaacaatgcatcaacacttcgtttacaaatcaacatcctgctacaaagatgaatatgacaagttccctcctctcagttttacagggaaagtgctagaaaactagaaatgtttagtggctgtagaagaaaataggaaataataggtagctatggagcccataataggaaggaatttggaatttctgtaagcagagatattgctatatgtggccattatttttcaggtaagtatgctgtaccaatgcacatatcatgtatgaaggttgctgaagtaggaaaaaaatctagctagatagcatgtctagaagaggtatttagttgtaccatcagctcaatctgaaggcaggaccggttctaaaagccagctgctgaagctgaaggtggcaaaggtgcctcactagaaaaagccaacatcaatagttgggtggttgaactacagcaggtgaacaagtatgagggtgtgaaggcaggactggggatctaagggttagagcaataaccaaaacctatggaaaactgagataaaaagtatagcaggaagcaaaggcaaaaagatctagtagagaaggatctacgtctgcaaacaacagtacagattctattaagcaaagaagtgttgtt

SEQ ID NO: 585230 - DNA, 4001 bp, Homo sapiens
gcaagtaaaactagcagtcagcaaggctataaattatctaccacttaccgtacaaacacagtcatttcggctctatcttcaatgaagacatctgactctaaaggcctgggtggatcaaattgctgttcagagggaatatacagggaaatggtaatggtagactcactaaaaggacctgaaccaggctccacgtagcttgtcactggagctgtcatctttattttcatctctgtgacataaaaatgaaagcaaatttagtgtatttttgacagctttaaacatttaacctattcttttttgatctgggttccttgatttacttcacattgttgacatatttacctttaagataattttcatcttaaaacagtaaggccaaaattactcaattgctcactgcccacattaaaccactttctgtaatactgatattctgggttaataaattcttaatttttagagataaaaggggaaattagagattacatggtcagtaaattattttttcttaccattcagaaaatgaggtcccacaggctaagagacctgctaaaatataaatagcagcaaagccagaccaaaagctatgacttgatgcttctaatcttggtaccttcttgcctcctgacgtctctgatcctaccagtcaccaaattatcttgaggtgttagccatagaaaaggacttatcacgagttacaccaaaccccagttcatccagcaaaatcagagaacagaggttgaaaagtaatacccagtgtaaccctggtcctgaggagtcttgtctgaaaacaagacaagtctttgatgacttgcttatttttccattataaaggatatttctttaataagctaaaactcaataataagcccggggactctttcacaatatgcataattacaaggaaaactgcttttacctttctcgtttttgccttgaatgtagctgttcagtttcgtaaagcccgtctggatggctgaatcccagtccatagactccacggacgtgctgacccacttggctggtccatagtgtcggatctcataacttccgggctaaagtggaacagagaaaacttcgagaagcaattctaagagggtaggagtgagatgcaaaaataccggtgccatgatctcgggtcgacctggagccgtcctgtctaggggctgcaccgccccggggtccggcctgaggtccccgctccttaggtctgggaggttcccctccacgaggttcccctccttgcgattagggaccgcagcggccccaaccccacacgctggggactcgattcacactttcagacaagcatctattacaccccctcggttcggagggttccaccgcgcgttctgggacgtaaccagttcctccccgccccaccaccccgcaaagacaagaaattgagatgggacctgcactgggggtagcggggagggtagagctaaatgaccggggtttctcgtttgcgtagcatagtgggtagggactgggaccatttaaaaaactgtactttttacttaactctatgggacccgctggcctcactgcaaatcagccggaaggcgggcccagcccctccgctcccgagtcggcgcctacctgggggccggcgtcctccggggccttccagcccggcgtctccacagcttgggccgccgcgtcctcggccgccccggggtctggctggagcggctcggccatgggcggcgctgacgctctgggagcctggtcagccgcgcagaggccccgcaccccgggccgccccgcctgcgtgtgcgcgccccgccgaggccccgagtccccgctccgcagacccggtccctcctcccggccgggctggagacccgagcccacccgatgcgtctgcctctggaccgcgagggggcgccgccaccaaggcggggccggctcacgaccccggacagctccggccggagttgcgcgtcctgcccccgcccctccgcggcgacagggagccgcacctcgcttcggcccgccttcttttgaggcacttccgcccccgccccgcctttgtttttgaaggaaaggcacacacaggtggccccgcgggcagtagggggtggcgctgtttctgtgcaaccggtttgggaacctctgccgcggccccgcccgcgctgggaaccgcgggcgctgagccgcctcgagggtgtcccagcgcaccgcaggcagagaaaggcaggaggtggcggctggcgacccgacccccgcggcccctgcccgcactcctggggctcagccagggcgaatggccgtactcatcccaagaagttgtcctaggtcccagacagctttcagggtcccttgcggaggaggtggtgggaccacagacacatggagagaatctggaactgttctggtttctgaacttttccccgacaggaccccagaccctctgagtcatccccgcaggcttaacgagactcggggagagttagtgccgaggccagacactagtgcttttcaagaattttggttaccagggctttcccgagccgagtggggtgcggctctgttccccagcaccccctttccgccggccaggccgactccgcgttactgtcccctgcggcggggacccggcacggctccggcgccccccagaggactcccatcgtgggcagccagagctccgaggctctccggggcgacgtgaccgccgcagaggcagcaggcactccccacgcgaaagccaacggacaggagggtggccacgtgaaaagcaatggtgacatcccccaagggtgaaggggagtaggcccctgtgaacagaagaggcagccgggaccattggcaatgccatggagccagcaccccctagccagggtgctgaggccaaaggggaggctccctccctcgcaaggagacttccaagaagacgaaattgcctttcaaggccaggcacggtggctcacgcctgtaatcccttcattttgggaggccaagacaggggtgatcgcttgagcccaggagttcgagaccagactgggcaacatggcgaaaacccgtctctacaaaaatacaataaaatagcgttgatagtagagtggagagcatagctgccttccaaaaaaaaaaaaaaaaaaaaaaaagctgagtgtgctggggttgtgatctcagctactcgggaggctgaggtgggaggatcggcttgagcctggggaggtcgaagctgcagtgagccgagattgcgccactgcactctagcttgggtaacagagtgataccctgtctaaaataaataaataaataaataaataaataaataaataaataaataaataattatctttcaagaagggtttctaagagcagcttgtccttcaagagaaatgggaaggagggtggggtgactcttctgcctcctcacctatggaggaagaacaggagtgggggaagatcaatgcctgcagcgacaagggcgctgcccaggaagggaaggctgttgccacccctgagagccaggagccccaggccaagggcgcagaggcagtactgcctcagaagaagaggcagggccccaagctacagagctgtccactccctcggggcggagagtggccctacaccagcccacgctgagcagaatgagtagctgggtgggccaggtgggtgatctctaagctgcaaaaactgctgttcttgtgaggttactgcctggacctggtgccctggctgccctcctgtgcccagaaaggaaggggctattgcatcctaccagctacattccctttccttctctccctcctgtggattctccaatcggccatgtggctttcctcgtaaggccagttgaagacggtcccccacagcctcccaagttagattagtgatatgaaatgtgcctttccctggccctgcctccttccctgtccccagccctgcagaaggcaatttttggttttcttccccaattcttttccaagtaggttttgtttaccctactccccaaatccctgagccagaagttgggtgcttaa

SEQ ID NO: 585231 - DNA, 4001 bp, Homo sapiens
cattcacaaacggggtaagtttgtttctgaaaataaataaataaatcttcctatttcaatattgcagagacacagccaacggggcctacagttctaacaggcgacattcagccgcctatgttcagagcactgtacgctgcttgtaagagcaggtgccctgtttaaaaagtgcctgatctggctgggcgtggtgactcacgcctgtaatctcagcactttgggaggccgagacgggcggatcacgaggtcaggagttcgagaccagcctgaccaatatggtgaaaccctgtctctactaaaaataacaaaaattagccgggcgtggtggcgggcgcctgtaatcccagctactcgggaggctgaggcaggagaatcgcttcagaccggaagacggtggttgcagtgagccgagattgcgccactacgctccagcctgggcgaaattgcaaactccgtctaaaaaaaaaaaaacaaaacaaaaaagtgcctgatctacataaagaatggcttcaaaagctgacgctataaattaaaagccagatataacaattcaaatctcccttcattaaaatacctacgttgtcttcctggaaaaagtgcctgactagaggaattcaaagaactgtccaaataagtaagtgtttgcccagcaccttataacgaaaaccatggctctgtaatgagaacagaaatcctgtcacatctgggccagttcctaagtgtcccctcaaaaggaacattcaggcactacctaagattatgaggcttccttctgaaaatgttaagcacaatgacatagagaatgatttttcttttctttcttttctttttttttttttttttttaactccgggctgagaacggaagtcaagttcagattctcttccttcctcaagcaagccaaaaaattaaagagcaaacacagaggccctaaatgtctcgaggcctcttcacctgtggcgatcgacgcagcaagcctgggtgtgctaagaattgaggctctctctccttcattccgggggttacgggtggccttggagcaccgggaagaattaaccggtgcctaagttttcaatcggatcattcttctcaacttgggcggctctttcctcccttccttcctcccttcggcccggcacacacggcggggcagtgccagcgcgggcagcaggctgggcccgagggcagcgctgccgcagccgggagcccctcagagtgtggggcgcgggctgccccccgcgcggacaccgggcaggggccgcagatctgtccccgccgccaggcgtggggaccgcgaaggggcagccgcggcggggcggaggggcggggtgagcacttcctgactctcgcattgtccacgcaccgcccgcgccacccagggccccgccaccgcgccgtccccgtcggggaggaagttggcgctcgccccgccagccccgtcttaccgtttttggcatcgcccgcggccgcagcccccgcggcggccgcagcgttcgcggcgccagtccccgcgcctccggcgcccgccgcgcctccggcgcccggcgcgcccgccgccgccgccccgcaaccggccgccgccgccagggcccccccggccgccgctcccgccgcgcccgccgctgccagggccccggctccattttcctgctcgtcgccgctgctgttggcgcgcttgtttttgcggccgcctttgctgtttttggggttgggcatctcgctcgctcgcgtccaggtaggtgcccggcgtcagcgaaggcggatcccagaggcacggccgttcccggccctgcgtgaagccggctccgggaaagaacggagggcgcgagccggcggttccctcggctcccgtctagccgcacggcccgtgccgcgccatcctggccgccgcgccctctccggcttcctggagccggcacgcggccacccgaggctcgcagccgcgcgggcgccgcgggcccggggcgcaagcgagacgctcccgagccggagggaaaaggcgggtctccggcttgttttgattcggctgcactgacacgctctgggcccgccccctcccgtgacgacactggggattcggcctggccgcgcccaccaggtgacctcacggctgacgggaccgcccgcgtgacgtcacgccccgcgcggggcctgcccacctcgagtgacgtcatccaggcgtccccacccgggcctcctggactcccgggcgttcatgagctgccctgcttgacttgctccacccgccagtgcagtggcatgtggagttcttcggtggcctcctggccttaatgtaattgaggcttagaacagtatggtctggaaaaataagctgtgactagagcaagaatggaaaacaaaagattttggattaataactcattcaaaggctatgcctttcagtaacagtaattaaagaaacaggggaccgggcgcggtggcttatgcctgtaatcccagcactttgggaggccgaggcgggtgtatcacgaggtcaagagatcgagaccatcctggccaacgtggtgaaaccctgtctctactaaaaatacaaaaaaaaattagctgggcgtggtggcgtgcgcctgtagtcccagaaactcgggaagctgaggcaggagaatcacttgaacctgggatccgagatcgcgccactgcactccagcttgagcaacagagcgagactctgtctcaaaaaaaaaaaaaaaaaaagaaaagaaagaaagaaacagggtagagttcccagacaatggggatgaacaccagggtcctgaatgggaagccttcacagtctggtggtgaaaacaattcactcaaacaagacccatcatccagggatgtaactagatgttgcctggactctgaagcagtccctgcttggggggaacccatccctatgcatagggctgagttgtcctgaaagatagtgaaagataggtagccaggttatgagcagtaggagattaggtgacaccagtgaagacaggcaatatgagggcaggggacccctgggaagagctccccttgatctctttctgcaattctattctaccttttcggccaactccttcccttccttcaggtctcagctcaaatacatcacttccacagagaccttcccaggagagctgtcagaagttccaccctgttattttcctcctccatctctaattatgttggcaatgtaggtgtttacttatttcttgtatatctccctctcactgaaatgaaacctccatggatagattttatctgccttgggcacatcagagaacagctggcataaatttgttgaatgtataaattaggttccttcctcacgaactgtggaggaaagactagtttagctgacagctttacagtgttccccttttatagtgtaatctttaattcagccctttagtaaaagctctgtcacggtgttgttgttaccattagagggtcttgactgcaagtcgtccaagttcttggcattttgaacaaacaattggaccaaacgcccagcaaagcaaggaaagaagaaagcagggatttattgagaatgaaagtacactccacagtatggaagcggccccagcggtggctcaaggttccggatgcagaatcttctgaggtccaaataccccctggaggtttctcatgtaaatgaagtggtgacgcacaattagtctgattggttgctttcgtcaaccaatcagaggctgaagtggagttaacaaaggtcacacttctgtgcaatcacactttttgcacacttctgtttaaaaagcaaccaatcagaggctaaggtgaagttacaaagttgcacttctatgcaaagactccacccgcaatcagtctcattggttgctgacagccagtttcccatctgccacgcagaaaaggtgagggtttgcaaagggagcagcttctggtccttttgttactcaggtgtggaaagttagggttttcctttcaatttagtttaggaagtggggtgaaacgcccttaggttccctgcc

SEQ ID NO: 585232 - DNA, 4001 bp, Homo sapiens
aacccattggccaaaatgtcccacaatttttacttgaaagtctcccagtgaaataattaccggcagttgggctgagaagttagatattagcatttcctagttccactcatatattttaaagtcaactaatctcaaatagctttccttctccctcctgtcaggcacactgaacaaaataatgccactttttcaaatcagggttatgttaagcaccactatcaaacagatgtgcagtcgtcatacgtcaaactcttgtctctaggtgcaaactttaaaataaatagaagttatcttactgtttcaaaacttcagttagtcatatattgcaacaggaaaaaattgacaaacttgatgttttgcatactaatcttccaaaaatatgccctaaatatgccactgataggaaaattaaaactcattttattactaggtgaatgttttactttgaaaatgaaactgtaggtgtgtctcagactttaggctaagcttaaatctccagaagctgcaatgcaccttggatttactaatgaaaatatatttttatattgaaggttcaatcaaagtattatttggtcacataatttttacaatcctttctagtttgtatctgtttctcttcataattcatggatactatgcttctttgtgttctcaaattccccaggttcctgttatttgttctctttcattttagaaatgctgcacacaccaggttgctattacctcaccttctcacttctggatcttatttctgaattacctgtccccctcattttcaccccttctttacgggtttcacctttcacgtgatagcttctgtttttcagacctcatttttaaagacggcacaacaacactttaatgatcagatacttaaacctttgctttcgtgtaaatatctttgctcttgcagattttgtgctttgctttgtatgtattagaataacaatatgaaagaaaaccagttttccaaaggtaggaagaatttccctctttgagtgacagctgcagataaataattaaggtgcttctggggatgccaattagaagcaattatcatttgacccgccttggctctaaaatgcctcggtaatctccctctgtcacaggaaagtggaggtctggcttctgtgattacgacgccgatctcttccagacttgagaacaagcagtcaaagaaatgatgccctttccgatgcttacatctgtcactcactcttgcgttagccaagtcacacacggtcaacctgcaaagttcaacctacgtagccttgacatcgcaggttgctttaattcctccaaaaatcaagttgtgattttggtatctctaaaaatcaaaaatcaaattgtttttattttctcctgatctattttgaaagtgcccccaaatacggtttcagtggctgggacatcgcctgtcgcccagacgctgccgttcgcgcgtccaactgtgacagccaggaccctccctcgccaactcctgcgctctgcctttcagtggcgtctcccatcctggctactccacccctacggtgaaaatccacatcccttgccccatcccaactcacgctctgcgagcgcccaccactcaaactttctcaggccaaactttccctctctacctagatgctgcggagaccagcctcgggatttccagggagccacgcattcacaaagctaccccaagctcccgagctgcgggccgctcccgcggagcccgcgctcaccccgagtaattgttctcgctccccacgtcgatggtctcgtccatgtcgctctcggaggtcgtctcctcgcaggggcgcttcatcccggcgaagaccgcgcggggcacagcccggccggaagctcggacgccgagcggggcgcagcaccctgacgcccgcctcctccctccccgggcctgggcaggcgcggctccggcggcggcgcggtctgctcctagcggctctttcccacgccgcaactctgctcggccgcaagagccggcgccggccacgcccccccctcgagcgggtggggccacctcacccgcccccgcgcaccggcccaggccttccgcccggcacctccccctcgctggtcggcgtggctcgcgattggctgggccagggggcggggccgcgctcgccaatgcccgccgcaaggctccagccgaggcgtgggaacgcggccgcggacctggtaccccagagcagcgagcgggtggggagcagccggggcgagaatgagcgcaatcttgctaacccctgcggagggagcgcgcgggcgccaacgcgggcgcgcgggggcgggccctggacctggaccttgggtttcggccctcctccgcgccccgcggtctcgcgggcgaagtttcagtcctgagtgtaaagaataaccccaagcgcgtggctaagtgcgagcaggcgcgtgtgacgtcgggaggcgccgcggctcctcggccgccccactcggtggtcccctgtctggatccaaactgctgactggctgacccgagtggtcacatttgccctctggggcttttgaaaaccttaaatcaaaattgcttttgaatctgacaactcctgaggctactttcgcggcctcggggctgtttcatataaggacgcgagttttcctgatcaggtctgtcggccacgttacgatttccaatttgcgatccatcagttacttccattgggtcttcagcccccagggactgtggatcctagaccccgcggagaagcccgtggactggagctgtgtcagctctgatggtaggaaagactagatcaatgacgcgggcatttcaggacataatcgtatattttcaagttcgagtttttcgggcttggattatccagataattgcctccagtctcctccagtccccctggtgtatgcactcgcagccgcagagttagagtccgggaggtgaagattggcgcttggaaattagatttggtttctaaagtatgaattcgtgtccaacagttcgtgccttggacaacgtgggttgtataaaactcaagctgtgtgtttaaaacaggttttctagctgctggttctctccaagttatgtaggacttttgaactggccaccccgctgtgcgtctgcgagggcagggactgagcgagacccagccaggggcgccgggagactggcggcggctgggttggggtccagccggaaaccacacgttggcagggccgcttggtcagtagtggagagagcctctgagaaagggccgtctatcgatccccagacccctccgtcacggagggattcatagcttcctggggatcggcccagggcgtccctttgacactccgttctctgtccacacaagcccggcgcggggcggggagaagaggaaaggacgcgactgggaaagacgggaccctggcggggtttggcccgggggagagcgggaaggagcccggtcggcgcggaggacctgcggccagcgtgctaagcccttattagaacagaaacccctttccccccacactctcatctcttttgcgcggtccccaccgccatgccttcaataaccttgtgaatagaaacccgaatcgttccatcttggcttctgaaacttaaccccaggcaaagcacacactcggcggggccaggtggggctggatggggtccgcgcccgacggcggggccgcgggggtcggtgaaccccagctcccctgtcggcctcagggcggatggctgggtcggcgcggggttcggggcctccgatcggctgcacgagggcgggccaggacccagaccccgtccccgctccggccccgcaatccagcgggtgacgagcctgacgcgcgccggtcgcctgccacctcccgccccgagcgccctgggccagtacctcccggccgcaggtgaacgctccgcggcccgccaggctcaagctcgaccgtcacaactttccgtgagggctgcacgtttttctgaattcaaatgcctgcaggtgcaactcatgtttgccacacgggcaattagcgggcgc

SEQ ID NO: 585233 - DNA, 4001 bp, Homo sapiens
taaccaggagtttgtctactaggtgacatgtggcaaagtttagagacatttttggttgtcaagactgggggagtgctcctagcacctagtgagtagggaggacaggatactgctagacatcctacatgcagatggtagtcccccttcccacccccacgccgccccccccccccacacacacacacatgagtagtgctgagaaaacccgctttttaatccaacttgccaggcccactcagtttgcctgggaaatactgctcccagtcaatatcattcttatttccttcatgtctctgctcaagtgtcagccccagagtgacttgccctgacttctctgcttctcacaacacccatgatttcctgatgttgtatatctttctgctcatttgcttattgtcatctctcccactagaatgcaaaatatcaaagggtaaagacttgtttccctgctctctcccttggggcttgaacagtgcaacacatggctgggactcatttacacttgtaaacaatgaatatttctgctcaacatgaaattttattattcaacctctaatgcagtgtgatgtttaagaatcatagctatgaagtggagacatgagctctgccaccaaagcccagtgtaccattgaataaatttgccaggaagcaggccgtgccatgcctcattcttgtcatgtgtaaaatgtggatacacgtagtaccaaaactcaaagtgctgtgctgaggccggcgtgtgacccacagaacactgtgctacactacagggcaaaatcactgtcaactaagattagaagcagctgtagtacttgaaataacatcagaaaaccagattatttatgttctttgtaacctgaaaagagttatataatctgaattccagttaacttctagtaaaataaacgtattattagctcctacctccctatgcctagtgaaaatcaaataagatcagatatgaatgtaacttagaagtgagtgcattgcttacatgttcattatcagtactttgtagagaggcctcttaattacacagcacattgcaaatcaataaagcctagccgaaaagagaattgttcagttcaaacgttcaaaactaacatatacttaattttccaggcaaaagaacaattgccaagagtggggaaaggcccgaggtaggcctctctcaggagcctcccaccctagagacctccaccccaggtctcaccaaaagtgggtggaatggtgaagaattcagatccccaacgccactctttcgcgcccccaccgcccaacgcattcgttctgaggtggaaaccccgtgcggatcctgctgtgggtttgctcagccttctcggcaagcactcagggaagaacttcctgtttggagatgactggggaaaaaactgcacagctgacattggaaataaacccgagttccaggttcaaggagccccaggcttagctcagctcaagtgaggaactacgagatttatttaaaagcattctagttgggggaagggagtgggcggttccaaaagtcactccgcagagccgggacagccgggggagggggcaggtcctggggcgagggacccctatctgcagttcagtggtaggcactccctcacggggtctggacgcagaaagtagggagaggggcttgcggatagggttgagcaggtcctccaaagttagcaaactcccaagcgcaaagaaaaagctagtttcgatttttccacccccgccgcgcccctagttcgcccgcagccctcggactcacgcagcaagcgcccctgcaggaccgcggtctgcaaaagcatcaggaggagaagcgccggcctggctcgcgggcccatttccccagctctggccgcacgtccccgttaaatctccgcttcttttggggggcggggaaacggggatggctccagaagtcaccctacagctattgcctaggctcaggagatgcccagtaaaacttcctggtgaaaagcaacaggtctttcagaactttagttctctctctcctacagcagaaggtacctgcttgtgaaacactaggtgatccagtgtcccccttggtttttaaatcctgaaggggtgttgttgattggggaaagtagcttcgcaatgttctgatctgaactttagatatttaaatatttatgattttcaaaattcaatcatacatttaaaaattttatctcaaccttagaccaacttatgtcttatttgacttagaaatataaagctttttcattttgttttttgattcaaattaattaagtcataacattaaccaattagatcctactgaaacaccttccacagccttcataattgaattatctgacaagtgtttcacaaactttacagtattgggattatctggagaatgattaaacatattgaggcctgctcctaaccccagacacactgatttaatgggtaattgttaggtagttagacattagcagttgggaggggatgacagaagagagcggaaaggctgtcactaagacagccactggcccacctaaattcaggcccaagactaccctaatgccaccctaagggatggagtttatgataaagtctgtggccaaaatatcctggagaaagagaaaggagggtacaggtggaaattccctaaggtggcacatgcccaacaacacaaaagcctgtcttcaagttcaccccaagttcatcatgccatcattataatagaatttacatacagttttgcccccccatccctgggaggcttttcttaacaaattataggtaagaccatgcacagtttaattttagattgtatagctatacacttcaatcaaataacatcatcctgtcactcagatacagcccaaacctcaactcctccccacaaaccccataaaagcaccttgagctctgtaaagaagtgctgagttcacttcgcagaaataagcccgctgtccctcagagtgtattattgtgcttcaataaactttgctttaagcttgcattttggtgttagtttgtagttctttgctcactatcacaagaactgagattgctggttcagagctccggctataataatctcctcggttaaaggatccatcccaatgcataattcccagtaacagtatgggatgccacctgggcaatgggattttaaaagctttccttctccctcaacgaagtttgggaattattgccttagacatttcaaacaatattaataaatttaatacacctgatttgctccaaacctttacatatctagcaaattcaacaggcattatttttgtaagcatgtatgcaaattttggcaattcaagaaaatcaaacaggatatcagggcctcgactgtaggcaaacagatacaataacattggaaacatgtagaatattgatgatgggcacattggggctgatagtactattcctttttttcaatttttggtaagatataattagcataccatataattcatctatgtaaaatgcaaaaattggcccggctcagtggctcacgcttgtaatcccagcactttgggcggccgaggaaggcagatcacctgagatcaggggttcgagaccagcctggccaacatggtgaaaccccgtctttactaaaaatacaaaaattagccgggcgtgatagcaggcaactgtaatcccagctacattagaggctgaggcaggagaatcgcttgaacccgggaggcgtaggttgcagtgagctaagatcgtgccatcacactccagcatgggagacaagagcaagacttcatctcaaaaaaaaaaaattagctgggtgtggtggcatgcacctgtaattccagctactcgggaagctgagacaggagaatcgcttgaacctgggaggcggaggttgtggtgagccgagatcatgccattgcactccagcctgggcaacaagagcgaaactccgtctcaaaaataaaataaataaaataaaatgcaaaaattaatggattttagtatatttacagagatgtgcaacc

SEQ ID NO: 585234 - DNA, 4001 bp, Homo sapiens
cgtgctgcgcggggaggctgggtaccacataccagttgcatgtattcagaagaggagcaagacgcaagcaccttccggagggaatttgtctcagcctcatattctaagaggagtttctcaggcagcactggacatgggccgccctgaatattctttgctcctgaggacaccatttgcggggctgacttgtgtacatacacggggcctctggctgtctcaggtggagacacagatttgtcacacctcttggcagggtttctaatgacatgggcagagccagagtcattaaagtggtaaagcaggttggattccagaactttgtaatagggggaagaaaacaccgcagtttggagctggactcaactctgcatacagcaaggctggagggcactcaggctaaactgacccatggggagtcttcctaaagtcaggcctggggaacccagcatcacctgggggttggcgggggacgcagaactgatcagatgtcggacgcaggcgtgggggattctcacggcgatgcagacttgaggctgagttgaaaaagggcgtggagaagcccagggtctggtcagggagggcgtccttggcactggggccatgagaagctggtgtccatgttcctaaccaacgatgccacatggtcgccgcgatcacgtcgcacaccgtgtcctgtcacctctgccaggcgtgagctggccttttcgccactgttctcctggcctatgtgcatgcctagccaacagctgctacgtaaataagcttggaaacaaagtgatacggacctgatgtattacaaacacgctgcagcaggagacgaggcctccgtccagcactgccaccgactctcctggaacctttggccacattctgtgacacgggacaggctcagagcagctcagtcccctcgagacctgacaccagccccttcagagaccatccattttctaggagtcacatgaaaaaagtagaaagaggtgtaataaattgtgatatattttattttgcctaatatatcccaacagcatcatttcaacatgcaatctatacataaaatgcattcagattctctacattctttttcatgcagcgccttcaaaatccaggccgtctcatacccacagcatttccccgactgctgcgtgctagtgctggaccgtgagtgaccagagaaaccactgcattaaaatatgggggtcactccccctgcagtgtgtgtgtggggagcaggaggcagtgggggtcattccccctgcagtgttgggggaggagaaggcagtgggggtcattccccctgcagtgtgtggggaaggaggaggcagtgggggtcattacccctgcagtgtgttgggaggaggaggcagtgggggtcattccccctgcagtgtgtggggaggagaagacagtgggggtcattccccctgcagtgtggggggaggagaagacagtgggggtcattccccctgcagtgtggggggaggagaagacagtgggggtcattccccctgcagtgtgttgggaggaggaggcagtgggggtcattccccctgcagtgtgttgggaggagaagacagtgggggtcattccccctgcagtgtgttgggaggagaagacagtgggggtcattccccctgcagtgtgttgggaggaggaggcagtgggggtcattccccctgcagtgttgggggaggagaagaaggcagtgggggtcattcccccagcactgtgcggggaggaggaggcaggactgtgctcgcccctccccttcctggttcaggtcctgctcctgggactcagcgctgcgcctctgggaagggccggtccaggagctccgcaagttgcgggagaacctggcgggtccgtggtccagcgaggcctgggattcagaagggatgaaacgttcctcgacgcttgaacaccggcctcctgcccctgggtcttcctgctatttcttcctgcccctcgctcccgcctcgagccaccccctcgtgctccccaacgcccgctcctgtgctggtcactgggggcagtgagaggaggccagaagcagaggcgatgccggcggggagcgggcggtgggggggcttctgggagcgacggacccggcagctgcagagcccagtgcggctgagtggggggagggaggagggacccccctcagaggctccacgcggaggcctgggagaatcgggtgggctggaggctttcactggatggtagccagctttggacgcaaacgtcccacgtgacctgtcccctctcgtctaggcttccaggacctaggggtggtggacctgctctgtcctcccacccctggacttccctggtgatctcctctcccctcccaccagggacctcctacccccttccccctcccccctcccacaccggagccttctctcccctcccacccgggacctcttctcccctcccacccggggcctcctctcccctcccacccgggacctcttctcccccccatccggggcctgctgtcccctcccacccgggacctcttctcccctcccatccggggcctcctctcccctcccacccgggacctcttctcccctcccatccggggcctcctctcccctcccacccgggacctcttctcccctcccatccggggcctcctctcccctcccacccgggacctcttctcccctcccatccggggcctcctctcccctcccacccgggacctcttctcccctcccatccggggcctcctctcccctcccacccgggacctcttctcccctcccatccggggcctgctgtcccctcccacccgggacctcttctcccctcccatccggggcctcctctcccctcccatccggaacctcttctcccctcccatccggggcctcctctcccctcccacccgggacctcttctcccctcccatccggggcctcctctcccctcccacccggggcctccgcggcttttaaaactgtctgctgtgtgctgtgcacgtgctgggagcacagtagcgaagccgggacagataaagttcttctagtcactgccctcttggagtataccgttgaatccgggaagtagatcaatgaaataaacacagaatggttgtaaaatacagaacgctgggaagtggaggtgcgtggtcttacccgtgtttataattcagccgtcgcctaacctgagaaatcaaggatttctgcgtcgtgcgcgtgcccgctgagctgagctctgctgggatggggagtccttctccggctggaggctgagggcaggagctctcggtgagaggctgcggccagcggtgctgtgagccgggcgggggtcagcgcgggcggccggggcgaggctgacagcacagcaggggccgagctcccccgggtcaggcgggaccaggaagggatcatccttcttttgagggcacggagccaccgtcggagggcctgtgagaagggtgggaagctgagattacattcctattctgaaaatgtcacactgtggagggcggtggttcaagcgcagtaatggccatggagggagaacaccgcccggggacacccggggtggcagggaccggagccccggaaacctgagcaaaacgcgcaaaatggggaaaaccacccaggttttaatggaaattgtgcgaacagctgtcaacgaagagtcaaactctgtaaaatatttgaagagatttattcggagccaaatatgagtgaccacagcctgtaacacggccctcagaaggtcctgagaacgtgtgccaaggtggccggggcacaacttggttttatacaatttagagaggcaggagacatcaatcaaatacgtttaagaaatacattggttctgcccagaaaagcgggacaactcaaagggcagggggagggcttccaggctctaggtaaatgtaaacactttctggttgacaattggttgagtttctccgaagacctgggatcagtagaaaggaaatgttcaggttaagataaaagactgtggagaccaaggttctt

SEQ ID NO: 585235 - DNA, 4001 bp, Homo sapiens
gtatctcaatacattgcaaaatgtaccctgggagggcaaaattgcccccagttgagaatcactgacctgtatccatcaagtcctccctgttttacctcctgaatactgtatcccttaaattgatatacttttcataatctcctctaccacattctcatttcaggccatcatcagggtagattaatctactagccttctaacgggtctccatacctccagactggtctcctccaaatcattctccacaatgatgccagaatgacctttcaaagatcaacccccttcctataactccgcaacatcttcctcccaacccaccattaaacattgtgaagtttcactttgctcttcagataaagacaaattccttcacatgacttccaacacacttaataatctggtcccttgtttacctctccagcctcgcctttcatcctctcaaactctatgcactagttagacaatttctgttagtttttctatcacacaaactgaacctctcggggggtctctcaacctgggacattattctctccatttcctcatctgatcaactcctacttatttcttcatgtctcatttcctctggaaagccttccctaattcttcagagctgggttagatgctcctcccacaagcttacaaaatactgtaaaatcacctgaccacagcacgaggcattgtaactggctacctcctctgtatacattccgccctttagattgtaaaatcgggacacagactgtcccttatcttgctcaaaaacctccaaaacaaggtgcttagaaggaattatatttattttttaaaaaataaaggaatgtttactacaaaagacacaatctttggagctaattctctcaaaaagttgtttctatatggacaagtaaaaccaacagaataaagtgtgtgccagattatccgtttaaaaatatctgggcaaagtcttcatgctctgaaaatgtccacgcatcccaactgacagtggaattcagaggcaattcaataatagtttgacctcagacccactccctccagcctattttctgccaatctaacaaacagctttccacaattatcattacctattttctactagttttctcatcagtatcggtattagagtgtgcaggatttaaaatcagtatcttgaaggtggagaagaatccttgtaataaaagcagaggccacaaaatgttatttgtaccaactacctgggtacctgcaaacataggccaaagcattcggccctgtcattcactctttgcccctgggaacagcaaagataccgctggagccactgcctgtcagtcccctaggagtgagtctgtcatcagcacccggaccctgcagaaaggcccgtagtgggcgtatccccagcttccccgagccccatccacacagagcggccctgcctctgcgagctgagtagcgatcgggatcctctgcacccgctccacaacggcgaggcctccctgccggagctccgaggggcggccaggtcctcacccacccccggccgcgcgtcgccgcccacctcgcagtgcaggagttcggtgcccgggtcctgccgccccgcgatccggcagaacacgcaggtgctgtcgtagtccttgggctctggtgacttgccagcggcttcacaggtccccactgaggaaaccgtagtttctgcagtcgccgaggcctcacagtcgggggccaggccggcgctgcggttcacctgttcctccgccattgcacccgcccctcgcggcctagagcctcggcctctccagggctaccgggcccgcgcagtctccgcgtcccgcacctcctccgttttacctcgagacgtcgcccctcgcctgacgctgggcggtgatccaggctttggggagagggaaggagacgcggtgaggaacttcaaagccggaggccggcctcaaaaccggctgccactagagggcgcgcaatggcgctgccgagagtcgtcctgacccctgcgcctcgttggtaatgacgcacgacgtctgccaagtcgcagagcgcccagcgcgtcgtggtgacatcacagaggcgcgggagcgtttgacataatggagcttgttgggtgttctggacaggcgttcttcaaagcccatagtatagcgtgtccaaatattgtattacgctgccgtttttttaaaaaaaaaaacaaaaagttttttaaagtttgatttttaaaattcgtaggtttttaaagaatgagcaaaattcctaaagccttgttttcaacagacatcatgtttgctgctttttcagccacgataattgtaggagtttaaactcaaaatgtccaaaactgacctttacatctctgttgactttttattgttgttaacagcacagttagatcaaactagcgaccttttttttaatctcacattcctcatatacaagtagatgtggagtcctatagtcaatactctgaaatatcccagaaattcaatgccagtgcctcataatgcctcacctagaccaacgcaatcaccttctaacttacttattgattttcctgtcactcagacaaaaccttctgtaactatgtgctcaaagaaaaagtaccagttccttagcttggtgttcaaggtggactctgatttgacctcagcttttcgttttgtgatacttcccacttgctgagcatctaaaacatgccatatatttctctaattgtcaaaaaacgcaaggttggttttataaccaccgctctagagatgaaggaccaaactcagagttgcccagtcccacacaactaattaatagtgacagagtttaagatcaaggtttgtctaactccaaaacccaccaacctttttgacatacagcactccttttttaacaccaaaaaatttgttggactagctcactatagtagttacacccttggtatttgctgatttagaaaatacataacaaattgggaattcagtaatgatttttaatggatttatgttgtaataaaaagtggttgtatgtgttttgaattgttgtacatatacattcaagacatttttcattcctttttgtagttggcccgtagtttggggaaccactacaatagcttcactgcctttcagcaccccaaagcagagttcagaatcaatacattagagttttgccaaattttagtattcacaatttccatgcctgtactacaccttcacatcactgcttttattcacacagttctctctcaaatattcttgtttccatctcttcactccaaattctaccttccaagccacccctccaatgctacctccttcatgaaattttctttagccaaactgacataagcacatcctcttgcaaattcatataacaggttttcaatatttctcttgtaggatttgtctctttgtatcttatagctatttatgtacttatttatcctgctaggaattatgtttcttggcaacaagattgggtgtgtgaatcttccataatgcctagtacagttggaacaggaattaaagaatatgtaagcaaaaactcagttgtatgtaagaaaacccagttccccctgaggaggagaaagaggtagagtcctttaaaaattaactgcctgtttttctatctgtggctagtgagccttatctctccctttcccaggcattgtgaagaccctgtttctctagctgtgcagctgcaaagtcactagacagataaactcaagtcataaaatatgtttttccttgaaaagtaagaaattatgtaatgcatatctcaattaaataactgtcatttttcttacttctgtaatatgcttccccctgcacagatctccccccaactgccccctgcccacgaaatgcttaaaaggtaacctgaccctttgttcggggctcagcggatgttaatctgactgtgccggtgcacctaaataataaatcctcctcaacccctcggtctttctgattcctaaataatcctgcaacacagtgctttgcatggaggtagacatttaacaattttct

SEQ ID NO: 585236 - DNA, 4001 bp, Homo sapiens
caaagaaaaacatgtatatttctcacaaaaataggtgagaatttttgttttaaaggataaacctaggtagctacatattagtttgaggaagggggaacagggatgtgatgtgcctgtatccctgactttagacgatggaaggagctaagcaaaacaattgaaaaaagaccgtttgaaaaatacaactgattattaactcatatgcacacacgcaaaaataaacttttagaattgaactgcactaagtaaaagtgagtaaacttggctcatcatatactcttgtcagatgtaaacaaaaaagtccaattattaaaatctgacccccagaattaaaattgcaaaagcttaaaggggcagttctgagaaaaggatcttcagttttgaatgtgtgggctccaccagggttgaaaatcctgcacgactgatgaaacacgatccagttaagcacagtaattttcaaatatccaatcagggcgcttccgtttctaaaaacagagaaaccgagcaagggattttgggttgcagctctaaaactccaacaaactaagctcctttgtcctgacaagggcctaaaccaagtcgacagcccgtaagtgcacccatggtaaggcgctgcacaaagaaagcattttgcgtttcaaagctttgtcatgatggcgctgcagaaagcaagcgagctaggcctacctggcggggctttcagaggacgccaacgtgggcgccagccacgccagcagggtcaccgtccttcccaaggacagacagctcgctagccactcctgtggagagggcgtggttaagccatatattttgccaactatcccagaagcatttcttaggaccacccaatttcggaaaatgctactttagcaatattgaccccaaaacgcaatatccccactttaaccttgtataataaaaagcctcaagcctgggactgggcttcaaccttggttcaatacggttatgactaattagcttggagtcgtgagacgcgggacttccggctaccgaaacccaggtgactttaaaactcgattttaactcggtgcatttgaattcaccttgctatctttgatagattgagtagtaaattcttactagatgaggctatgttaaagttctatcgactctccaagtgattctaatataattgagggcgtgttgcatttgcttgggggatttcatctgtgtactacagctcttttcctgaaatgcgtaggtggctcttaaaagagccgttgggttactagaagaaacttctaactgaatttactttttcttgggtgccgctttcttgggtttggcagtctttggcttcgtcaccctagccttggccgccttgggttttacagccttagctttagcagggcttttagctactttcttgggctttacagttttgggtttttttggattcttggaggatttccttgttgccgcaggctttttagcctttttcggagtcttgacgctctttttgctagcccccgtggcctttttgagctttttagatgcacccgttgccttagtttttgtagccacctttgaggcgccgggcttggtttccacggaggacgccttcttgttgagcttgaaggaacccgaggctccggtaccctttgtctgcaccaacgttcccttgcttaccaggctcttaatgcccagcttaatgcggctgttgttcttctccacgtcgtagcctgcggccgccagcgcctttttaagagctgccaacgacacaccaccacgctccttagaggaggaagcagcctgcacgatcagctctgacacggaagggccagcgggttttttcttggaggctgctgcagccttagcaggtttctttgccttcttgccagctaaaggtttctcaggagcagcagaagcggcgggggcgggaggcactgtttcagacatggtgactaacacagcacaccaaataaagtggtataaacctgacgaagcaggatgcgaaaaaaaggccccaacgcagcctatttatagggtgggactgcgccgtgattggtgcccgtcagtgcccgcccctcgcgccctagcgccccctgcgcgctgccgagggtttcgcccagtctcagaaggcagctgggggcctctagggcctatggtcctgctcccctcaacgcaagcaaacacacagaaaaagccgctctggttgcctcattgtgaaggaaattgtaggcagactgccgcccagtaacatcagagggtaccgcttctctctcaaaaagcagctcttttttagggagtaggttgagagggggcggtttacaaatgcagtgccacaagcatccgaggagttttattagaaatttttagaggtccgttgccagagatgttagtttttaatttgcaagaaatgtaaaatacagtgttttgaatagttgcggagggagagaaaagtgcgagttttaggccgtgttagggccagttgtcatcaactctattacattttctggcaatgttttagagcgatgtgtctcgcgaatacctttcacgtcaaacaagaatgaatcgtagacaacaccagaattcacaaacgctgcaattaatactcaaactgcaagtgtggaaacgtttctgcacttgcaacttatttccacagtccaatgtgggatgcacttcaggaatttccaatgcccttttcatccatacaacatgccccaaattggtattaaggtttacaacctgtgttccatgtcagcacacgcaatcagcgcaccatgacatggtcaactcattcttttattcaacaaatatttatgggcctcacaagcctgcgaaaggcgttaaatgctgggtccacgaaaccggttccctgacaggcattctgctggggagttaagtccacttagtgtgaaagcaaacacgggtgataaatgcaagcacaccctggggataagattttatggtaacaaccctttaacttgtttgtggctgttaagtgcatttcaaagtatcaataagctaaaacgatctcacattgccaatcagagactcagctaatgggagaataaaaaactattaaatcgacatccacttctacaatcctattctggataaccccctagcacagcacagcagagagtgaggtaatgcggtcttatttccgctcctgctgtggtagttttcaaataagtccgaaccatgctaagtaacctgagcttttcccctttttgttcaaacaacgtgccaaccaaataatggagtggtcccagataagtattgtacccatcttctgcaccagtgcttcctacgtcccattttattgagaaggcatgcattcaaatatttcacgtaatttctaaaaatttggaaaataacggttggaaactctacatcttggtttgacggctagtcagttatgaaacacaggtatacaaaattggaagatttttgtaagtaaaccctttgtgaaagatataaacctttcttagtgtaataagcgaggtatctgaaaaaacgcaacttttgaaaaggaaatactcctaattatctgattcaggagtttccactttaaataatgggttctgcctcccttttttctattgggttaaactggtttcaaataaaatgggaacgctccatgcaaatgaaggatgatagatctgctttctaaatggctgttcaagaaaatagcctaaaccaatcaaaagatagaatgtggcctgtctcttgtgaatttaaaaaggtcacaatccacttttcagtgttttgagattttcaaaatgattgcattagctcttggcaatgctaaattatgttccttgcgaaccactatccagtttctcttgggccaagtccacctcctgctccgcaagaggaacaactcccagctggtggtacctggcggcagtgctggagaaacgccattttgtgactggcagagtacacctaggctttagaaaacaaaagctgcagaacgctgcaagtttaggattcaaagagcataatcaagagaaagacgtctcatagaaaat

SEQ ID NO: 585237 - DNA, 4001 bp, Homo sapiens
gacccgcattatcccgcgccacttgcagctggccatccgcaacgacgaggagctcaacaagctgctgggcaaagtaaccatcgctcagggtggtgtcctgcccaacatccaggctgtgctactgcccaagaagaccgagagtcaccacaaggccaaaggcaaataatgtctccatagaatcactttccaatacaacggctcttttcagagccacctactatttctgcgggagagctgggccactggttaaacatttggaacgtttgttatgaaaagataaagcatttttcatctagagcttaggaatgacttttaggaaaaaccttacaggattcaggtgacatgtttaagtcagaatgtgaactagttatttaatgtagggcttacaagaatgttcgctgtgtttattcatctcgtgttatatgaactagaaccaataaaaaaaaatccagagccaggctcagtggctcacgcctgtaatcccagcacttttggaagctgaggcgggaagatcgctggagctcatgaattcgagatctgcctgggcatcatagcggatacaaaaattagccgaccggggtggtgcacgcctttagtcctagcacttcacagaggctgaagtgggacgatcccttgagccggggaggctgaggctgtagtgagccgagaccacgccactgcacgccagcctgggtgacagcgagaacctgacttgaggaaaaaaaaataatccagtacagaatgacacggtcatatcaaattggcatgtaatagagaccccatcttgaaacttgctactatattgtcttgtgcgttgatagcatattatattaatgccgaacacattagtgacgccgaagtagctggtgcctaaatggcttaaacgcggaaaaaccacatacagatgatggaacaaaaactggccaatcagattatagagcgggctttttaaaatataagaagcttctttgtagctaggcgtctgacaaaaagcttgacaccaacttaacaaaaaccaacggctggaattcatactctaataacagactgcatgggtaaactacgtggggagtccaaccaacaccctggactcttgcttgccttgcgttactcgattagggttgagggagaactgcccgagatttttcgaatgcaaggaatcttgctgcctgatctaacatgttgtgcacagccattttttagaggtctctgggtggctctgaaaagagcctttggggctttgttgcggttttcacacgccagcttcctacttctttttggcagccgccttcttggcctttgcagctttaggttttgctgctttgggcttagcggctttgggctttgccgccttcggcttaactgccttgggcttggcaggactcttggttgcctttttcggtttggcagcggccttggccttcttagggctcttcgccacctttttgacgccagccgccgcgggcttcttcgccttcttcggagtcttcttcactgcctttttcgcccctgcagccttcttggccttcttaggcgtggcccccgcgggcttcttagctttagcggcgcctgccttcttggctttgggcttggcttccccggaggccgccttcttgttgagtttaaaggagccagaagcaccagtgcccttggtctgcaccagggtgcccttgctcaccaagctcttgaggcccagcttaatgcggctgttattcttctccacgtcgtagccaccggccgctaaggccttcttaagggctgccaaagaaaggccattgcgctccttagaagcagccacagccttggtgatcagctctgagactgggggccccgtcgctttgcgcttagcagcgccggcgccggcagccttcttagttgccttcttcttagccggggatttctccaccggcgctggggtggctgtctcggcaggagcggtttccgacatggtggcaagaaactgctagaagagaataagctcgaaatctaaagagcaggttttgcgttgctgctatgctcgggccccgggcttatataagccggcgctgccctgtgattggtggagcgtccaatccaccgccctctggccgccgccgctcgcggttggactcccaaattgtgtttgttagtcctcaaaatttgattaaatgcttaaaacaatggtacagaatttggcactttgaagctccaaaggaggaaaacagcctccaggttcacatacttgtttgtgttttcaagaatcttgtgcaattgatgaaagatattttaaaaaatcccttcagcttttcataagaatccattgggctgagggcatcatgttagttagtagcgtgtcgcgataaatttctactaagtatccagtgaaagttatttttaaaaatttgcccatgagttcatgctttgatttttgcaagagaaaagacactgggttccttggtttgggcatgaagtttgtttctaactgtagcaagtaacacaggcacaggacagctggttgcctacagccccaacttaaccacatagacttgactttacaaactggttctgtgtcctaggagtttccatgtgctaatgtctttacagaatgggattttgcagcttggaagagttccacagtcagagtgacttcttctgcattgcagcaccagtaatacaaatcgctttgacttaaggatctaactactcagattcacattcaaacttaaatgtgttatgttttctaattagagtgttttctctttttagttcctgggcaaatccattaaaaaaggggaagaaaaataatatagataattcagtttagagaaaactcaaacttgtggaaaattattcaagagctcccagtgatcctcaaatgcacaaactgtttaggtggcccaggacactgtcaggttttcgaaatgttctcactgctccccctgaatctccacccacatttaacaagctgcaccatcaggaatactctcttctatgagcagccaggatacatcaatatgggtatttttgtgtgttttagcgctaatattttagaagaatatctggctattgactgtgaaaaggttggattggatattgagcgacttcacattatagaggttcagaggaactcaggaaaacataggcaaatacactgaggttgaaataaatgaagtttacaatttatgggaggtggaggggattggacaggatgcctggatgataaaaatgatcaaatgatgatttggattcctaatgaaatcaacagtcacttatttctcattcttgaaatgctgtgcaagaaaatttaaagtagccaatgcacttcatcttctaagaactcctggagaagttggcagactatggccaaatctggacaatggcttttttctgtatggccctcaagctaagaagtgtctttatgttttaaaagtattgttaaaaaaaaaaaaaacaaaaacaaaggctgggcacggtggttcatgtctgtaatctcagcacttggggacactgggataggtgggttgcttgagctcaggagttggagaccagcttgggcaacttggtaaaaccccatctttaataaaaatacaaaacattttgctggatgtggtggcacatgcctgtagtctcagctactcgggaggctgaggtgggaggatcacttgaattcagggtgtcaaggctgcagtgagcaatgatagcagcactgcactccagccagggcaatggagcaagatcctgtctcgaaaaagcaaactaactaaaaactaaagagtgtgtgacagagactatatatggcctttaaaccctaagctatttattacctagcccttttgctgtgttataaatttctccacagagacacagatattgtataggcctcttaccgaacaatgcaaattgagaactaaagaaaaggagatcttcatgagcaaatgatctaaccaagcactttccactgttccaaacacaaaacttagaaggtccaggagaaaaaaaccccaaaactccatgtgtaatgg

SEQ ID NO: 585238 - DNA, 4001 bp, Homo sapiens
catgggagaatgttttctccttcttccctgcctctgtcttcctgtctctctgcttgcctccctcccctttctctttcttgggatgaatccgtggtcactatcactaacaaatcaactcactatattaatcattgtggagatggtagaataattgagcagcttatctccagaagccccagtccccataatttaggtctcaccaaaatgtgcccaccagattttaaaagaagcgaatataagacgctaggctttctgtattcagaagcaccatggatgtcaaacagagggaaccattaacgaaggcctttattagaaatgtctcccatttatccatacactcttcatagttaatagtacaaatactgttttctgcatagaaacatttggactgccaaacaaaatacgtttaaaggaacttcgatttttaaatgttgctgtctgtctaaacaggataagcaaccgtagtcatgcgaggacaaaatggctggctaaaagttgtgctttcgatacgctcaaaatcgatacgctcaaacctgtcagtttagcggaaggctacatgttatgtggcacaaaaaactccctaggtccacgattgccttgggtggaggaagggctattgccgctgttgtggctgttttttaaatgcattccttcgttgccacaggaatgagaaattaacagcagaggaatgtaggacaaaggtacctgcacgcactctcctcccagggctggatgttgccactacctccaggagacatcaacttgactaccaacaacatggaaagcgtccgaaatcccagacattaatataaagagaaaagaggcaaaacttttaagtcacagtaaagcaaaaaacacagaataagcaacgtcttccaccatccaattaaatacagaatgaaagtcatgtactagaagaacggaccaacccgggagcagggcgggacttttgaaaattttttagtccaatccggacatccctttagactaagaaactggctcttgttttgcggtcttttctgccgttcacaggcctggggcgggactgccatcccaaaaccatccgccagcgagaaaagcctccggtcagggacctagaagccgcaataaaggtttaaatgctgtaacctcaccacggccactctccaaccccgtcacccaattcgtctgatacctcagtaactcccatacgactaaccttaagtaacagggcagaacaagaaaaggcagatagtaaagaaattatccagctcttttattgagatcagtggtggctctgaaaagagccttttgggttttagaagtaggcgttcgcctatttcttcttgggcgccgccttcttaggcttgacaaccttgggcttagcggccttgggcttcacagccttagcagcacttttggcagctttcttgggcttcgcaaccttggccttctttgggctcttagccactttcttggttacagtggccgcggccggcttcttcgctttcttcggtgttttcttagcgctcttcttcggagttgcgccgccagccgccttcttgggcttcttggctgccccaactggcttcttaggtttggttccgcccgcctttttaaccttgggcttggcttccccggaggctgccttcttgttgagtttaaaggagccagaagcaccggtgcctttcgtttgcaccagagtgcccttgctcaccaggctcttgagaccaagtttgatacggctgttgtttttctccacatcatagccggcggcagccaacgcttttttcagagcagccagagaaactccgctacgctctttagaggcggccacagccttggtgatgagctctgacaccgggggaccagacgccttacgaggcgtacccccagcctttttggccgccttcttctttacaggggccttctccgcaggaggcgcggcagcgggagcggcaggagcagtctcggacatgttgagaatcaaaaactcgggtacaagtggcaaagcgccgatgaagcagcgcctgggcagggccgctgtatatatagagcgcaggcgcgctctgattggtgctctggtcgcccgcctggctggcaggctctgagccgctgcgctgctcccaagttgtgtttgttccacctcacaaaaggggaaaaatattaaaattccccgcaccaaatcacttgggtttggtcaggaaaggatctcagaagcctcgggcttcatgctcttcatttattttttccacaaacacaaaaacaacgcgtccaggcgtccccaattcccccaactccgaaggaagtctggggcagtcagagaccactttctgtttttcttataaattacctgttcgctcctttgcccctgaaggttctttttcccaggggtggttgggcacatgcttcccttatttttgaagaaaaaagcgaaatggtttccacctaaattttcatgataattctgtttcttcacaagggaagtaacacaggtcctctgtgaattcttcgtgcagtcgcacaggaactgtggactgggacaaggattccacggccagtccaaagcaattagggcgggatgggagggggttcatgagccttgctagggtccggggtggtggggggctacagacttaaatctttgatttgaagacattgaaactatcaaatccctcttttcatagatgggggtggggcatccttttcacttctctacaggcgagaaattgggctctttttaaagagctctgaggtccccctctgagttgtgtaaggcaggaggtctggccctcaagatagagatcataaaggaacaagggagagcccttaagcctgcaaaaaagccaatagatttggcagttagaggcactgagataatatgttttcaaagaaaacaagcattttttatttatttatttttgtacgctgcaatatagaaatgaatttcagcccatgaaaattgtaggttactttcagtaaccataccttacgcaagttaccatataggacaatctccagttgggaactcaaatatatcttttgagttgcaaataaagcaactgactttaataaaacacactcttgacttttaagatgaacaatgtatttgaaatttatttttttaaatagcaaaatttaacacagaaagacaagaaaagtaccagaacatgtaatttattataagatctgttgttgatgagctgaaaaatcacctcttctcatcccctctgaaactattctgttctaaagtttgctactttaaggttcactacttcttattttactctccgaccccaagtaattgctatttttttcttgagattaaaggcaaagtaaattgtctgcccatatatttgatataattatagattcatatttagggacaaaggtaatattacaactccccaacaatttctgctcaaatatatgttttcatgaaaatatgtgttaaagagaacagccttagattgtgggaaagtcaaaagggaacctacaaataagagttcaatgacaaatgaaaagtgaaacatcttttagactaagggtgaccccattgttttattaaataacatttgtccaacatttgtaaacattgtctgcttgtgtgcttatgtcctctgggaattaacagtctaatgagattagtgatggatgaattagcagtggtggaaaaacacttagaccggctattcctcagagtgacagggtataagaattatacaaaattatggaaagtgtataaacaattgaagcacctgcatcatactaatatattgtagtaaaagaaataatataaggctgggccccgtggcccacgcctgtaatcctagcactttgggagactcgggggcggatcacctgaggccaggagtttgagatcagcctagccgacatggtgaaacaccatctctactaaaagtacaaaaattagctgggggtggtggcactcaggaggctgaggcaagggaatcgcttgaacccgggaagcagaggttgcaatgagccgaaatgacgccact

SEQ ID NO: 585239 - DNA, 4001 bp, Homo sapiens
ctgcaaaccaacagaaaaagcaagttttacaaaactgagccagaggctatgatgaactatccctccgattggcttaatacaagaattgcatttttttctaacattacctggacgtgggaagcaagaccacactcgcgccaaaagcaagacctgctttgccacgcgggcctacagttgccagtagggctaatacaccgcgtcctccgcaaatacagctactccgagcgggttggaccagcatgctagtgttacctggcggcagtgctaggaggttaagagtaggcagaaataaatgaacaagcaagagagcccctgggaaaataagtcctggagacgctggccactgacagaaaaagacaatgggcacactttttattttgagacggagtctcgttctatcgcccaggccggagtgcaagtggcgcgatctcggcttacaacttccgcctcccgggttcaagtgattttctacctcagcccccaagtagctggaattacaggcgcgcggcaccacgcctgactaatttttgtatttttttttagcagagatggggcttcaccatgttcttcaggctggcctcgaactcctgacctcgtgatgcccccgcctcggcctcccaaaatgctgggattacaggagagccacctcgtcacgcagtgcagcccccacactatttacaaatacagtacctgagggccgatatcccaaagctaaggcttatcaaaggcctgcgaaaagacagacaccgggcaccaccagcagttggccattctcaacgaccagctgcacaagatcgtgggccggaagcaccttgggcatgccacgtactgctcacaaccaggacgggatgtgctcaggaagtcacctcaacgctaaagtaaactaaagcatttacaccacatccctgtgtcagaaataaaattttttcagggccacttttaagcgccgcgctttaacagaaatcggccggccaatcacacaccaccgcgggaatttgaagaaaaagtaggacctggtggctcaagtagccttagctatccggtgactgtggctgagactgagacggaaggatccttgcgcccaggctgctgggagctgttaataactgacccccaaccagcacgactaggatagaccgtggccgcacaacaccgcagcacccgcacccctctccaccccactcccccctccaaaaagcttcagctcttttgactgagacctgtgggtggctctgaaaagagccgtttaaaattttcaaaggggaacgtcccgccagtttcactttttcttcggagctgccttctttgcctttgtaaccttcggcttccccgacttaggcttggccgccttgggcttaggggctttggccttagctggactcttggcagctttttttggctgaggtgttttcacctttttcgcactcttggccactttcttggtcccagcagcggttgctggcttctttaccttcttaggagtctttttgatgcttttcttcggggtagcggcgccagccaccttcttgggcttcttggctgccccagcaggcttcctaggcttggctgcgccagcctttttggccttgggtttgccttccccggaagccgctttcttgttgagtttgaaggagccagaagcaccggtacctttggtctgcaccagagtacctttgctcaccaagctcttgaggccaagcttgatacggctgttgtttttttctacatcgtagccagcagccgcaagcgctttcttaagcgcggccagagaaacgccgctgcgctccttagaagctgccactgccttggtgataagctcagatactgggggtccggatgctttgcgtttcccagcagttgcgcctgccttcttcgcctttttcttcacaggtgttttttctgcgggtgcaggaatggtaggagcaagtggagcagtctccgacatgtttttgtcttcccagaaaagacaataagtaatctcaaactgtcagaacagcatgtcctctacgagggaggctgagggtttatatagagagacgctgagtgatgattggttccttgctccatgcgcggcgctgctggaaaaggactcctcgtatctaccgcgctgctgtgtttgttgccccttaaaaaagagtaaaaatataagaaatctgggcatgaaataattagagacttgggggaaactgatccgagagagttcgggcttcattcctgcctttgtttctatgcatagttttaaaaccggcatcttgaaacttttcttattcccccaactctctttcaaacttcggtcaaatcgagacaactttcatgttttccttaaaaatactatttctccctctttcatttgcaaatctctcttccagggcattgttctgtgaattcttaccgtctcaactttatatagataaactcatttttatccaaatgtgcagggaaattgggttttttcgcaggaacaatagcacaggctctctggcgagctgtttgcatcaacctctaggaattggcactgaggtagaaagttctatgtacaagaggggtgattagtttagaaaagatagtttaaaaaaaaaaatagtatttgagttaccagtgtgtaagctggatttgatctccatatttcagtggtttaaacatttccagaaagataagggtgaggctacattattcctcttacagaaaaaaaagtcctaagtagagttaccaaccttctcttaaaagttaggatcatggatttttccgatctagaatgggcattaaagatcaactaccacatccccaaaaaagaaaactgaaccaacaaataatagaatggcaggccaacatcattttggcaactgtgagcattgagagcttgtgtacatgtttgtgtcccatcactttataaataatttaatgaaatacactatttttttgctaatattcatcatagaattttgtacattttttatattttaaaatcatatttataatacaaatttcccttcctctttctctgtacaacctgtttgaataactggtaaaagtcactttaaaaaaataaaatacaaattttcaacattgcaagtgtgggcatcaagggttagaaagaaaaatatctgatttaaatcactgtaaattttcatcattctacttggctttttacacacaaaatatgaactaagctgtcacaccctaaattaattggttgaatatgtccacctaaggagctgaacaaacatttcaaagcaaacatgagtaacttcagtattctttatctgttagtttgcaatacagctgatggaattaggttattattaaataattaagcacaaaattgatattctccatcaagtaatcagatgctgaaatgaactcctatgttgaagaaacaagagaagtagtttgatgttatgtttcttctaacaaaaatactcatttcaaaaaatcaagttattctggcctacactcaatagtgattagaggattttttcatataaatcctagataaaataatcaactttaaagatgtcatctctcctcattcaactaatttcataaaaattacttagcttgtcttggccaggcgcagtggctcacgcctgtaatcccagcactttgtgaggccatgctgggcagaccacctgagtcaggagttcaagaccagcctgaccaacatggtgaaaccctgtctatactaaaaatacaaaaattaggcgggcatggtggcacacgcctgtaatcccagctacttgggaggctgaggtaggagaatcgcttgaacccggaaggcggaggttgcagtgagccaagatagtgccattgcactccagcctgggcaacaagagtgaaattccatctcaaaaaaaaaaattactaagcttgtcttaagtaattatttactctcttgcatgtattagaaacaagtctctgggacttaagaccgtgttatacaccactgaaatacaaatgtggtttataaaaaagctaaacttatagaattggattagtaggac

SEQ ID NO: 585240 - DNA, 4001 bp, Homo sapiens
gccggtgtcgggatggacctgcttcagcaccttgtacacatacactgaatagctctccttgcggctgcgcttgcgcttcttcccgtccttcttctgagccttagtcaccgccttcttggagcccttctttggggcaggagcagacttggtaggttcaggcatcgtagcgttaatagttagaacactgttgcaaacacctgagaaaataatcactcccgccgaggccctgttcatttatagatgcggtattcaaatgaggttaatcagatttcgtttatgattggattaattttagagtgtcgtcacaaatgccaatgtaaacgacacttaaaagtctaccttttcattggctatttcgttcctttacttgtacccaatgagaaagcccagaccagactacccgaggctactataaataggcctctttaggcaagacagctgtgcacttcgcttggagcagttggtttttgagatccgacttttttaacattgtggtgtcagaacttacaccgaaagatacttaacagattaggagaactcacattcctttcttcctttaacaaagtatgggactcgttgcatacagaagccgtgctaattgggacatcccccccccccaagtctgtcagttttacgtttcggcaagtccttaatccatccaaatgccacatttaaggaccaagtatttttctgcagtgtcggtttctaattttcagttatgtggcagtagtctccccaagcacttgaaatgtagcccttcggaaataatgtcagtactatgccacttgtcctaagacgtactcctctgaagtccctcactgcctgccatactcgatagggataaccagtaggcttgtaaccagcacagaaactgatacactgtgccgtgtttggaactcggaaaaacccagcttagaaacccgggaaaatcccaacattttttttcccatgctatctggaggccagggcctgctaaaagtgcaaagcacaagggaggcccaaatgggttcaactccgacactcgagaacgcaaaatcgagatgacgccactgcactccggcttgggcgacgcgacgccttagtcaaaaatagctccggagacacacaaaatcccactcctctccccgactttgttcccgggagacccgcccctgcttagcagcgttttcccgagccacgccccctaatagtgcaacagctcttttactgagagcggtgggtggctctgaaaagagcctttgggttgtgttgggcttctaagcagttggccaaaggaactttctactttttcttggctgccgccttctttggcttggctgccttgggcttggcggtctttggtttagccgccttgggtttaactgctttggccttcgctgggctcttgggcgccttttttggcttggctgctttcgcctttttcgggcttttcgcttttttggctccagcagctgcagccggcttcttcgccttctttggggtcttcttggcgctcttcttgggggtggccgcccccgtcgccttcttgggcttcttcgccgctcctgctggcttcttggccttggccgcgcctgcctttttagccttaggcttggcttccccagaggccgccttcttgttgagtttgaaggaacccgacgcgccggtgcccttggtctgcaccagggtgcccttgctcaccaggctcttgagacccagcttgatgcggctgttgttcttctccacgtcatagccagcggctgccagcgctttcttgagagcggccaaagatacgccgctgcgctccttggaggcggcaacagctttagtaatgagctcggacaccgggggcccagacgctttgcgcttggccgcacctgcagacttgcgggccttcttcttcacgggagtcttctcggcaggggccggagcagcgggcgcggcaggcgcagtctcggacatgttgaaggcaagcgtgagcgagagcaattcgagccggaagcagaggcactggccgggactcgagccgcggcgctgcgcccgcccgtttatatagggcggagctgcgccgtgattggtgcgctgtccagcccgcctcgctggcagccgcagagtgtcctctcggatcccgagttgtgtttgttacacctcaaaaaaagccaaaaatataaaaattgtctacaccgaactgcccggtttttctcagataatgatccccgaaccctcaggcttcacgcagatctcaaattataagggaagcacaaagccttgtgccaaaaacttgcaatatttcccgccgtgcttggcaaatttcaactcagagaaacaaaactttctattttcttcgtaaattataaaccgatctttaactgtggacttttctgacctctcaaatatgatactccaagtggttagcttcttatatatccaaaaagcatgccactggcattaagatttttattacaaatctgcacttaagtgagggaagtaacacaggctcctcggagagtcctgcctattgagccgagggcatttgagttcatcaaactggtttagtttaatgccaaacaaattattgcccatttgagattaagttttggacccctgggacatcaatctatacagccatggttttacatctgtccgctacatctgagtttttaaacaattctttggataattctttccctttctgctcccaagggttgggggcggggctgttgcttctctcttcctctggacaattgctccatggattgagataccttgaattcagggtatttgggaacgaagggaagtccaaaatgtactcagggtacagagatgaaaaaggattaattttcaaatgtgatgttcataaagtcactggaagtggaggtgcactttactttaaagcatttgtctgcagccttgctgagtgcttttggcatatgcttcagaaccaaattgcaataaagtagcttagagctgaaattcaagcattgatgataaggcaaaataaataagaaacgtagattgaaacatctactcccattattagtgaaacccagcccctattattactgaatagttgaggaatgactagtccactcaccacgtatggtttcaatccccctgaagattgtattccaatgcttcccagagctcaatagaaagaaaaataagtgacatgtagtgattaaacgacaagttcaaatttcgatctcagaagtagagctttgagagtctatctaagctattataaatcattgccctctgaaaacatcctttgaacaatgtctgagtgaatttctttaggtagttgcccaatcaagaagagtgtatgtaagctggcaatgaaagcccaaccaaaagaattatttctggtccgggcgcggtggctcacgcctgtaatcccagcactttgggaggccgagacgggcggatcacgaggtcaggagatcaagaccatcctggctaacacggtgaaaccctgtatctactaaaagtacaaaaaattagccgggtgcggtggcgggcgcctgcagtcccagctactcgggagactgaggcaggagaatggcgtgaacccgggaggcggagcttgcagtgagcctagatagtgccactgcagtcaggcctaggcgaaagagcaagactccgtctcaaaaaaaaaaaaaaaaagaattttttctgaaaaacgatatggctggaacagtatgggtggaactacaagccacttatcatggaaacaaaataaaattttgcccagtgctataaggtgatatgatactgttctgtggacgtggttgattgtaatatggcgttggatatcattttaaattttaatttcattgcccaaaatctccagacacaaattctgctactgaaataaggagaatatagaattttgatataacacgagtgaaatgtatcaaaacagtactgtttaatgttgaatttgttataaaagtgatgtaaattatcaatgtttttaatatcttgatgtgtattttcaatctaattattgcacatcagtgcaa

SEQ ID NO: 585241 - DNA, 4001 bp, Homo sapiens
aaagtaattcatagggttacaattgtattagaccaataatattaaaataattatcaaaccacttgaccgtaatatgtgtgtttttgttgatatacctaatagtacttcggaaataagcaagcacgatttccagattcttgcaacaactataacctacaaatttgttatttctatcagtcacacacaatggaagaaaattctaaatttcagctacaggataatgaatagatgaaaaacaacaacaacaacaacaacaaaaaaactcccctaatccatattctgggacaccttgattcctatttattgatcccttgaagtcagtggatagcatattaagaaacaatagttacaatgacaccacagaaagactagaatgtagtacttgtgttaaaaaaaaaaaaagtatcagcaagttatgtttggatgccaaattgctctccacttcccttccctgacactggcatttccagaacttagatgctcttacatgtaaaagcctcctctagtgcaccatcgagcttttcaggattggacatcagactttttagttcctggacctctagatatacggcagtctctgacaagaagccctttttctgttttaactttttttttttttaagttttgagacaacgtctgactcgctgtcacccaggctggagtgaggtagcaccatcatagctcactgtatccttaaacgcctgggtgcagggactaagggagcgtgccaaccatgcttgactaatttacttttttgtaaaaccagtagtctccaacctttttgacacaagagaccgttttgtgtaagacaattataccacggaccagggggtgcaggggctgggagcaatgatttccggactaaaactgctccaacctcagatcatcaggcattagattgtcacaaggagcctgaaacctagatcccttgcatgtgccattcacaatacagtttgagcttatgagaatctatctaatgctgcagctaacctgacaggcggtggagctcagttggttaatgttcgctcacccctcagctgtgcggctcaattcataacgtgccatggacagggaccggttaccggtcggtggccggggaaatgaggacccctggtatagatggtagtctggctatgttgcccaggatggtcttgaagcctggcctgaattaattctccaatctcaagccttttcaactcagctgcatcacaacttaaacctatagataactgtcacagaaacttgtttccagtgttacgccatcttaaaataatgtgggtggctcttaaaagagcctttgggttctttccaaattggcctcccggaaagctctttacttcttagatgtggcctttctaacattaacttcatgatgttgggtcaattttgacttcgaagcccttgccttcactgggctcttctgctgttgcttacccttggctcctttagcctttctcccgctcctaacagttttaggagttgtcgctctcggcttcttggctctcttattggttttagcagtctttggtgacttggagtccctggataaaaccagcttcttggtcttggcagaaactgactttttagccttgcttctggtagatttaggaatcaccttcttactaagcttaaaggaaccggaagcaccagtacccctggtttgcaccaggattcccttgttcactaagctcttgagggacagtttgatgcggctgttattcttctctacgtcgtagccagcagcggccaatgccttcttgagcgcaaccaaagacatacctactcgttcctgtgacactgaaagggcctcggtgatcaacttggacacagagaggttcggcactttgcgacttgcacttatcaagccagccggcttcctccctcgcttcttggttggaagtttctccatagcggctacaccagcactggcagaagctgcaggcacggtttcagacataacaacagagaaacgcaagatgtaataaccagcgaaaagcatgaaacacccgggcggcctcggggccttatatagggtagggcgcgctgtgattggtgcatcacctaggcaccgcccccgccccttggaggaggagtatttgtgtttgttttacccggaaaagttgagtataacaaaacccctctttacagaatctcccagggtctagtgctgaataatctgcggaaattcatatttgacatgacttttctctttttaatgaaaaatgaccctggatgccaaaactattcgagaaagccctcgattttcaatcaaattcacggagaggaacaaaacttccccttttccttgtaaattaataagtaatctttggcagaagacttatttcatctcttcagagtggtcttccaaatggatagcttcaaatcggtagaggaaagaaattattcacgccatgatttttatttaaaattatttatatatgtgagggaagtaacacagatctcttagctgtctaattgcggagtcagaagatgcttatagaattgtcaaaagactgcagaggatgtctttatttaggcatgtgcaatctaataaatcataatccacaggaacatgggttgtctgtaattaaaggtgctcccaagtccctgtagctttatagaggactctcaaggatggggtaatatcaagatctcacacattatgtaagattggccataatcaggccactctcatgaccggtgtcctcaactgagttttgcttctggtttcattaattgaagtcccctctatccccctgcccacccctacatccccagataaacagacacagtccctcccctaaattaactataaaacatgaggtaggaaccctagactcaagaacctactagaaactacagaccccatgtctaacaagactgggcgggttggctgggcgcagtgattcatgcctgtaattacagcacttcggaaggctggaggccaggagttcaagactaggttggcctggtccctactgaaaaaaaaaaaaattagctgggtgtggtggcacatgcctgcagtcccagcttctgggtagactgaagaggatcacttagagcccaggagcttgaggtcgcagctactgcactccagcctgggcagaccctcatctctgaattgcttaattaattaactgagctggcagatttggctgcatagctgtggggaaagggttgttggaataatgtccagtgtgctcccctgagcttctactggaacaggtctttgtgagaggcctggagataagagcttgctcacaaaggctgaggcctttctgggatgctgaatgagtttagtgtggccagagcatagggtctcagcaaaggaaaactccataagggccatttgtgaagatccccaaatacttgtgtgaaacatttggtagatattagaagttttgttttggtttggtttgagacagagttttgctcttgttgcccaggctggagtgcaatggtgtgatcttggctcagtgcaacctccacctcccaggttcaggcaattctcctgcctcagcctcccaattagctgggattataggcgcccaccaccatgcctggctaattttttgtatttttagtagagatggggtttcatcatgttggccaggctagtctcgaactccccacctcaagtgatctgcccgcctctgcctccaaagtgctgggaatacatgcgtgagccgccgcgcccggcagacattggaagtttttaagcagagaatttgttgtattgttgtagttgtcttgggtttagatttattgcataaacaatcatttttgagaagggcccacagtcagaagttgggagtctgttgcaatagtctcagaagaatggcaaagaccttgcctaaggggacagtgtggtaaaggagagagtctacatttgaaatatttctgaaacaaaagccaaaagataagacttcaaacttctgattgcaaagtgagatagaaaagtttctttctctctgtctctctgttatacccatacacacaca

SEQ ID NO: 585242 - DNA, 4001 bp, Homo sapiens
ttgcattagagatagaaataaaagtattatgtagtgcatttggaataaaagaatacacaggttctcttctataaagtcaagtccctcctcctctgccttggcaagtctgagaagttaagtgccactttcttgacaaagtatctacattaattacttggaattcatctgtttaggtttgtcttatatcctgattttaagttttacatttgccatgttctaaatattacccagttttattcaacatatagttgccatttctgttttcaaatatcttcaatttttgccgtccctaactgcatcccttatttattatgtatgcaggttaattcatacttttgtaacttgattgtccttactcggcatgttttattttatagaactttacctgcttctatacatgccttattatgtgtagacatcaagtgtttagcagttttttttttggtaaccaaatgattttttttttttttgaggtaaggtcaactgttgaatatcgtacaataatttttaatttagttatttggcagcgttactgaatgggttttgcttttcactttctcttggtgtttacagcacaaactgcaaacacagatcaacaaactattttgcctcttttcaacagtcaaaacttttgaagcatatactcttccaaatttctaaacttcaaattatgttcggccttctagtcccattcctgcctgagtctaacactagtatctcaccatcacatatggcgtaaggcttctttttgacatattttacttacattttaagaaataattctattattctttacaaagtacgtgaaaccacaggtatcaaatatatatgcttacccaaattttaagattaacttacttacatgccacatttaattatgagtatttcgtgaaactaccatatttgaaaggaaattctctaaaatgtactttaaccagccagactgatgttacctggatttaaacaggaagattacacctctcctgcttgtaatgcaattttcacttccatgtgtaacccttaacataactaacatacataaatctagtttgagatagtctcgctcatgtcacccagactggagtgcagtggagcaatcaatcttcgttcactgtaactttcgcctcccggactcatgaacaaccctcccaccgcagcctcccgaacagctgggactacaggcctgcatcaccagacccagctagtttctgtggggacagggtctcaattatgttaacggtcaagccccaggcttgaacgaccctcccgctccaacctccactgaagtgcaagtactgactgctcacaagcgttaagccacctcgcccagtgacatatataaccaaaattacctcaaactaatggccgatggaacgctccttgaaaattcagtccccgtacattcccgaaatgcgcttaaacgggcatttgtgacaggcaagtaagatggctggttaacagcagtaacgttttgtaacgtacagcctttttctgagacggtaggtggctctgaaaagagccttttgttttttctgacacagaagtctttttaccaatgacaaccttaagttacttgctttgggctttatggtggtgactctcagtcttcttgggcagcagcactgcctgaatgttaggcaggactccgccctgggcaatggtcacgccgcccaaaagcttattgagttcctcatcattgcggatcgctagctgcaggtggcggggaataatgcgagtttttttgttatcgcgagacgcattgcctgccagctcaaggatttctgctgtgagatactctaacactgccgccaaatacactggtgcgcctgcccctatccgctctgcatagtttcccttacgaagcagacgatggatccggcctacgggaaactgcaaacccgctctagaagagcgagacttagacttggcgcgtgcttttcctccctgcttccctcgtccagacatctcctcgcatcaaattgcagcaacacgagaaccacatttctagggctgctactgggcctatttatagtctgactgaggttggcatttgctatctgattggctgatggccgtctacccaatcagaaagtcgtactagaatcgcctcatttgcattcacgccacttcccattgtccaatcagattttggataccgaacgcggcgtttgagggccgtgcctataaataccgcatctttcatcctccagttctgtttgtttacttggcgagacttggagctgaggtcatttggagctgtttaatactgaagagctgttgagcactggaaagtgctgtgtaaccctggaaaagaaccgtgtaacgctgcagaagtgtgtggtagctatgccggaggtgtcatctaaaggtgctaccatttccaagaagggctttaagaaagctgtcgttaagacccagaaaaaggaaggcaaaaagcgcaagaggacccgtaaggagagttattctatttacatctacaaagtgctaaagcaggtccatccggacactggcatctcttcgaaagctatgagcattatgaattccttcgtcactgatatctttgagcgtatagcgagcgaggcatcacgtttggctcactacagcaagcgctccaccatttcttccagagagattcagacagcagtgcgcttgctactgccgggagagctggctaaacatgctgtgtctgagggcaccaaggctgtcactaagtacaccagctccaagtaagcctgctaagtaaacgtcatttctaacccaaaggctcttttcagagccacttaaacatactgaaacagctgtgggcttcgtttttgtgtagtttctaaccgtaagggttttttttttttttgaggcggagtctcactctcccaggctggagtgcagtggcggaatctcggctcactgcaagctctgcctcctgagttcacgccattctcctgcctcagcctcctgagcagctgggactacaggctcccaccactacacccggctaatttttgtatttttagtagagacggggtttcaccatgttggccaggatggtctcaaactcgatctggtgatcacccacctcggtctcccaaagtgctgggactacaggcgtgagccactgcgaatatatccaaatcagctgtgggccgagggtagacgaactagttgcagcaagacaatccttgctaggcaccgtgactcgcctgtaatcccagcacttgcagaggtcgaggctggcggttcatgaggttaagagacggagaccatcttggccaacaaggtgaaactccgtctctactaaaaatacaaaaatcaggtgggcgtggtggcgtgcactgtagtcccagctaattgggaggctgaggcaagagaatcgcttgaacccaggagccggagattgcagtgagccgagatcgtcactgcactacagcctggtgacagcgagactgtctcaaaaaacaaaacaaaaaaaccccctagtttgtataaaagctacatgctgatactggtatatttaaggttagcattacacataataaaactaaaaagcgcagcgacatagacagtataacttgcattatgatcccaaattttaagacctcacaaaaagggaatagtttagaggaagttacgttttgtgccacaggtaagtcaaggtgtggaaatgattgtgcgaactctggagaactcacaaatctggttagcaggaattaaacggatttaaaatgtcccttaattttcttaaatttataatagtttccttcattgtcatgttactggttgttggactccatctgtaagagctcccaagcattaaactgatttcagccaccttaaaaatggatcaaatattacttcctggaaacctgtggttagctggaattctcaatttgtttaacgcatcttcatttaacctttatcttttaacaaaattttggatatgtatatgtgctttctctacattaaaaagttagtaccggccggcgcggtggctcacgcatgtaatc

SEQ ID NO: 585243 - DNA, 4001 bp, Homo sapiens
acagctactttcgttggaataagtgggtggctctgaaaagagcctttgggttttaagactgatgaaaaagtgactttacatttacgctctttctccgcgaatgcggcgagcgagctggatgtctttgggcataatagtcactcgcttagcatggatggcgcaaaggtttgtgtcctcaaagagccctaccaagtaggcctcacaagcctcctgcagcgccatcaccgcagagctctggaagcgaagatcggtcttgaagtcttgggcgatttctcgcaccaggcgctggaacggcagcttccgaatcagcaactcggtcgacttttggtagcggcggatctcgcgcagagccacagtgcccgggcggtaacggtgaggctttttcacgccgccggtagccggcgcgctcttgcgagcagccttggtagccagctgcttgcgtggcgctttaccgccggtggatttccgagctgtctgtttagtacgagccatggcaaaaccacagaaaagcttgcctgcagagacgtctgtggaggaaaggaaagagctactcttcttttatagagtcagaccaccaactattggacccaagaaaattcaaaaatccccgcgcccttcttggattggtccatctctgtgcctggttgcagattaagagaggctcctgcccattaccgtagctactctgacgtcattttgttaaccccttagctgctatatccactgtggacaagtcttgtactggaaaagtttcctgaagtcttaaaatttacaaccacacaaagcaacgcggaaacctccaattgtttctagttaaaatataaaaaagaaatcagagaatattggagacgattagggaaatttgcatatgcgctttatttaaaattgtatttttctgggtgtcgcataagaagtgtgggcaattagaaaaatgctcttagccgggcgtggcggctctcgcctgtaatcccagctactcagaaggctgtcaagaggatcgcttgagcccgagttcgaggttacagtgagctgttatcacgccgctgcactgcagcttgggcgagagggagactccaccccaaaacaaagcaaaacatccccaaactggaaaaaagctcattttgggaaatacatactcaaatgttcagtggtaatgtgtgtgctctcaattgtgtatgccattaattgctacagcaaatggtatgacatattcaaacttgtgtggggcatgcgggttttaacacttccattcaagatagttaggaatgcactcatgggtataatttccttcctctaaaatgtagtaactgctgtgtgtgaaacttaacgcgaatcacccctgtaaacatgttttgtgctgcatggcacttctcccacatacctagaattcctgaggtttctatggatctaatttctgcaggacaaattactaaaagtgccacactcaaagccattaaaaacacctcaaaaacatctttatgggcggcataatccaaagcacaacagctcatttaatggaagtcgtaggtggctctgaaaagagcctttgctgttaggctgattttgtctgctgacagaaaaacagcagtgcatgaagcgttaactcttcactttcccttggccttatgatggctctcagttttcttaggcagcagcaccgcctgaatattaggcaaaacgccaccctgcgcgatggtcacacgccccaagagtttattaagctcctcgtcattgcggatggccaattgcaggtggcgcgggatgatgcgggtcttcttgttgtcgcgggccgcattgcccgccagctccaggatctcggcggtcaggtactcaagcaccgccgcgagatacaccggcgcgccagccccgacgcgctcggagtagttgcctttgcggagcaggcggtgcactcggcccacaggaaactgcaaacctgcacgagaagaccgagtcttagccttggcgcgagctttaccgccttgtttgccgcgaccagacataactacttctgataagggaaaatcgccacaagaaaatgtaatgaaactacattagaacgcaaggcagagaagtatttatactgactggaggtaggctgtgaggaattctcccattggctaatgtcaaatacccaatgggaaatcagaatctgcatccttcatttgcatgtaatccttccgtctggtgtaaggtttatgtttgacccaatccccagtctggcttgacgagccttcgacttgaatactaataataattggccgaattaggattttgtcaaaataccttttttaagcatgagtggaggttttgttctggttattttgactttcagccgctcgtgcttttcccggattgtgactcatgtttttggaaaggagtggactccgaccaatttctaaatagatatttaagaggtccttcaaatcgggcgcagtggctcatgcccgtaataccagcactttgggaggccgaggacggcgggtcaggcgttcgagaccagcgtggacaacatggagaaaccctgtctccagtaaaataaccaaaaaagaaacgggggagaaaaagaaaaaaaaaagccgggcttggtagtgcacgcctgtagttccagttactcgagaagctgaggtgggaggatcgcttgaacccgagaggaggaggttgcagtgagttcacatagagccaccacactccagcgtgggcgacagagccagaagactgtgtctcaaagacaaaaaaaggggagggggagtgggagggaagaaaagcgaataccccaaatcccagtgaactgtagaagcttataagctctcttgattcataagggagaaagaagggggatgtaggcaacttaggggagagtatatgattttggagaaaaataaatgggtgtttcaaagaataggtgacagctgtgacaaagtctgtttagatggtgttaaccaccagtctcctctcctgtgatacagttaatcttctctggttgatgagattccccagggaagtgaatcttaacaactaaattcctttttgaatttttttttaattttcaaatttttgattagagttcagcgaaagcccttccttgaatttactgtttcctaggtgccctcagttcaaagaaatcagcgtaacaaagtggcacatttttgagttgcatttcctgaactttttcacaacactgaatgaggagtctctggaatctttcaggaaatgagagaacaaacattccataacacagaaatactcaaaatgggattatgattataaaagtgtttcactgaccaccttctgccttcctgtctgtaagtcccattctccccaaagtctagccatagaaaccagaattcctcctcaaggtaggccatacaaaccagaactccttttccctagaaccagccataaaacctaaaagtattactctaacctaccttgtttgcctgtaggtcataagaccccccattctaaaagagagtcttgtcctataaccagaaggaagaaatgctgcactgagaggtcaagaagaatcttgacagacaagccttgcggggcttccccactcagtctgttagcattagatcgtaccctatacagctgtttatcttgttgaacctaagcataaaaatgggcaatttcccctgtatctttcagtcttaattctaaaatctcctgtaaaattgtgatgaaataaatatatatgccttttctccagttaatctgtgttttgccagtaattttccataaaccttgggagggcaaaggggaagtttttccttggccgggacaatattattacagccattgtctggctctcctgttgaggaacctaaaatcaagacagattgcctagggaaatcttggtgtttttccttttatattccatgagataggagcagatggagtacagatgaacgtggattaattattccaggaatttctgaggtatctactacttctatctgtggtctgcttatactgaaacaggatgacagaaggaaaaagaa

SEQ ID NO: 585244 - DNA, 4001 bp, Homo sapiens
acgactgggtctgtttggccagtctgagcagctgggcgcagatgcataggcaagacttagcccgcctagacttttctgcccacttaattccgatcaaagcagaaaccggccgggcgcggtggctcacgcctgtaatcccagcactttggtaggcagaggctggcggatcacctgaggtcaggagttcgagaccagcccggctaacctggtgaaactccgtttctactggtggcgggcgcttgtaatcccatctactagggaggctgaggccggagagtcgtctgaacccgggaggcggagtttgtatgcagtgagccgagatcgcgccactgcattccagcttgggcaacaggagcaaaactccgtttcaaaaaagcaagcaaacaaacaaaaaaatgcagaaaccgagatccggaagaaaacctcggcgagattcacagaatccaggaaaataggtctctagaaatttgtccatggtcccagatctccatttcttgtgggtggggcagctgttaccagatccctagaagcaaaggtttttttgggggaccgtgtctcactgttgcccaggctggagggcagtggcacgatctcggcttactacaacctccgcctcccaggctcaagcgactctcctgcgtcagcttcaagagtagctgggattacaaggtatgtgccaccacgcccaacttatttttttatttattatttttatttagtagagaggtgtttcaccatgttggccaggttagtgtcgaagtcgtgacctcaggtgatcagccccctcggcctcccaaagtggtaggattagaggggtgagcagaaagcaaaggtttttgagtggccacaggccccactctatttccttttctgcctgtaatggcaacctagacgcttgagcttcttaaaatacaagagtaagttgcatgtcaggcaccgttctacattagggacattagtctgttttacagacacctttcaactccctggttaacttttaggtaatatactctgcactttagcaggaatgggacctataactctcacagaattaggaaagtgaggctgcctacagcctaaattgagaaaaaaatagacgggggactagtcggaggaccaaacaaggttaccaacacgttagagttttgccttcaatttacatttttaaagtaatcacaacgaagtgtttagatcacgaggcatccctgcatgtaaactgttaggcactaactatggtcgatcttacaaagcattaactagaatatttctttagagtatgatagtacgtaactgacctactattacatacaaacagaccaacctttagtaacagcgctccccaaaaaccgaaaagcagtaatacgctttgctcaaggttggcataaaattaacttaccttagtgccttttttccttctacctacaagcagtgaggttagctcttcctttgaaacggtaggggggctctgaaaagagcctttgggtttgatagcgtttccgggagctcagatacctgtcaaatcacttgcccttggccttgtggtgactctcggtcttcttaggcagaagcacggcctggatgttaggaaggacgccgccctgagcaatggtcacccggcctagcagtttgttgagctcctcgtcgttgcggatggccagctgcaagtggcgcgggatgatgcgagtcttcttgttgtcgcgagccgcgttgccggccagctccaggatctcggcggtcaggtactctaacaccgccgccaggtacaccggcgcgcctgccccaacccgctctgcgtagttgcctttacggagcaggcggtgcactcggcccaccgggaactggagaccagcgcgagaagagcgggatttcgctttggcgcgagctttgcctccttgcttaccacgtccagacattgcaatcagacaaaaatcaccaaaaccagcggcctaagctcacgagaaaacaaacaaaatcaagaaatatgtaaaacatggccgcttttataggtagttcctggggagtaaatccgactttttgattggtcggtagcaaatgctagtcagatagccaatagaaaagctgtactttcatacctcatttgcatagctctgcccacggatgacaactgtgcagtttgtcttccaattaactaagaggtactctccatccctcattagcataaaagccctataagtagcagaaatccgctctttactttcgacacatttctggtgttttaagatgcctgagccagccaagtctgctcccgccccgaagaagggctccaagaaggcagtgaccaaagcgcagaagaaagatggcaagaagcgcaagcgcagccgcaaggagagttactctgtgtacgtgtacaaggtgctgaaacaggtccatcccgacactggcatctcttccaaggccatgggcatcatgaattctttcgttaacgacatatttgagcgcatcgcgggcgaggcttcccgcctggcgcattacaacaagcgctcgaccatcacctccagggagatccagacggccgtgcgcctgctgcttcccggagagctggccaagcacgccgtgtcggagggcaccaaggccgtcaccaagtacaccagctccaagtaaacattccaagtaagcgtcttaacacctaaccccaaaggctcttttaagagccacccagatacccactaaaagagctgtggccagacgccaaattttatttggcggcggaggggtattagaatataggaactggagaggggtggggacaagtgttgcagcttagagagggacaaagggtcctgaacccgaaagaagccagccattaaaaatggctttggggtcaattcgttgtgcttaaatttaaaatggagacaagcggccattttgctaactcggcgttcccggaagaaaccgcaggctcgcttaggtttcagacccagctgtctgtccctgtctacgtcgccaggatcaacggttgccgtaatgtcataatttcgccaccagcttctagccaataggctgtcctgtcattttaaatattaaccaatcgagggaaagctgttttgagactctgatttacatagcggaccggagtgggaacctgggcagtaactgcctaaggaaggactccccctctgttttcgtggcgcacaccttcgtagtatactgaagggtgtgtctcctgggtttccaactgccccggtaatagtcttttaacctaatatgcgtcagttttgataacaacactaaggcagtacagaactaaagatgtaagcactgcgccagatgttgcttcatacatcttattctattcaactggtttattcaagattcaaatcaaatcaaattttgcttgaatcccagtgctcagtcagccataaatggtgtgttgcctgattgaaacttaaaatctccgtagggggcttgtaacatgcagacaagtttgaaagttgctttaggagaagccaactcttaactgctgggtaaattgacaagccttcgaacactgaactgaaggccagtaaggactaggcgctgggtgggggagaatgaagaggagacgtcattaaacttagcacatacactgtatctcctagaggactctcccttcctagacaactgcaggccgctttgtggcctgggaaattccacattcccttaagtattttactcatggtcttttccaggtaaagattttaagatgaagggttagacgtagtctacctatctttttattcaagtctagaacacgtttttagcacctagaagtttgctttctccattaaaaaccgggaatatacaataaataaaattagtgttaaagcagatttttacaaacttaaataccatgtaatttaggttacagttatttaacataaggactgtgtgatcttaaatctgcaatttctttcacacctgggaaataaactaaggcctgtctttggtgccagacaaggccttatacttgaacactgctgtgcaatcacaggctgccttgc

SEQ ID NO: 585245 - DNA, 4001 bp, Homo sapiens
tagcctttcgtacccgtatatataaagacacccctgttctgattggacaaggcagcctttcccctgcagctcgattggtggagacgcccactccctgacagaacatctcctgcatgtagaccaaatattaaaactttcctccgtccatctttaactgctggtgttttcaaccctttcccctctgtgccatgtttctagcttttatttaaaacgtactttggttttccttggcaaaattgtgtctagctactaggatgacgtgtcttaatttttttttaaatgttggcgctgaaactggctttgatcaacgttttaaaaagacgcgcgctagttgtgattggccaagtgatttctttttaccctcttaagtttagaaaggttaatttcatatcttgatttgtctatttaaacttggagatattttcaataatttgttccaaatgcaccatgactattaactcataagtaacaatatgaaacctgatgttaagctacatgaacacatttaatttcaccacaatatgtcatcctcatatgaaagcactcttatcttttacaagttcaactggtatttgtgtaatctgctgtaaaaaaaaaaaaaaaaaaaagccaaatttataaatggcacaaaaagaccagtgtgcccttttagtcatgctgaacactgtgctaagaagctccacctaagggccgtctggctccaggggatgtaggtttgtattcctattgataattaattagggttagctcagtagagttgaaagtggcttgcaaaaacaaacccaaaaaatacttacaaattacaggttatttcgtatcattaagatgcatacaaaagacaataaaacatttgttctggttctgttgctttaagtcactaactatatttttatgtaaatgtaaacactgacaaacattaacttctctcctgtatgtctcaggccttttaacagctttgcaatcctaacgagccgctgcattgatcgatttaaattacatgtgacataaagtctctttgcattttaattagtttgcttttttgggtttttgtttgttttgagacagtctcgctctgtcgccgaaactggagtgcagtggcgcgatctcgactcactgcaacctccgcctccggggttcaacattttctcctgcctcaacctcttaaatagctgaaattacaggcgcgcgccaccacgcccgacaaatttttttatttttagtaaagacggggcttcacaccatgttggtcaggctgtcctggaactcctgaccctgtgatccgcccaccttggccttccaaagtcctgggattacaggcgtaaggaaccgcgccccgccaatttgcttatgtatttttatggcatctttaaaatggacggttagtttcacgattcagtgttaagaacacccacttataaatggaaaaattattaaagaaaactgcaaaatagctatttacacagaaaatgtgagcccttttaaggaatacatgggtggctctgaaaagagcctttgttaagactgcttccttaaaaagccaatataagagttctcgttttacttgcccttggccttgtggtgactctcagtcttcttggggagcagtacagcctggatgttgggcagaacaccgccctgagcaattgtgactttacccagcaacttgtttagctcctcgtcgttgcggatggccagctgcaggtgtcgggggatgatgcgggtcttcttgttgtcgcgggcggcgttgcccgccagctccaggatctcggcggtcaggtactccaacaccgccgccagatacactggcgcgccggccccgactcgctcggagtagttgcccttgcggagcaagcggtgtacgcggcccacagggaactggagtccggcccgcgaagagcgggtcttagccttagctcgggcctttccgccttgcttgccgcgtccggacattttgaattcttaaaaacgatgttaagcaatgaagacaaaaatgtaaaagtgaattttgttagcaagtgagaaactattatacttggaggtcgaattgtaaataacgctatttgattggctagaacaaccaaccaattgcaaagaaacgctagaatcacctaatttgcataccacagggcacacagagacaattcatccaatcaatgtgtaagcttttaaatgccagtttacgataggagctctacaaatattaccagctgcagagtgaggacacttgcatttctctttaggttgtggacgaagtgtttatttatcatgcctgaacctgctaagtccgctcctgctccaaaaaagggctccaaaaaggcggtgaccaaggcgcagaagaaggatggtaagaagcgcaagcgtagccgcaaggagagctattccgtgtacgtgtacaaggtgctaaagcaggtccaccccgacaccggcatctcatccaaggccatgggcatcatgaactccttcgtcaacgatatcttcgagcgcatcgctggcgaggcttcccgcctggcgcattacaacaagcgctccaccatcacctccagggagatccagacggccgtacgcctgctgctgcccggggagctggctaagcacgccgtgtcagagggcaccaaggccgtcaccaagtacaccagctctaagtaattctaacgtcttcatacccaatcccaaaggctcttttaagagccacccactttttcagctatagagttgtaattacctgcatattttccgtgtttaccaccaacaggtttggttttatcctcatttgagggggttgctgctgtgtaggtctagaccacagttcttttgactggttgaaggaaaatgctatacttaaccgtagcatgtttgttttaccccaagtgctggttagaaggctagcccattgtgctgataagcacatttttcttatgttgtgctgtgatgtgtcccttgtcaaattggtttcataagaaaagaacttttgaaatatctcttttgctactgacatagtgtgagggaaaggaatgtcttccttaattccggtttagtcatcgcagcattggcgaatttagctggttaaaataatgtaatcaaattctttaaaatataaggaaagcaagacaagtaatgtgcatgaaaactgaaaaaatgtgaacacccgagcctggatgcagcactaataatcaacattgttcttggtttagttaaagaaaatttggccactggcaaaataccatttgggagtaatgagacacacccctaatcctaaaatattttcttgtcacttcctcaaagttgtttttgactttttttccttcagggttgacttcatatgtgttcattttattctaataagcaaaagttgtaatttttaagtgaaaaaataatttatgtcattctacttacaaatacaatttttctattctatatactcatatataaagatactgaagttttactgtattcttggtaattacaagccttacttaagatcataaactgttatgaatggcatccagtgtagaatacttaaaatttttacaaaatgtttttgtatcttaaaaatatttaaaatattatatataaaagattcttagaatttcaacccagttaagaaaaaaggaatagtattctatattattactttttttttttttttgaggaggagtttcgctattgttgctcagagtagagtgcaatggcgcaatctcggctcacagcaacctctggctcccgggttcaagcgattctcccgtctcagcctcccgagtagctggaactacaggcgcgcaccaccatgcccggctattttttgtatttttagtagagacggagtttcaccatgttggtcaggctggtttcgaactcctgacctcaggtgatccaccatcctcagactcccaaaatgctgggattacaggcgtgagccaccacacccgtcccataattatttttcaacttcccactccctgtccggcacataaatggacacagaacacagcacatgcaaagca

SEQ ID NO: 585246 - DNA, 4001 bp, Homo sapiens
gctttacagtgtagtccatttataaatttaggtcataaaactaagtttttgctgctgggttttttttgtttttttttttttttcctttcctaaacaggatcttgctttgccccccatagctcgctgcagcttcgaactcctgggctcaatcaatccttccccgcgtaattctcccaagtatctaagatctcagactgagccaccaggccaggctttttcttttcttttcttttttttttttgagacgacggagtctcgctctattgtccaggctggagtgcaatggcatgatcttggctcactgcaacccccgcctcccgggttcaagcgattctcctgcctcagcctcccgagtagctgggatttcaggagcccaccgccatgcctggctaatttttttgtatgtttagtagaaacagggttttgccacgttggccaggctggcctcgaactcctgacctcaagtgatccgcccatctcggcctcccaaagtgctgggattataggcatgagccaccgggcagggcaggctttttactttttgtggaggtgagggggctgtctcgctttattgcccaggctggtcttgatctcctgggctcaagcgattcttctgccttagtctttcaaattgctgggattacaggtctgacctagggcgtcaggccgttactgcttagtttcgtttagtgtttattttagaatactgtgttaattgctccttttgaaaagagaaatccaacaaacacaattctcactagaggaatgtagtctttttttttttttttttttttgagacgtagtcttgctctgttacccaggctggagtgcaatagcgtgatctcggctcactgcagcctctgcctcccggagtcaagcgattctcctgcctcagcctcccaagttgctgggactacagatgcacaccaccacgcccggctactttttgtatttgtttagtagagacgggctttcattatgttgggcaggctgatttcgaactcctgaccctatgatccgccctccttggcctcccaaagtgttgggattacaggcatgagccactgagcccagccggaatgcagtcatctttaaaacttaaaaagcccgccctgaaatgctaatgggcagctatccttctttgttctctcgtttctgtattaatatttcacccttttctgacaagtgcacatgaataaacagcctgtgtattaatgataaatttgtatacacagcatggacctatacacaaaataacgcagtgaaaccttggtgtcacaacctcggtttctattcttgtatacctttataaacgcatttttactgcaaagaaacaccagtaagataaattagtgcatgaaatgtgagcaaggatttcaataaagaactgaccagtaacgtcagaagcgttcgttaaaaattaggacagtgaacattgagatttcaggcatcgtatgtgtattccagcactttacagaaaaggtgggtggctctgaaaagagcctttggtttctgggactcgggatcactgacggatttgactagtaatcatttcacttgcccttggccttatggtggctctccgtcttcttaggcagcaatacggcctggatgttgggcaggacaccgccctgcgcgatggtcacgcgacctagaagcttatttagctcctcgtcgttgcggatggctagctgcaggtggcgcgggatgatgcgggtcttcttattgtcgcgagccgcgttgccagctagctctaagatctcggccgtcagatattccagcaccgctgccaggtacactggagcgccggccccgactcgttcggagtagttgcctttgcggaggaggcggtgcacacggccaactggaaactgaagaccggccctggaagaacgcgttttagcttttgcccgagctttgccgccttgctttccacgtccagacatagtggcttcctaacagcagaagaactaacaatccactgaataaagaaaaagaatgggctcgatggaggaataagaagctagttatagtcatcggtagaattgtgaaaggcgcaatttgattggttaaaattgttctttgacgagccaaccaattagaaaggaaataaggtgaaggctattttacatgtatgcgtcactaacacattgcccaatcagagctggatattttgaattctttatttgcatgaaaggcctataaaaggagagactctagacacgagcttttatttaagtgcgttcattctcactgctgttattgttttctgacagcatgcctgaaccagctaagtcagctcctgctccgaagaagggttccaagaaggctgtgaccaaggcgcagaagaaggatggcaagaagcgcaagcgcagtcgtaaggagagctactccgtgtatgtgtacaaggtgctaaaacaggttcaccccgatactggcatctcatccaaggccatgggcatcatgaattccttcgttaacgacatcttcgaacgcatcgcaggcgaggcttcccgtctggcccactacaacaagcgctcgaccattacctccagggagatccagaccgccgtgcgtctgctgcttcccggagagctggccaagcacgcagtgtccgaaggtaccaaggctgtcaccaagtatacaagctccaagtaaatgtgtgcttaggtgctttaaaactcaaaggctcttttcagagccactcaagtctcacataaagagctttaatattgaatttcaccgttttctagggaataatttttccgattttgtaatcccagcactttgggaggccgaggcgtgcggatcgagaccagtttggctaacgtggttaaatctcgtttctactaaaaatacaaatattagccgggcgtggggcagtcgcgtgtcatcccagagactcgggaggctgccgcaggagaatcacttaaacccagcaagcaaaggttgcagtgaaaagacatggcgcttttgcattctagcctgggcgacaaaggcgaggcttcgtctcaaaaaaaattgatcaggagatactcctgttctgtgttggcaagatcctgtaatcctagcactttgggaggtcgatgcatgaggctttcttcagctcaggagttaacagatttgcctgggcaacatagaactcgtctctgcaaaaaaatgaagctaaccaggtgtgacggcttgcgtctgtactatcatttactcggtaggctgaggtggtaggatagcttaaactctcgggctagagactgcaggaacatgtgaatacgctagtgcaattccagcctgggcaacactggaaagggtaggaagagtagtctttgggtccctaaagatcacctgataacaagtttgacttttctgagcactcttgtggagtttgttgtggagggaataccatgggcattggcaatgtaaagttgatctaaaaaatctcgttttccgccgtgcgcggtggctcacgcctctaatcccatcactttgggaggccgagacgggcggatcacgaggtcaggaggtcgagaccatcctggctaacactgtgaaaccctgtctctactaaaaaaatacaaacaaaattagccgggcgtggtggcactcacctgtagtttcagctactctggaagctgaggctggagagtcacttgaacccgggaggcggaggttgcagtgatcagagatcgcgccactgcactccatcctgggcgaaagagctagattccatctcataaaaaaaaaaaaaaaaaaaaaaaaaaaaaaattacagttttggctggctgggcgcagtggctctcgcctgtaatcccagcattttgggaggcgaggctggtggatcacttgaggtcaggagttcaaaaacagcctgacccacatggtgaaaccccgtatctactaaaaataacaaaattagccgggcgtggtggcgcatgcctatgttaccccagctacttcggagactgaggcaggagaaacgcttgaaaccgggaggcgggggttgc

SEQ ID NO: 585247 - DNA, 4001 bp, Homo sapiens
aactttgtttggcattttatatacttaaaacatcattctgagattttccatgttaccagacagccaaaagtgtctacaatacacaagaaaaatgagttaacgtcttcttaagattacttcagagtgggccgggcgtggtggcttacgccggtaatcccagcactttgggaggccgaggccggtggatcacgaggtcaggacatcaagaccatcctggctaacacggtgaaaccccgtatctactaaaaatacaaaaaagtagctgggcatggtggcagacgcctgtagccccagctactcaggaggctgaggcaggagaatggcgtgaacccgggaggcggagcttgcagtgagccgagatagcgccactgcactccagcctgggcgacagagcgagactccgtctcaaaaaaaaaaaaaaaattacatcagagttcagtgaacagagggaggaggcacaattgtgcaatcttggcatgagtattccttatttagctacaacaccaaaagttatttgcactaccgtagtaaataaccctcctttacagaaaactgccagtcttgctaggaggcctcagtttgtgtcaggaacgcccaataccctgtacttttctaatagtcataaacatttctaatatttctaatgtacatttctaatactcatcaacatttgttgaaccatattataatcctctatatattttccctcctatctgtgaggcagacattttaacagtctgtgtgctaacactttacctcagatttcttcatgggttttaaggtttattattaactatcctgtcaagttcttctaggtaagcaacttgggatattaggcctttccaaatgagccatctttcttgggctccagataacgtcatcccagtattttactcacttcattttaaaggaatactttgcaacatgcagtagggtgggtaagagaatgcttcacagctatccatcaggaaagatgtgagtctctgacagagcctttgcagggaggtggactattgtgtcacaaagttcttcagcctcgctctcgtgcagcggcgtcaccgccgagctctcgcaggagcggcagcttgctgatcagcagctcggagttctggtagcgccgaacgtcgcgcagggccactgtgccgggcacgtagcggcgggacttcttcatgccgccctggcccgcgtggaacagctgtctgctaaattctagcccgggcgataactcttttgggccaaagtgcttcaagaactcacgaagccactggtgctctgtggacacacactgattaagtttaaaattaagtaatggcctaagagatttgttcacatcttaacttttaagcgtggtaaaatctggaccaccttccctctagtttttcttttaaatctgcggtgttcgctacactgttttcaaaaagatgggtaatttatgactagagtcttgtccatgtctcactttctttcacatggaataaatgttaagttcttttagagaagacgtgggtggccctgaaaagagccgttggtttggactcgattttacttgagctgccacaaactagtacagatagttacttgcccttcgccttgtggtggctctcagtctttttgggcagtagcacggcctgaatgttgggcaggacaccgccctgtgcgatggtgactttgcccagcagcttgttgagctcctcgtcgttgcggatggccagttggagatgacgcgggatgatgcgggtcttcttgttgtcgcgggccgcgttgcccgccagttccaggatctcggcggtcaggtactccagcaccgctgccagatacaccggcgcgccggccccgacccgctcggcatagttgcctttgcggagcaggcggtgcactcggcccacggggaactggagaccggccctagaagagcgagtcttggccttagcgcgggctttgcctccctgcttgccacgtccagacatagcgagcgcaactcactacgagcaaccacaaagtgaacgggaaaggcggcgctttttataaacactattgggcgcgaaaaagaagacgtgttgttggttagggctgcagtttaatttcaaccaatagtagtgcgtcttctggatttgcgaatcctgattgggcagacctgacctctgacgttaccctgaataactaccaatcagacacaagacttcaactcttcaccttatttgcataagcgattctatataaaagcgccttgtcataccctgctcacgctgtttttccttttcgttggcgctttatagctacacagtgctatgccagagccagcgaagtctgctcccgccccgaaaaagggctccaagaaggcggtgactaaggcgcagaagaaagacggcaagaagcgcaagcgcagccgcaaggagagctattccatctatgtgtacaaggttctgaagcaggtccaccctgacaccggcatttcgtccaaggccatgggcatcatgaattcgtttgtgaacgacattttcgagcgcatcgcaggtgaggcttcccgcctggcgcattacaacaagcgctcgaccatcacctccagggagatccagacggccgtgcgcctgctgctgcctggggagttggccaagcacgccgtgtccgagggtactaaggccgtcaccaagtacaccagcgctaagtaaacagtgagttggttgcaaactctcaaccctaacggctcttttaagagccacccatgttctcaaagaaagagctggtgcttgtattcctcctctgctggccactgacaaacccttgtaacttgctactgtgttttttggtctgaagtagagcagttatttaactaatccttagtgactttttttttttagatctgccattctaatcttagagttaagtaaggagatgggaaattttctattataagttcgaaaccaattaaaatacgttagaaaccaattaaaatactcgtcggtcccccgtcggttagtgatttggaacagtgccaagttgcagcggttgtcagtttgaatttgcccgggcaacgcccgcccttcctctgcatcctgattggttgttgtatccaggaagtccacggtcggcttgggtgcgccaaaggaatccaaaccccgcctttatttggccttccttacaaactcagtaaactgtcagtttctcattctttagtattttatcgctttcgggaaggagatttatttctaattagttttcgttggatagagcgtttttttttttaaagggaccctttatggcaacataatcagtttttttttttttgagaaggagacttcctctgtcgcccagactggagtgcggtggcgcgatctcagctcactgcagcctccgcctcccgggttccagcgattctcctgcttcacccttccgtgtagctgggattacaggcatgcgccaccatgcccggataatttttgtatttttagtagagatggggtttcaccatgttggctaggctggtctcgaactgacttcaggtgatccactagcctcagccttaaagtgctaggattacaggcatgagccatcaagcccggctacaacggaatttgaatgctgtagttttcagcctgagaaagatcaatgctttatttctgattagaatactattttccctttatggtatatctatataagcaaaggcattagaagcctaaacaggacaattcggggcgtaatgaaggcagaaagcttgaggacatttatcccagactcttttctgaaacaagtcaatttcaattttaaaactcctttcgttagtattttaaatactgtttttgactttgcctagaagaagtgaggaaaaacaagttcccccttattcaggttgtcacaaatgagaaccagtcacccaacaaacgatgttgctctaggttgtaacttcagtcatgtgtctcttaggtaaaaatccaaggtctataaagcatttggaagctcccactatgactaggttttggtttcaaaggtagtaattgtat

SEQ ID NO: 585248 - DNA, 4001 bp, Homo sapiens
ctcatatgtcactacattataatttctcgttctgcatctcttgcatttctttttcaattgggcttctgcatgcaaagactgggagtagcaaacaaatctatgtgtattgaattacaaactatgtcctcttaaatctttgtgaaatacataaagttaatactattttttggtgtcttttttaagtggcttgaattccgtagagaaaaaataaagatgtatacatgtaatatttcaattaatatatatcctatccccataggcatagagagcgtaatggggccctccattttagagaggagataaacaaagatgacctctttataggtgttacttgatcagagacctacatagattgaaaaaaagtgagaaaggtagttatcaggggaagagggaatttaaagtgcaaaggccttaagacagaaaatgtgtttggcattttgtgggaatagccagaaagccttgaggctatgaagtaaaagcaggccaagtaatatcaagagggggtggggcggaggaaggaaactcatagggcttcctagggtaggtaaattaatgtggacaagcaatcaaaagcaatagcaatcccgatctaataaatttgataatacaaattagctagacagaaaaagctatgttgtatcctaagctactacaagagtgcattaatacacctgctccaaagaaatgggactaaggatttacaaatatgggattcaggaaattctgcatcccatattctccttccatcggaatcaaattctaatgcaaatgagtcactagactttcatcacctgggtaaagttactcttaagagttagaccacttaagaatcaggctgccctttcttgcttttcaagaatacttagaattgcaaaatttgcctttaaagaatggcaagtatatcccatttttatggctgtttgacaacactattaatgtaatagaattattacactggaggccgggcgctgtggctcacgcctgtaatcccagcactttgggaggccgaggcgggcggatcacctgaggtcaggagttcgagaccagcctggccaccatggtggaaccccgtctccactaaaaatacaaaaaaactagccggtcgtggtggtgtgtgcctgtaatcccagctattcgggaggccgagacaggagaatcgcttgaacctgggaggtggaggttgcagtgagccgagatcgcgccgcgccactgcactccagcctgttggagactccatctcaaaaaaaaaaaaaaaaaaaaaaaaaccactggaattagtaaatagatttcagggatttgtacgtttgatttcacttattacccctgctgaataagcttctccggagtatcctacaacaacttttgggtcttcattgctttccagtgggttaatttagaaacattgtaaagagttgctccagcccaaccgcgaaagaagcgctttacaatgttatctagcgaagcaaacatgaagtgaaacaaacatgactgtgtccagctttctctaagacagtgtagaatggctctgaaaagagcctttgttttccagttttcacaacctcgctccttatttggccttatggtggctctcagtcttcttaggcagcagcacggcctggatattgggcaagacaccaccctgcgcgatggtgactttgcccagcagcttgttgagctcctcgtcgttgcggatggccagttggaggtgacgcgggatgatacgggtcttcttgttgtcgcgggccgcattgccagccagctccaggatctcagcggtcaggtactccagcaccgcagccaggtacactggcgcgccggctccaacccgctcggcataattacccttgcggagcaggcggtgcactcggcccacggggaactgaagcccagcccgagaagagcgggtcttggccttggcgcgagctttaccgccttgcttgccacgtccagacatactggtcacaacttactgaaagtagccaacgaggaaaggcagcgccttttataaacactattgggcgcgaaaaagaagatatgtcattggttagggttgtagcttagttttaaccaatggaagtacgtcttttggatttgcagattgggttgattgggtataactaacctctgacgtcaccctaataaccaccaatcagatacaggactttcactcttcaccttatttgcatgagaggtcctatataaaaacgactcctggtaccttgctcccattacttcccgttttctcgatctgctgctcgtctcaggctcgtagttcgccttcaacatgccggaaccagcgaagtccgctcccgcgcccaagaagggctcgaagaaagccgtgactaaggcgcagaagaaggacggcaagaagcgcaagcgcagccgcaaggagagctactccgtatacgtgtacaaggtgctgaagcaggtccaccccgacaccggcatctcctctaaggccatgggaatcatgaactccttcgtcaacgacatcttcgaacgcatcgcgggtgaggcttcccgcctggcgcattacaacaagcgctcgaccatcacctccagggagatccagacggccgtgcgcctgctgctgcccggggagttggccaagcacgccgtgtccgagggcaccaaggccgtcaccaagtacaccagcgctaagtaaacttgccaagtaagcgtcttaaagcccaaccccaaaggctcttttaagagccacttaaattatcgatattagagctgtaaacacgtgttcctaatccaggcttaaattcgggcgatctttttaaagggattatcatgatcttatcacactgagtaatgcatgcagtgcttgtaatcgagtctggctaaggagaagccacatacactttgttagtactgagtgaggaatatggcgcctaaaaaattagggatgtgcaggaaacttgtgttaacagaaagtgcttcctggctcttggcgcgaaaatggatacttccgttgtgtcgagtgctgtgacttcctgttagaacttgttgaaagcctattgtgtcacgtgtactttccaccatgtaatggcgttctaacgtgagtttatatattagtaaatttggttcccgatggcgttccagtacgtatggctttcgctcgagcagttaccttatttaacctcttctaggctgtacccagctctgccttgctttgcttccccctcaccccctgattccatctctgcagcccacgggacatcgggaagatgccagaccaccaggcaggatagtctgcaagggtaaggggaggagcacagcttttctcaggagtgaagaaacggaacatgaaatcatcacggagatttttggaatagtttactagtttttaaggcatgttcagcgtcaattggtccaatcagtaatttttccttttgacaagaaagcttatagaaaaggaaaatgaaaagcaagtagattcagaggggagacaacagacagactagagacagtccgccccgaagcaagaagttggagtagaggagaagggaacttccccagcagcacagggtttgagctaagtgttaggtggtgggttagaattaggtggtgggttttattgtgtgattagaggctagaatgactatgccggtgatgagcagtgtgaaacttttttggaagaaccaagtgaaagaaagagtccacgaattttaagctaggttgttacctggctaaatttgtgatttagaaatgtaggccagtttcacaggggaattttgtgtgtgtgtgtgtgtgtgtgtgtgtgtgtgtgtgtgtgtgtatttaacatatttggccacgcattgttctagtctttggggatattgcccgcccttaggcatttggagattagcagggtcatattgaaaaacttcatacatgcaaagcatatgttcactgttgatccaagtcttatttatcctaccagtaattttggggttacattaatattctaagaaatgtatcaacaaataattatatttattgtttaccta

SEQ ID NO: 585249 - DNA, 4001 bp, Homo sapiens
atagcgatggggcttcttgacaccgccggtggccggagcgctcttccgagccgccttggtggccagctgcttgcgcggagccttgccgccggtggacttgcgagcagtctgcttcgtacgcgccatgccttcagagctagattcacttcaggagaaagagaaagctagccgcttatttatagtgagagtctgaagctgattggacaaaagtatgctgaaggcctacccaacagtaaccggattggcgaaggactcaaatttttgttgttcacctattcctctgacagacttagcagttcatggtctccatattttattttctattttcgctatacagttgttcactatactagcgatttccagtggaaatgagagcaatataagtaatttacacttatctaggagaacattgtaacaaaacaaggaaaaattaatttttaatattttgcttaatccaatatagccaacatatttcaatgttatcgaaattaaaattgttaggtattttacactttttggcactgacttttccaaatgcaatgtgtattttatataaaattcatgctatggaatttccaatgatcactatccacaattggctagtggctgcaatactggacaggacagccttatacacctgtcccctcaattttctatcttttgaccacttaaatttaaaaaacttctatttttataaccaagaaaagctggttcgcatgtgagaaattcaaggccaaaaaatgtcaaagaaacaactttatgtgaacttttcacttttagattaaagtaattccattgcagcttatttttccaatactctagaaatgtaattcattttcttttaagaatctattccattcgtacatccagatctgattcagattaaaaacatcaagtcagatattttaaaagtggaatttaccatgctgaaacaaattaagtcatctctgtactaagaaatcaatttgtgtggctgggggtgggaaagctcgggaaattttaatttcaatgaattttcagaaaatgcttcaaagagaactacctggcaccataagtaactgttctaattagtctaataattattctcaactcaatcattaatgttcaaatgcaattaattatacagattcgagagatatttctcagaaatgaagaatccaagtcgttgatctagatttggattgaacgtcgaatgcccggtttgttatttaccaagacccagaaaacatctggccccaaagcagacatgtttgcttcaacagactaaaagtaaaacccgacggtgaaccatacagaattcaacatacttggataatgccagcttaggaaaaactaaattttcttccactaagcttaagatgaaggcgtgtttaatacttttaatgttatccaggctttttataaagctaacgagattgtcactacctaaccaagacaccgaagactgatctacgtaacctttggagtggtttagaagtaggcaaagacgagaaattacattaaacatagtgctcagttcttccacaaaattgtaggtggctctgaaaagagcctttggttcctttgggattgagttgctgcaaactaatccaggcttctacttgcccttcgccttgtggtggctctcggtcttcttgggcagtagcacggcctggatgttgggcaggacgccaccctgtgcgatggtgactttgcccagaagcttgttgagctcctcatcgttgcggatggccagctggaggtgacgcgggatgatgcgagtcttcttgttgtcgcgggccgcgttgccagccagctccaggatctcggcggtcaggtactccagcaccgccgccaggtacaccggcgctccagcaccgacccgctccgcatagttgcctttgcggagcaggcgatgcactcggcctacgggaaactgaagcccggcccgagaagagcgggtcttggccttggcgcgagctttgcctccctgcttgccacgcccagacatggcaaaaggcctattatctatacggtcaagaaagactgaagtgaaactagaaaaacgtacattttatagcctctactgggcgcgaaaaggaagctgtgcgattggcttacgttttatttttatttagaccaataggactcgattatgcaggatacctattttgattgggcaaaactggcatctgtcgtcatccacggataattaccaatcagcagagaccttcccactacctcggccgcataaactattatataaaaagaggagaccgacttcttgttttggttttgccactattgtttcattatgcccgagctggccaagtctgctcccgccccgaagaagggctccaagaaggcggtgaccaaggcccagaagaaggatggcaagaagcgcaagcgcagccgcaaggagagctactccgtgtacgtgtacaaggtgctgaagcaggtccaccccgacaccggcatctcttctaaggccatgggaatcatgaactccttcgtcaacgacatcttcgagcgcatcgcaagcgaggcttcccgcctggcgcactacaacaagcgctcgaccatcacctccagggagatccagaccgccgtgcgcctgctgcttccgggggagctggccaagcacgcggtgtcggagggcaccaaggccgtcaccaagtacaccagctccaagtaaattctcaagctcttgtccaacccaaaggctcttttcagagccactcactattatctaaagaagagctggttcgctcttcctatcactggggggcgaggggtcataaatcattttgatctatccactaaattaatctagctctttgaaagccatttaaggtgaaatgtacatgaggtacgtgcatatagctaccaacaccatagagggtccgacctttgcgcttgagggcataaactaagtccttagcagggactgctttgcgctttgctcgttccgtgtaagtcagtcaagcgcatccgggatcacgttatccggaaattccttgagcatccacgggtttctaaaaagatgagaccagaatgcgtttgacaccgccaggccaggctccaggtggtgggtctggtgatgtctggatgttgcacagcaacttgcggtggcgccccctttacccaatcctttccctcacttgcgcaaccagacatgattttaaggcacgacaaaagacccgaggtaaaaaccaaaaacagcactaggaaaacaaggctggcgtttttaatctttccgactaaactggaaactagaggggtgggcgcggtggctcatgcctgtaatcccagcactttgggaggtggaggcgggcggatcccttgagcccaggagttcgcaaccagcctgggcaacatagcaaaaccccgtctctgcaaaaagcacaaaaattagccaggagtggtggcgcgcccctgttgtcccagctacttagggggctgatgtaggaggatggcttgagcctggtaggcggagtttacagtgagctgagatcgcaccactgcactccagcctgggtgataaagccaggccttgtctcaaaaaaaaaagtgggagatcagtaaaagttaacaccttgccttctcctaattgtcaatgcctgctagcaaaagatgccagagtagatttttaaaagtttttcttgttttcacccaaacccaactgtttttcgtatactatttaccatccaatttactaacatttattaagcatctactattcaccataggccagtcatagtattctgctataggaatggaaaatcctgaataagcctcccagaccttaattctcaatcattgctggtggccccacaaattggtagtgctttcataaaggaaaatttggtaatacctgtcaaaattttaaaatgcacctatctttacatcagaaatttcacccctaggaatttactatttttgaaaatatgcaaaataatatatgcaggggtttccagcagcactgtttgtagtataagactgaagcaatttgactgattagc

SEQ ID NO: 585250 - DNA, 4001 bp, Homo sapiens
tttaaaaaaaaggacataattcttgtgtctgaatttcctgagatggcaaaactcataagtggcataacaatccttttcaaggcccaaaataaaaggaccttgatatgcccatacagaaatatggacaacaggccgggcgcggtggctcatgcctgtaatccaagcactttgggaggccgaggcaggtggatcgcttgagtccaggagttggaaaccagcctgggcaatgtggcgaaaccccatctctccaaaaaataaaattagccaaacgtggtggcgtgtgcctgtggtcccagatactcaggaggctgcgttgggagaatcgcttgtgtccagaagttggaggttgcaatgagccgagatcgtaccactgtcctccagcctgggtgacaaagcgagaccctgtctcaaaaaaaaaaaaaaaaaaaaaaaaagataacatgaggaactgacctcactattctcaaaatagcctttggcttttctcagaagagatatttttttctgagtgtaggtattcacccactagtgctcttggaatcaataagtattcagaaccaaccttaccatcgaacatcaccagcttggactactatgcttggccatctacttatccagcagttactaagtatttaactcacttactaattgtaagtgtttacaggatacatttgtaacataacacccaggtacaaaaaggttaattacatacagaattaaacagaaaaatatcagaacacatacaatgaagttaactattattaacatgtgatttcagcagtacactaacataaatacatgtaattattgggtcactgccgaacatgtatatgtttgaaagacccttaattagaaaacttctaaggccaatttttttttattccaaactcttgtaagtgcaaaaattaaaaatagaaaacaaaacatgaccaatgtatacattggtaaacataaaactgtctggttttgtttaaatatacccattgagcagctcctttcctagaggccaggaaatagggctgaggactctaccctcagttttcaatctagagactgtgaaactgtagagaaacacactgtctagtagcaatccatatactttttctagtaagcatattaaaaaccgaatactatactatattccttacagcccagtgagtttcccagaatcataaataaaacccaccagtacctactatgtaactcccagtaagaggctttgacttttgtcaaagttgtgtcccagtaaaatgccttcaagataccacaaactggcctggcgcagtggctcacgcctgtaatcccagcactttgggaggcctaggcgggtggattacctgaggtcgagtcagagaccagcctggccaccaaggtaaaacccctgaaaacacgtgttagcaaacgtaccttgttagtatctacattaagaaaaaaaaaaaaaaaaaaaaccttgaaattcaggcaatgtaaacaggttaaagattaacaccgaaacatcatgagtgtactgtgtagtggtgaagcagctgaaaacggactcgtgtcatctttttatgattgttgaagtggctctgaaaagagcctttgtttttatgcgcttttcaactcggtctttacttagtcttgtggtggctctcagttttctttggcagcagcacggcctggatgttgggcaggacgccaccctgtgcgatggtgactttgcccagaagcttgttgagctcctcatcgttgcggatggccagctggaggtgacgcgggatgatgcgagtcttcttgttgtcgcgggccgcgttgccagccagctccaggatctcggcggtcaggtactccagcaccgccgccaggtacaccggcgctccagcaccgacccgctccgcatagttgcctttgcggagcaggcgatgcactcggcctacgggaaactgaagcccggcccgagaagagcgggtcttggccttggcgcgagctttgcctccctgcttaccacgcccagacatggcaaaaggtctattacctttacggtcaagaaagactgaaatgaaattggaaaaacgtacattttatagcctctactgggcgcgaaaaggaagctgtgcgattggcttacgttttatttttatttagaccaataggactcgagtatgcaggatacctattttgattgggcaaaactggcatctgacgtcatccacggataatcaccaatcagcactgacctattctactcctaatttgcataataacatttaaataaagaggacgaaacagccctaaggttgtcttttattttgttttccaccatgcctgaaccagtcaaatctgctccagtccctaaaaaaggctccaagaaggccattaacaaggctcagaagaaggatggaaagaagcgcaaacgcagccgcaaggagagctactctgtgtatgtgtacaaggtgctgaagcaggtccaccccgacaccggcatctcttccaaggctatgggaatcatgaactccttcgtcaacgacatctttgagcgtatcgccggagaagcgtcacgcctggcgcattacaacaagcgctcgaccatcacttcgagggagatccagacggccgtgcgcctactgctacccggggaattggccaagcacgccgtgtccgagggcaccaaggccgtcaccaagtataccagctccaagtgagcctctcgctgcagtaacagttccgccgtgacccacaccccaaaggctcttttcagagccgtccacgtttctcaagaaagagccagttcactgttaagtttgtctcccattaggtaccctttgggactcgcttcgtacatataaatgtacttgtatatgtgggtttttttttgttttttgttgttgtttttgaggtgtagtctcactttgttgcccaccctggagtgcaatggcacgatctcggttcactgcaatctccaccttccgggttcaagcgattcttctgcctcagcctctcgagtaggtgggaccacaggcatgtggcaccaggccctgctactttttgtatttttagtagatacggggtttcaccacgttggccagactggtatcgaactcctgaccttaggtggtccacttgcctcggcctcccagtgttgggatcacaggtgtgagccactgcgcccggcccaaaatattttaaagaggattattagcaactatgagtgaccgtggcttagggaagacacaatcccccgagaccatgagaaagtggttctgaggcagtcagaatgcaactgttttgtacattttagggaagcagaagttataggtaaagtcataaataaatatgtggagggttagtccaggcgtggtggctcacgcctgtaatcccagcactctgggagtcagaggcgggcggatcacttgagatcaggagtttgagactagcctggccaacgtggtgaaaccccgtctgtactaaaaatacaaaaaattaaacgggtgcagtggcacgtgcctgtaacaccagcttctcgggaggctgaggcaggagaatcgcttgaacccgggaggcagaggttgcagtgaaccgagtcgtgatcgcgccactgcactaacctgggcaacagagcaagactctgtctcaaaaaaaatcaggtaaatcaaagaaaatgaactggaaaaaataattgctcttaatatcactgtgaatacctagtgagtgttctgtagatgtgttacagttaaattgccagaaatattctagttatgtttaaatcaatttttaaaattgtgagaaaactcagatacctggaaggattcaaaaggcatctgcactgagattgcttttccagagcctttgaatcctcacacttctttaaagaaacccaacctgaaaaatactttctaacatatgtgtgatttatgctaggaatttccaatttaggattccattcaataaattatcaaaacgttagcaaagacatatacatgttaatagattaagtaagaataatacattcaaagagtgaa

SEQ ID NO: 585251 - DNA, 4001 bp, Homo sapiens
acaatgtccttcattcatactgtttttaaataacacgttctaaagtaatctcacaccctaaccccaaccctttcccatcatttatataaacagtccattatgacatgtattctttgcccaagccaacttgaagctccttttggatagagactttatgtatctggattaatattgtattcccatttaggagagtgcctggcacaccatagatgctcagaaagattcaattgaactcgaataggtaggccaaacacacacggggtcctaaattgtgcagaagggtcagatacctaaattttgcttccatggtcttatgaagtataaactaaaagcccaagtaaggagcaaaggttagtttaccaattttatctctggaacccaggtacactgaaaagtattatttagctagctttcagtcctctgtaatacagaaagtaaatatctgacactaggttcatttgaaacactcttgctctgtcacacaagctggactgcagtggtgcaatcatagctcattgcagcctcgaactcctgggctcaagtgatccttctggtctcagcctcccgagtagctaggactacaggctatgagacgccaggcacggttagttattttacttttgtaaagatcaggctggcttcgaactccaaggctctagcggtccttccgcctcggcttcccaaagcggttctgtttaccggatggtgccaaacagttccaggctcttggtgcccggtagaaattggacgacacacacacagatagcaaagcaaagcagcaaaagtttagtaaacagagtattacactctcgggggtgggagagagcggactgacctctgcgaggtgagatcagcgtcagcttgctgtagtttgagtcattttatgtgtgtgcgtgcgtgtgtgtatgttttctgttcccagtgctgcctaatctatagccagcatctgcccttttattgataggtttgttgcttactttgtcctctgtggcttgtgcctctatcttataatcttaaatatatgcatgatatgtagcccatatgcatgaaccttaagtagctgattatcatacgggcttttgttaaggatacttttcctctctaatacgcatgcccatctctgaagagctgcctcttaaactggtttgttccagatcttgccggccacgaggtccttgctcacattatctcttttgtttcggctgcaaaaggttcactgcttgttatctcgcttcttgttcacccgcccatctaccttacttctgccctttgcttttacttattctgccctctaactttcagctccctttgttattctcttgcctcacttttcttattgtttcagctgtattgcaggcgcgagctgccgcgcctaaatttcttgatgtaccgtaaacatttcaatgtctactttctatctcaaaacaatgtggtgtaaaagccgtttagttttgcttcatctccatacagcattccagtgccattgcaaaatgactcgactatcagataaaactgaacacagctctacttggtgaaaaagtaggtggctctgaaaagaacctttttggtttggaccgaggtatgagtaatgaactgctccagccccgctacttgcccttggccttgtggtggctctcagttttcttaggcagcagcacggcctggatattgggcaggacaccaccctgggcgatggtcactttaccaagcagcttgttgagctcctcgtcgttgcggatggccagctgcaagtggcgcgggatgatgcgggtcttcttgttgtcgcgggccgcgttgccagccagttccaggatctcggcggttaggtactccaacaccgccgccaggtacaccggcgctccggcaccgacccgctcagcgtagttgcccttgcggagcagtcggtgcactcggcccactgggaactgaagacccgcccttgaagaacgggtcttagccttggcgcgagctttgccgccctgcttgccacgtcccgacatgacgtaaaaaattcaatcagtaacgttcctgagactgacgtaacgctaaagctccgctacttatagtcaacagaggcacgaaaactaagctgtgctattggctaacattacagtttcgctttaaccaatgggattgcggttttgaaaaacacttattttgattggacaaagttaatatacgtttccaggactcaccactggttaaacgcacaacttcattctctaccccacttgcgttaagaagcagtgaataagcggtaggttgacagagctaccgtcttcctgtttttttcctccaattttccggcagttactcccagtcatgcccgagccctcaaagtccgctcctgccccgaagaaaggctccaagaaggcagtgacaaaggcccagaagaaggacggcaagaagcgcaagcgcagccgcaaggagagctactccgtgtacgtgtacaaggtgctgaagcaggtccaccccgacaccggtatctcgtccaaggccatgggcatcatgaactccttcgtcaatgacatcttcgagcgcatcgccggcgaggcttcccgcctggcgcattacaacaagcgctcgaccatcacctccagggagatccagacggccgtgcgcctgctgctgccaggggagctggccaagcacgcggtgtcggagggcaccaaggccgtcaccaagtacaccagttccaagtgagcccgcccaccgcggaacgttcggtcagtctcggcccacaccccaaaggctcttttcagagccactcagtcttcccaaagagaactggcactcactgttcttacagcaggtatttcttacttgctacaaagacgatttccaagattcctttagccttgttagaaactaattttggctcaagcctctaatcccggttcgggaaaccgaagcgggtggctcacctgaggttagaagttcgagacgagcctagccaacatggtgaaacccgtctctactaaaagtacaaaaaaatagctgggcgtggtggcggacgcctgtaatcccagctacccgggaagctgaggcaggagaatcgcttgaacccggcagatggaggttgcagtgagccgagatcgggccattgcaccccagcctgggcagtaagagcgaaactctgtctcaaaaaagaaagaaaaagaaaagaaattaattagcactgcagtgtactgcatgttgcagcaacgcttgagacaattttatatctgaagaaggatgaggtttatcatcagacaaacctagtaaagggaaaattcagttcctgttgaccccaaagaaaatataatacttaagtgtcactggtaaaatatccacagtgcttccggcgctctgtccctaaacttcatgtgtactttagtaatgaagcagttggcacacacacaaacgtacaaatcgacttgtttgttttgagagtggtgctgtttctcctcccttgtccccagtttggatttgctaaatattaagatagaaaggcagtagaaaaaagtttgaacccagtttacagcaccgtacacgtcaatcgggctgagttgatgtcaatggccaatcccgacactgcgagggcagtttgaaacttggccaccgttttctctggtgagtgttctagttgggaaaattcttggcagtgcaggttttttggaggaatcttgctgtcttactcattcccataattctcttgtgtggaattcctatttatgaacatagtttctattccctactttttctgttagggtctgctccatgttttcttgtctgtgtcacttgcgtttactgtatctctagtaattggaagaaatgttaaaagaaaaaaaaatagaggaggagaagggctgttctccattgttttcccccacccccaactcaggaaatcaaaatgagtgtcttcattttaaacacttaggagtggcatatttaaaagtattttggtctttgccaagaatcagtgtgggaactcttccacatcaaattgtatttgctgaagg

SEQ ID NO: 585252 - DNA, 4001 bp, Homo sapiens
ggccttagcggccggtggctacgacgtggagaagaataacagccgcattaagctgggcctcaagagcttggtgagcaagggcaccctggtgcagaccaagggcactggtgcttctggctcctttaaactcaacaagaaggcggcctccggggaagccaagcccaaagccaagaaggcaggcgccgctaaagctaagaagcccgcgggggccacgcctaagaaggccaagaaggctgcaggggcgaaaaaggcagtgaagaagactccgaagaaggcgaagaagcccgcggcggctggcgtcaaaaaggtggcgaagagccctaagaaggccaaggccgctgccaaaccgaaaaaggcaaccaagagtcctgccaagcccaaggcagttaagccgaaggcggcaaagcccaaagccgctaagcccaaagcagcaaaacctaaagctgcaaaggccaagaaggcggctgccaaaaagaagtaggaagctggcgtgtgaaaaccgcaacaaagccccaaaggctcttttcagagccacccagagacctctaaaaaatggctgtgcacaacatgttagatcaggcagcaagattccttgcattcgaaaaatctcgggcagttctccctcaaccctaatcgagtaacgcaaggcaagcaagagtccagggtgttggttggactccccacgtagtttacccatgcagtctgttattagagtatgaattccagccgttggtttttgttaagttggtgtcaagctttttgtcagacgcctagctacaaagaagcttcttatattttaaaaagcccgctctataatctgattggccagtttttgttccatcatctgtatgtggtttttccgcgtttaagccatttaggcaccagctacttcggcgtcactaatgtgttcggcattaatataatatgctatcaacgcacaagacaatatagtagcaagtttcaagatggggtctctattacatgccaatttgatatgaccgtgtcattctgtactggattatttttttttcctcaagtcaggttctcgctgtcacccaggctggcgtgcagtggcgtggtctcggctcactacagcctcagcctccccggctcaagggatcgtcccacttcagcctctgtgaagtgctaggactaaaggcgtgcaccaccccggtcggctaatttttgtatccgctatgatgcccaggcagatctcgaattcatgagctccagcgatcttcccgcctcagcttccaaaagtgctgggattacaggcgtgagccactgagcctggctctggatttttttttattggttctagttcatataacacgagatgaataaacacagcgaacattcttgtaagccctacattaaataactagttcacattctgacttaaacatgtcacctgaatcctgtaaggtttttcctaaaagtcattcctaagctctagatgaaaaatgctttatcttttcataacaaacgttccaaatgtttaaccagtggcccagctctcccgcagaaatagtaggtggctctgaaaagagccgttgtattggaaagtgattctatggagacattatttgcctttggccttgtggtgactctcggtcttcttgggcagtagcacagcctggatgttgggcaggacaccaccctgagcgatggttactttgcccagcagcttgttgagctcctcgtcgttgcggatggccagctgcaagtggcgcgggataatgcgggtcttcttgttgtcgcgggcggcgttgcccgccagctccaggatctcggcagtcaggtactccagcaccgccgccaggtacaccggcgcgccggccccgacccgctcagcatagttgcccttgcggagcagtcggtgcactcggcccacggggaactggagaccggcacgagaagagcgggtcttggctttggcgcgagctttgcctccctgcttgccgcgtcccgacatgacgaagaaacgataaatggaggaactgagaacagccgagagaagttcaccagagctccactacttatagtcaatactgggcgcgaaaataaagctgtgccattggctcaaattacagttttatttcaaccaatggaatcgctgttatgaaacatgcttctttggattggacaaacgtgtatatgacgtcatctagaatcgccaccagtcctacacactattttattaatcacctcatttgcataagaattcgtgaacaggacgttacaacacacagctttttcttcttcttctttttttgtttttttaagacagggtctccctctcgcccgggctggagtgcggtggtacgatctccggtcgctgcaacgtccgctcctgggttcaagtgattctcctgcctcggcctcctgagtagctgagattacaagcgtcagccaccatagcccggctaatttttgtattttttagtagagacagggtttcaccatattggtcatcctggtctcaaacccctgagctcaggtgagccacctgcctcaacctcccaaaatgctgggattaaaggcgtgagccacagcgcccggcgactttttttttttttttttttttttttttcccttgagacagggtctggctttgccgcccaggttggagagcagtggcgcgatcgtggctcaccgcaacctccgccttcctggccgaagcgatcctcctccctgagcctccccagtagctggggttacaggagtgcatcacgcgcccagctaattttttacatttgtttgaagagtcatggtttcgccatgttgttcaggctgctctcgaactcctgacctcaagtgatccgcccgcctccgcctcccaaagtactggaattacaggcgtgcgccgccgcgcccggccgctttttcctattccttgtaccctttctgcagttaaactacaacacgcctgaccccaccaagtcggccacagccccgaaaaagggttccaagaagactattactaaggcaagaagcgaaagcgcagccgcaaggagagctgctccgtgtacttgtacaaggtgctgaagcaggtccaccaacaccggcatctcgtccaaagcaatggggatcttgaacaccttcgttatgccatcttcgagcgtattgcgggcgaggcttcccgcctggcgcgttacaacaagcgttcgaccatcacctccagggagatccagacggctgttcgcctgtcacgcatgctgtgtccgagagcaccaaagccgtaaccaagcacaccagctccaagtgagctccttgctggttcgtccacttggaaccccactaggttcttcctgactcacactccactaggttcttcctgacccacaccctaaggactcttttcagagatattcacacttcctaaatagaactgacgctcgtttatccctagttttgaaatgttcagttagctttaacctaaagcctttcataaatgcttcttaatttatgcaaaagatacattgtggccttatgatatttccaatattatctgctactaagtattttatgttacaaacgtcaaatacacaaaacgggagttttattgtgcgaatttcacttatccaggctcaatttcaacaccgagaatcccctgttgagttattgtctagaaaaccaagtatttaaagtaaaagtcctatcaacctctactgaaatatcactggacgttttgcaggttacaccacaattttcaggccacctggtaggatactcagtgactaccatgtaatccaggtggcattctctttcaatttttcttttataacatgaaagcagggaatgtgctttcttgcctaatttgcacaaaatgacctaaaggtgttgagattaaaatggagaaagaggaaggaaagaaattagaaccaatttatattacctcttcccaccagttagaaatgaggtttggatccttccttgctaatccagatgccatgctggcagatggaatttttctactaattacttttttctacatttgt

SEQ ID NO: 585253 - DNA, 4001 bp, Homo sapiens
cgcctgcctcggacttccaaagtgcttagattacaggcgtgagccactgcgctcgtcctccgcgccacttttatttattgttttcaaccaatcatgttaagattcccccaatgaaaagataatctgacctagaatttgtgtaggtcagtcgtagtcttaaactcatttccaatgggtcatttttcctatttcggatcgtgtaaaaatacatacagtagaacaacgtatttgctagtatttccaaaaagtagttccgttttgtaactgcttaattaaatcttttaatgactgtaccaagacccagaacaaaaacaatttaaacttaggctggcacattctctaaaacaccaaaactttagttttgtccagtgtggtgtggggaaggagtttgataggtgcttgactaaatgataccaataaatggtatctgacctcttcattaactgagtttaatgcaatccaatggctgattggattaattatgtaaattattgcttaatttcattagcatgcgcggaattacaggtttgggtcagtgattagatttttgccagtgaatctgggtagttctgacaacagcattttattaggatggagattttagttgatcaaagaactaccaggttctggtattgataaagacccataaagacaacaaaaaggttagtttaacatttattatattcacaggagcaaatgatcaccagaaatacttttgtttgggttttgtttttctttttttgagacggggtctcgctttgtcacccaggctggagtgcagtggcgaggtcatggctcactgaaatctcaaattcctgggactcaagtgttccttctgctgtcagtccgccaaatacaggcgagggcctcgcgcctggtattttttttctttcttttttttagatggagtctcgctctgtcgcccaggctggagtgcagtggcgtgatctcggctcactgcaacctctgcctcctgggttcaagcgattctcctgcctgtctccttagtagcgctcgccaccacgcccggctaatttttgtgtttttagtagggacagggtttcaccatgtttgcctgggtggtctcgatctcttgaccttgtgatacaccctcctcggcctcccaaagtgctgggattacaggcgtgagccaccgcgcccagtcattttttttttaagaggcaggggtctcgttatcagggtggtctcgaactccaggtccctagagatttctcccctccccacccacctgcctcagtttcccaaaatgctaaggacgcataaaccaccgcgcccggccccaagttttttaaagacccaggacagtttgtggggaggggacaattaaggaggttccttcatgttataaggtagcagttggatagtatttactaggcctgattcaatacttttattttacccaataggaaagtaatggcctcagtgcttgaactcggccacaaatttctgataggtttggagaacagagtgctcagttcttccgtagaaatggtgggtggctctgaaaagagccttttgtcttgtaagtttacatttttaaagttcagcccttacttgcccttagctttgtggtggctctcagtcttcttggggagcagtacggcctggatgttaggcagaacaccgccctgagcgatggtaactttaccaagcagcttgttgagctcctcgtcgttgcggatggccagctgcaagtggcgcgggatgatgcgggtctttttgttgtcgcgggctgcgttgcccgccagctccaggatctcggcagttaggtactccagcaccgccgccaggtaaaccggcgcgccggccccgacccgctcagcgtagttgcccttgcggagcaggcggtgcactcgtcctacaggaaattggagcccagctctagaggagcgggttttggccttggcgcgagccttgccgccctgcttgccacgtccagacatggtaaaacgacctgtggcctaagtcagaaagtgagtgaaaggaacctacagggacgcgcattttatagcagctgctgggcgcgaaaaagaagctgggccattggctaagcttgcagcttcctcttaatgcaaatgagctttctgaatatacgtgttttgattggactatattgatattaacgtcatctgagtaacttccaatcagacagaagaatttctcaatctcatctgcatatagacttgtaaataaatagggcataacccagcttgtcctcattcttgttatttgagtgctctttcactctcctccgccatgcccgacccggctaaatctgctcctgcccccaaaaagggctccaagaaagccgtaaccaaggcccagaaaaaggacggcaagaagcgcaagcgcagccgcaaagagagttactctatctacgtgtacaaggtgctgaagcaagtccaccccgacaccggcatctcatcgaaggccatgggcatcatgaactccttcgtcaatgacatctttgagcgcatcgctggcgaggcttcccgcctggcgcattacaacaagcgctcgaccatcacctccagggagatccagacggccgtgcgcctgctgctgcccggggagctggccaagcacgccgtgtccgagggcacaaaggccgtcaccaagtacaccagctccaagtgagctctcgcagctgccagcaatccaaaggctcttttcagagccactcacgcttccagagaaagagcctgtgcattttgcttgtagtcttttgggtggactccggccggcctccattaggagggaagacggcgggaaaaggtaagctaagctccctaggctttttgcgtgtgagtatagacgctccatcagacaaatttagcttgggttcttagatacccttggggaaaaaggcttgcagttgtgctttaagctataattacaagtttgctttcggttttcggttactctttccttttgtgttgttttttttttttttttttaaatggagtcttggctctgtcgcccaggatagagtgcagtgccgcgatctcggctcactgtaagctccgtctcccgggttcaaccaattctgcttcggcctcctaagtagctgggattacaggcgcccgccaccgtgcccgactaattattgcatttttagtagagacggagttttaccgtcttgaccaggctagtctcgaactcctgacttcgtgatccacccatctcggcctcccaaaatgttgggatatcaggcgtgagccatcgcgcgcggccgggttattctttcagtgcctgtaacgtcccccttctttgattggtcaacgctctatttgaaaagcccgccaagggctgcaatttgccagatagtctcatccgggttgtttttcgaagaggttctcccggaatggaaatgaccgttatctgcaggagtgcatcggactctggcgccaagagctggaagctgtgaattaaccgtccctcttactgcagttgtacggatcctgggtgacattgacttaccggtgtccattttccatacactttagagaataggcatctcgtctggcatcgctgcagatatgttagggtgggttgaaattattggtgtcaaagcgggacgggaaacattaaaggctaaggaagctcctttaggataaaatgttgaacaaagaacctggcaacttgggaaagccgcttttttgcaatgttaatcagttggccttggggagggaggtgtgccaggattagctggggcgggggcagcgttcaggctgggattttaaagtccatgattaggaatcctgagatagaagttggagaaccccgcgtttaaagagaagcggaccccagaagagatcacagaaataggaggtaaaccaagagcgtgcgagtacaagggagtggagacttttcaaggcatgatcccctcttctcaacagtgcctgaattctcatagcattgcatcctctgccactgcgttatcccctcttcaataaattacttctattgtaaatctttag

SEQ ID NO: 585254 - DNA, 4001 bp, Homo sapiens
gggctttgcagggactgtcttactgttcacaaaagtgtgggggcacttattttaacgggtcttgttatacattgatatatttttttgtttgtgtttgagacggagtctcgctctgtcacccaggctggagtgcagtggggcgatctcggctcactgcaacctccgcctcccgggttcaagggattctcctgcctcagcctcccaagtagctgcaattacaggaacgtgccaccacgcccagctaattttttgtattttgagtagagacagggtttcaccatgttagccaggatggtctcgatctcctgacctcgtgatctgccctcctctgcctcccaaagtgcaggattacatgcgtgagccaccgcgccggccggtactaactttttaatgtagagaaagcacatatacatatccaaaattttgttaaaagataaaggttaaatgaagatgcgttaaacaaattgagaattccagctaaccacaggtttccaggaagtaatatttgatccatttttaaggtggctgaaatcagtttaatgcttgggagctcttacagatggagtccaacaaccagtaacatgacaatgaaggaaactattataaatttaagaaaattaagggacattttaaatccgtttaattcctgctaaccagatttgtgagttctccagagttcgcacaatcatttccacaccttgacttacctgtggcacaaaacgtaacttcctctaaactattccctttttgtgaggtcttaaaatttgggatcataatgcaagttatactgtctatgtcgctgcgctttttagttttattatgtgtaatgctaaccttaaatataccagtatcagcatgtagcttttatacaaactagggggtttttttgttttgttttttgagacagtctcgctgtcaccaggctgtagtgcagtgacgatctcggctcactgcaatctccggctcctgggttcaagcgattctcttgcctcagcctcccaattagctgggactacagtgcacgccaccacgcccacctgatttttgtatttttagtagagacggagtttcaccttgttggccaagatggtctccgtctcttaacctcatgaaccgccagcctcgacctctgcaagtgctgggattacaggcgagtcacggtgcctagcaaggattgtcttgctgcaactagttcgtctaccctcggcccacagctgatttggatatattcgcagtggctcacgcctgtagtcccagcactttgggagaccgaggtgggtgatcaccagatcgagtttgagaccatcctggccaacatggtgaaaccccgtctctactaaaaatacaaaaattagccgggtgtagtggtgggagcctgtagtcccagctgctcaggaggctgaggcaggagaatggcgtgaactcaggaggcagagcttgcagtgagccgagattccgccactgcactccagcctgggagagtgagactccgcctcaaaaaaaaaaaaaacccttacggttagaaactacacaaaaacgaagcccacagctgtttcagtatgtttaagtggctctgaaaagagcctttgggttagaaatgacgtttacttagcaggcttacttggagctggtgtacttagtgacagccttggtgccctcagacacagcatgtttagccagctctcccggcagtagcaagcgcactgctgtctgaatctctctggaagaaatggtggagcgcttgctgtagtgagccaaacgtgatgcctcgctcgctatacgctcaaagatatcagtgacgaaggaattcataatgctcatagctttcgaagagatgccagtgtccggatggacctgctttagcactttgtagatgtaaatagaataactctccttacgggtcctcttgcgctttttgccttcctttttctgggtcttaacgacagctttcttaaagcccttcttggaaatggtagcacctttagatgacacctccggcatagctaccacacacttctgcagcgttacacggttcttttccagggttacacagcactttccagtgctcaacagctcttcagtattaaacagctccaaatgacctcagctccaagtctcgccaagtaaacaaacagaactggaggatgaaagatgcggtatttataggcacggccctcaaacgccgcgttcggtatccaaaatctgattggacaatgggaagtggcgtgaatgcaaatgaggcgattctagtacgactttctgattgggtagacggccatcagccaatcagatagcaaatgccaacctcagtcagactataaataggcccagtagcagccctagaaatgtggttctcgtgttgctgcaatttgatgcgaggagatgtctggacgagggaagcagggaggaaaagcacgcgccaagtctaagtctcgctcttctagagcgggtttgcagtttcccgtaggccggatccatcgtctgcttcgtaagggaaactatgcagagcggataggggcaggcgcaccagtgtatttggcggcagtgttagagtatctcacagcagaaatccttgagctggcaggcaatgcgtctcgcgataacaaaaaaactcgcattattccccgccacctgcagctagcgatccgcaatgatgaggaactcaataagcttttgggcggcgtgaccattgcccagggcggagtcctgcctaacattcaggcagtgctgctgcccaagaagactgagagtcaccaccataaagcccaaagcaagtaacttaaggttgtcattggtaaaaagacttctgtgtcagaaaaaacaaaaggctcttttcagagccacctaccgtctcagaaaaaggctgtacgttacaaaacgttactgctgttaaccagccatcttacttgcctgtcacaaatgcccgtttaagcgcatttcgggaatgtacggggactgaattttcaaggagcgttccatcggccattagtttgaggtaattttggttatatatgtcactgggcgaggtggcttaacgcttgtgagcagtcagtacttgcacttcagtggaggttggagcgggagggtcgttcaagcctggggcttgaccgttaacataattgagaccctgtccccacagaaactagctgggtctggtgatgcaggcctgtagtcccagctgttcgggaggctgcggtgggagggttgttcatgagtccgggaggcgaaagttacagtgaacgaagattgattgctccactgcactccagtctgggtgacatgagcgagactatctcaaactagatttatgtatgttagttatgttaagggttacacatggaagtgaaaattgcattacaagcaggagaggtgtaatcttcctgtttaaatccaggtaacatcagtctggctggttaaagtacattttagagaatttcctttcaaatatggtagtttcacgaaatactcataattaaatgtggcatgtaagtaagttaatcttaaaatttgggtaagcatatatatttgatacctgtggtttcacgtactttgtaaagaataatagaattatttcttaaaatgtaagtaaaatatgtcaaaaagaagccttacgccatatgtgatggtgagatactagtgttagactcaggcaggaatgggactagaaggccgaacataatttgaagtttagaaatttggaagagtatatgcttcaaaagttttgactgttgaaaagaggcaaaatagtttgttgatctgtgtttgcagtttgtgctgtaaacaccaagagaaagtgaaaagcaaaacccattcagtaacgctgccaaataactaaattaaaaattattgtacgatattcaacagttgaccttacctcaaaaaaaaaaaaaatcatttggttaccaaaaaaaaaactgctaaacacttgatgtctacacataataaggcatgtatagaagcaggtaaagttctataaaataaaacatgccgagtaaggacaa

SEQ ID NO: 585255 - DNA, 4001 bp, Homo sapiens
ctgggtgacagagcaaggctcagtctcaaaaaacaaaaaaaaagattagcaagagaaaagcatacaaatgtatttaatataagttttatattacatgggacccttcggaaatgaaaactcgagggaagcgggaaacctgtgaatttttatggcaagttttgtgaaatgcatagttgtggattaatatgattgacagtaggcatatgatctaatggtaataaactgagggggacatagcaaggcttgtttgttaattacctattaacgatcagccgagtatcagcagagacagcaaaacatcctagttttgagttagaagacctaggtttttgttttggcttatcaattatgggtattgttttagatgaaacatcaagtattcttgatttcttatttcaaaaataaaaaataaaaaataaaggaaggaaaaaagaagaaaaaaagagaagaaaagtgtcagagttacttgaaccagagtaactccattttgagtgagggctaggaaaatgaggctgagactttctgggctgcattcccagaaagtcagtcattcctagcttctagatgtttacggttaagggaacaaataaataatgtttactaaacagactcagacttaggagtgtccagatatccctatatctggagaacaaaggcattcttaattttgtttaaagataataatgttgattcttgcaaaatatagtaactaagaaaattaatcctttatcacaaacttgtagcagagcacatctccccatatatacaagtattgtacctagggtggatgccttcctcctcttactttcgggaatgtcctgctccgtctatggagtagttgtcgtttcaccactttactttcttagtaaacttgcatttactttgcactgcggactcaccctgaactctttcttgcgcgggatccaagaaccctctcttggggtctggatggggacctctttcctgtaacatatttctggccaccacagaagggactatagtacagaaaccctgacccaacagctacctttgggtaagtgttggagttctgtaacaaaggaagaaggcaggcaggcaaaaaatttatgaaagaacatacgacaaaataatttctgcttcaaaacttcatatttttttaatttttttttttttttttttttgagacggagtctcgctctgtcacccaggctggagtgccatggcgcgatctcggctcactgcaagctccgcctcccgcgttcacgccattctcctgcctcagcctcccgagtagctgggactacaggcgcccaccatcacgcccagctaattattttgtatttttagtagagacggggtttcatcgtgttaagcaggatggtctccatctcctgacctcgtgatccgcccgcctcggcctcccaaattgccgggattaaaggcaagaggcaccgcgcacggccccgtccaagttaaccttggctctaaaacttgtcttcgctaacattccagttgatcctctagaactgaaacagaatagcagcagcaccaccttaagaaattgtggttatagctctccttgtgacaaagtaggtggctctgaaaagagcctttgggtttggaagtgcttacataagcacttatttagagctagtgtacttggtaactgccttagtgccctcggacacagcatgcttagccagctccccaggcagcagcaggcgcacagccgtctgaatctccctggaggtgatggtcgagcgcttattgtagtgagccaggcgagaagcctcgcccgcgatgcgctcgaagatgtcgttgacgaaggaattcatgatccccatggccttggatgagatgccggtgtcggggtggacctgcttcagaaccttgtacacatagatagaatagctctccttgcggctgcgcttacgcttcttaccatccttcttctgcgccttagtgatagccttcttagaaccctttttaggggctggagcagacttagagggttcaggcattgctattcctaaacagaatagaaaagctactaacactctccactacagagtagtacagagaacagttcagagcccatgtatttatagtcctgagattcaaatgacggtttaagattcctcacttctgattggacaaaagaaacacggtttcactgaggggtggggtttatgcaaatatggaatttatgttatctttttctattggataaagcaccaaacataattgaccaataggatagcttcctattgcagccttgcagtttgtataaaaggatttgttcaggcgccattccagcttgcttgtctttcacagttttccgctgctttcataggtcgctatttgcggacgtggaaaatggagctaaagcaaaaacttgttcgtcgctaccgggcttgcagttcccaatagggcagagtccgtcatctttttcgaaagggcaattattttgagccggtcggagccggtgcgccagtgtacttacaatacctggccgccgagatcttagaactggtgggcagcgccatacgtgacaagacccgcagcatcatcccccgccacctgcagctggccatccgaaacgacgaggaggtcaacaagcagctgggcaacgtcactattgctcagggaggcgtcctgtccaatattcaggccgtcctgttgccaaaataacagagccacgataaggccaaggtcaagtaaacactcaaatcagaaaacgtagcttacacttgaaacggcatttttcagagccgtccatagttacacaagaaaggatgataacttgcttctgttagggtattttttgcttttcgtttggattggtttgttttgagacagtctagttctgtcacccaggctggagtgcagcggcgcgatatcggcttactgcaacctccaccccgccgcttcacgcggttctcatgcctcagcctcctgtgtacttgggattacaggcgtctgctaccgcgcccagctagtttttgtatttttatgcgagacggggtttcaccattttagccagggttgtcttgaactcctggcctctagtgatcgtcccatctcgccctcccaaaatgctgggattacaggcgtgagccaccgcccccctagcctaatggtgttaaaaagttaagtttcgagaaaataacaccttcctttagaaagtacattttagagtatacaaagtgaaacttaaggccaaccaaaataagacattttgagaacaggcagggtgggaatgtgacttggacttagaaaacaaagggcaaggaaacttgctgttcgccagtaacaaaatagcatggaatctcattctctgaatataagcgttatttcccgacatgagtctgaacgtttctggtggtttagtgagtgttcaccagcattgataacttgcgagactgtcaggaatgcagaatttcaagtcccactcaaacttactgaatcggaatttacattttaaaaatccttagataccttgttatacactctgttctttgggactggatgaactagaattttagacaatttgtcgctgcagataactgaaacgaaaaggacaggatgggcggtggggcaactcatccaataagattgtctagtaatgaaccaatcagtctggtcactcttcagccaatgattttatcgcgcgggacttttgaaatattacaggaccaatcagaatgtttctcactatatttaaaggccacttgctctcagttcactacacttttgtgtgtgctctcattgcaaatggctcgtacgaagcaaacagctcgcaagtctaccggcggcaaagctccgcgcaagcagcttgctactaaagcagcccgtaagagcgctccggccaccggtggcgtgaagaaacctcatcgctaccgcccgggcaccgtggccttgcgcgaaatccgtcgctaccagaagtccaccgagctgctgatccggaagctgccgttccagcgcctggtgcgagaaatcgcccaggacttcaaaaccgacct

SEQ ID NO: 585256 - DNA, 4001 bp, Homo sapiens
agccagggtgtcgtggcgcatgcctgtaatcccagctactccggaggctgaggcaggagaatggcttgaacccgggaggcggaggttgctgtgagccaagatcgcgccattgcactccagcctgggaaacaagagagaaacttcgtctcaaaaaaaaaaaaaaaaaagaaaaaaaaatttacttgtgagggactctggaaatttcatttctcatcagaatttctcagataagttatctaggcaaggcagcctgtgattgcacagcagtgttcaagtataaggccttgtctggcaccaaagacaggccttagtttatttcccaggtgtgaaagaaattgcagatttaagatcacacagtccttatgttaaataactgtaacctaaattacatggtatttaagtttgtaaaaatctgctttaacactaattttatttattgtatattcccggtttttaatggagaaagcaaacttctaggtgctaaaaacgtgttctagacttgaataaaaagataggtagactacgtctaacccttcatcttaaaatctttacctggaaaagaccatgagtaaaatacttaagggaatgtggaatttcccaggccacaaagcggcctgcagttgtctaggaagggagagtcctctaggagatacagtgtatgtgctaagtttaatgacgtctcctcttcattctcccccacccagcgcctagtccttactggccttcagttcagtgttcgaaggcttgtcaatttacccagcagttaagagttggcttctcctaaagcaactttcaaacttgtctgcatgttacaagccccctacggagattttaagtttcaatcaggcaacacaccatttatggctgactgagcactgggattcaagcaaaatttgatttgatttgaatcttgaataaaccagttgaatagaataagatgtatgaagcaacatctggcgcagtgcttacatctttagttctgtactgccttagtgttgttatcaaaactgacgcatattaggttaaaagactattaccggggcagttggaaacccaggagacacacccttcagtatactacgaaggtgtgcgccacgaaaacagagggggagtccttccttaggcagttactgcccaggttcccactccggtccgctatgtaaatcagagtctcaaaacagctttccctcgattggttaatatttaaaatgacaggacagcctattggctagaagctggtggcgaaattatgacattacggcaaccgttgatcctggcgacgtagacagggacagacagctgggtctgaaacctaagcgagcctgcggtttcttccgggaacgccgagttagcaaaatggccgcttgtctccattttaaatttaagcacaacgaattgaccccaaagccatttttaatggctggcttctttcgggttcaggaccctttgtccctctctaagctgcaacacttgtccccacccctctccagttcctatattctaatacccctccgccgccaaataaaatttggcgtctggccacagctcttttagtgggtatctgggtggctcttaaaagagcctttggggttaggtgttaagacgcttacttggaatgtttacttggagctggtgtacttggtgacggccttggtgccctccgacacggcgtgcttggccagctctccgggaagcagcaggcgcacggccgtctggatctccctggaggtgatggtcgagcgcttgttgtaatgcgccaggcgggaagcctcgcccgcgatgcgctcaaatatgtcgttaacgaaagaattcatgatgcccatggccttggaagagatgccagtgtcgggatggacctgtttcagcaccttgtacacgtacacagagtaactctccttgcggctgcgcttgcgcttcttgccatctttcttctgcgctttggtcactgccttcttggagcccttcttcggggcgggagcagacttggctggctcaggcatcttaaaacaccagaaatgtgtcgaaagtaaagagcggatttctgctacttatagggcttttatgctaatgagggatggagagtacctcttagttaattggaagacaaactgcacagttgtcatccgtgggcagagctatgcaaatgaggtatgaaagtacagcttttctattggctatctgactagcatttgctaccgaccaatcaaaaagtcggatttactccccaggaactacctataaaagcggccatgttttacatatttcttgattttgtttgttttctcgtgagcttaggccgctggttttggtgatttttgtctgattgcaatgtctggacgtggtaagcaaggaggcaaagctcgcgccaaagcgaaatcccgctcttctcgcgctggtctccagttcccggtgggccgagtgcaccgcctgctccgtaaaggcaactacgcagagcgggttggggcaggcgcgccggtgtacctggcggcggtgttagagtacctgaccgccgagatcctggagctggccggcaacgcggctcgcgacaacaagaagactcgcatcatcccgcgccacttgcagctggccatccgcaacgacgaggagctcaacaaactgctaggccgggtgaccattgctcagggcggcgtccttcctaacatccaggccgtgcttctgcctaagaagaccgagagtcaccacaaggccaagggcaagtgatttgacaggtatctgagctcccggaaacgctatcaaacccaaaggctcttttcagagcccccctaccgtttcaaaggaagagctaacctcactgcttgtaggtagaaggaaaaaaggcactaaggtaagttaattttatgccaaccttgagcaaagcgtattactgcttttcggtttttggggagcgctgttactaaaggttggtctgtttgtatgtaatagtaggtcagttacgtactatcatactctaaagaaatattctagttaatgctttgtaagatcgaccatagttagtgcctaacagtttacatgcagggatgcctcgtgatctaaacacttcgttgtgattactttaaaaatgtaaattgaaggcaaaactctaacgtgttggtaaccttgtttggtcctccgactagtcccccgtctatttttttctcaatttaggctgtaggcagcctcactttcctaattctgtgagagttataggtcccattcctgctaaagtgcagagtatattacctaaaagttaaccagggagttgaaaggtgtctgtaaaacagactaatgtccctaatgtagaacggtgcctgacatgcaacttactcttgtattttaagaagctcaagcgtctaggttgccattacaggcagaaaaggaaatagagtggggcctgtggccactcaaaaacctttgctttctgctcacccctctaatcctaccactttgggaggccgagggggctgatcacctgaggtcacgacttcgacactaacctggccaacatggtgaaacacctctctactaaataaaaataataaataaaaaaataagttgggcgtggtggcacataccttgtaatcccagctactcttgaagctgacgcaggagagtcgcttgagcctgggaggcggaggttgtagtaagccgagatcgtgccactgccctccagcctgggcaacagtgagacacggtcccccaaaaaaacctttgcttctagggatctggtaacagctgccccacccacaagaaatggagatctgggaccatggacaaatttctagagacctattttcctggattctgtgaatctcgccgaggttttcttccggatctcggtttctgcatttttttgtttgtttgcttgcttttttgaaacggagttttgctcctgttgcccaagctggaatgcagtggcgcgatctcggctcactgcatacaaactccgcctcccgggttcagacgactctccggcctcagcctccctagtagatgggattaca

SEQ ID NO: 585257 - DNA, 4001 bp, Homo sapiens
gtagaatctacactgctcagaacccaacttcggagctgacttttttatttgcattcatctgtgatgggtttgtatgtgtggttcatccttctactcttgagatgacagatttaggtctggtgtctcaccttcacctaagaagatatatcaggctctataccctggtcagtttccacgggttgagtaaaagccagctgtagtgcttggggtttaacatgggccaagtccctggctctgagtttactttcttagaccctctttcttacttttaagaatttagaaaatattactcaggcttttatttatccgtccaagtaccacgcttgccatgttatggaaaatgtatcccataatccatcatttcgtgtttgtttatgagggcatgaggacaaacttctaaattcattcctcttttagacaatgatcatccatccatcacttaaattctccctctcagccaacatttgactccaaacctagcctcatccatctcacatttttcacgtctcaagtatttgttcctttccttctggccactccctcctagttccctcccgactcttttccgagattctttttctcccgcaatcatccattccccagcagtgaaaaccttttgtcatcatcctaccttgtgcagcagaagctacatcctgccagaaggaggttttctttccctttctacctcctccagtcctccgtactcaggggcatctaggaaaggataaattgtactgcaaagggggcttcagtcctgcgataactattgcctacgtgcagtcaggcaccttaatgattgactatttggtttctgccgttacccggaggacttttaacctgaaagctgccaaaaaaaaaaaaaaaaaaaaaaaaaaaaacctataaattaaatgactttcagaaaaagacggtttagcaaaagaattttaaggtgtctcagaagctgcttctttttcctgcacctcagcgcctaggatccgcctttccctgccccactcgcttaagagcttcagacagaaactggcccaattacaaaacaaatcagaaacctttgtaatagttccgtgttcagctcacattgtcttcagcctttacttgcagttattacatatctgcatggtaaaaattttacaagaaaatgggcgggggtggtggtggagaaagctccaaacataaggaagttgtcaagagcgtgcactttcgtgctcagggcgggccgtcaccacaccgagtcccggatcaacatcacgatcaacttggaaatctgcacacggaaaccaaagagctgtacatttacaatactttcagtttatgctagtgttatgtgatactaaatgagctaacgatctaatacgtacccatagcactcaatttctagtacctattgttattccctgtaacttccaagttatttcctctgcagtactaacgtaacattaaagattggtactgtggtgctaagtccaataaccccccttttgaatgaaatgattacaactcatttattgaaaacatgcgtggctcttaaaagagcctttgggattaggtgtaaagatgcttacttggcaaagttacttggaactggtgtacttggtgacggccttggtgccctccgacacggcgtgcttggccagctcccccggaagcagcaggcgcacggccgtctggatctccctggaggtgatggtcgagcgcttgttgtaatgcgccaggcgggaagcctcgcctgcgatgcgctcgaagatgtcgttgacgaaggaattcatgatccccattgccttggaagagatgccggtgtcgggatggacctgcttcagcaccttgtacacatacactgaatagctctccttgcggctgcgcttgcgcttcttcccgtccttcttctgagccttagtcaccgccttcttggagcccttctttggggcaggagcagacttggtaggttcaggcatcgtagcgttaatagttagaacactgttgcaaacacctgagaaaataatcactcccgccgaggccctgttcatttatagatgcggtattcaaatgaggttaatcagatttcgtttatgattggattaattttagagtgtcgtcacaaatgccaatgtaaacgacacttaaaagtctaccttttcattggctatttcgttcctttacttgtacccaatgagaaagcccagaccagactacccgaggctactataaataggcctctttaggcaagacagctgtgcacttcgcttggagcagttggtttttgagatccgacttttttaacattgtggtgtcagaacttacaccgaaagatacttaacagattaggagaactcacattcctttcttcctttaacaaagtatgggactcgttgcatacagaagccgtgctaattgggacatcccccccccccaagtctgtcagttttacgtttcggcaagtccttaatccatccaaatgccacatttaaggaccaagtatttttctgcagtgtcggtttctaattttcagttatgtggcagtagtctccccaagcacttgaaatgtagcccttcggaaataatgtcagtactatgccacttgtcctaagacgtactcctctgaagtccctcactgcctgccatactcgatagggataaccagtaggcttgtaaccagcacagaaactgatacactgtgccgtgtttggaactcggaaaaacccagcttagaaacccgggaaaatcccaacattttttttcccatgctatctggaggccagggcctgctaaaagtgcaaagcacaagggaggcccaaatgggttcaactccgacactcgagaacgcaaaatcgagatgacgccactgcactccggcttgggcgacgcgacgccttagtcaaaaatagctccggagacacacaaaatcccactcctctccccgactttgttcccgggagacccgcccctgcttagcagcgttttcccgagccacgccccctaatagtgcaacagctcttttactgagagcggtgggtggctctgaaaagagcctttgggttgtgttgggcttctaagcagttggccaaaggaactttctactttttcttggctgccgccttctttggcttggctgccttgggcttggcggtctttggtttagccgccttgggtttaactgctttggccttcgctgggctcttgggcgccttttttggcttggctgctttcgcctttttcgggcttttcgcttttttggctccagcagctgcagccggcttcttcgccttctttggggtcttcttggcgctcttcttgggggtggccgcccccgtcgccttcttgggcttcttcgccgctcctgctggcttcttggccttggccgcgcctgcctttttagccttaggcttggcttccccagaggccgccttcttgttgagtttgaaggaacccgacgcgccggtgcccttggtctgcaccagggtgcccttgctcaccaggctcttgagacccagcttgatgcggctgttgttcttctccacgtcatagccagcggctgccagcgctttcttgagagcggccaaagatacgccgctgcgctccttggaggcggcaacagctttagtaatgagctcggacaccgggggcccagacgctttgcgcttggccgcacctgcagacttgcgggccttcttcttcacgggagtcttctcggcaggggccggagcagcgggcgcggcaggcgcagtctcggacatgttgaaggcaagcgtgagcgagagcaattcgagccggaagcagaggcactggccgggactcgagccgcggcgctgcgcccgcccgtttatatagggcggagctgcgccgtgattggtgcgctgtccagcccgcctcgctggcagccgcagagtgtcctctcggatcccgagttgtgtttgttacacctcaaaaaaagccaaaaatataaaaattgtctacaccgaactgcccggtttttctcagataatgatccccgaaccctcaggctt

SEQ ID NO: 585258 - DNA, 4001 bp, Homo sapiens
tgtatttttaatagagacagggttttgccatgttggacaacctggtcttgaaatctcgacctcagatgatccgccctccttggcctccgaaagtgctgggattacaggcgtgagccaccatgcccagtctatcatctctcttccttcactaggatatgagcctcagaagggcagtctcttgtctatcttgctcactgaagtatttcaatgcctggcacagagggaatgcaatcaatatttgatgaaatactgaatgaaatcccttcaactactctctgatttgtttattgtatcccctgctccattactcctgccatttctttggcttgaaactttatcctccttcaacatcatttccctccactgcatccagtctcttgccaccagaagcatattcctagaactagttataattttgttagtccttgctcacaagctttctataaccttattgtctgcaaaataaatctaaacttcattgtttgacattcagactcttcacaatcttctcccacatctttatcacaagaaaactccacgtgagcaggaggcttggttagcatattctttatctcagcaatctcctttaacaagctctccaggtgattctgatgcacactgaagtctgagaaccactattctcagtgcagaagtcctcagtacaaaattcactgcttggcacttgaatatgaaggaatgactatccattttcaacctactggatattccttccatccaccttcgcctggaagctgcttgtatcaggcagtgcagatgcctcctccccaaaagtcattttccctcctttcttcctaatacaactttctttgttccctgacttgttctccagagaaggcagagttccttctagcctcagggatctgattaatttgactacacctatcctaaagatcacatgccccttattaatgattggattggggataggtatatagtcagtttttgtgattaggagaatccttaacaatggagacccaacttctctaagaacatgataaagatgagatggggattgtcgatcaatgaacaatgtgtgtatgtgtttgtgtgcgagcgcgagtgtggttgcacactgagaattgttcaagtctaattggtgaaaccagacaggtgaggcggtagagggaagagggttttattttttcctttagaacctaaaataaaaatccaaattaagacctttttgaagtaattgaggaaaggaaaaaagcaaattcaacattaagaactacttgaaagcagcagtctcctctcctccttccccacccccgctccagccccccataatatgggcttctttggtaaaacccgtatttttaaggactcttgagaaacgaagtttctcttcgtagagcaaaactatgaaattactattgcctcttaggtactatcgagtgatacctcataaaacacggaaaccagagtttcataaagccaccagcccagacagtgagtgccattttaagttttaaaaacatgcctatttcagctgcaggagtttctagtatcttcacatgtcagtatatagctccaattgtgaaaaggtgagtggctctgaaaagagcctttgggtttactaaggcagttgcagggacaagtttacttggagctggtgtacttggtaacggccttggtgccctctgacacagcgtgcttggccagctccccgggaagcagcaggcgcacggccgtctggatctccctggaggtgatggtcgagcgcttgttgtaatgcgccaggcgggaagcctcgccggcgatgcgctcgaagatgtcgttgacaaaggaattcatgatccccatggctttagaggagatgccggtgtcggggtggacctgtttcagcaccttgtacacgtatacggagtagctctccttgcggctgcgcttgcgcttcttgccgtccttcttctgcgccttggtcacggccttcttggagcccttcttcggggcgggagcggatttcgctggctcaggcatgctatctttgctgttctgcagttaggaaagaaaatgaaatctacatctcctgatcctcggaatttgtagacaatgttatgtaaatgaagatttagtttctccaactctgattcgttattttgtcgtgaagtctgcatgcaaatgaaggagcttaggtctactctcccattggtcatatcctgagagcagttttcgagcacgggccacctaattaacattttatataacaagttcctaccattgcaaacaattcagattagtttacttattttaaaaaccagaagttgctctcttctatgcttttatatgccagggagacaaagctcctggcgcagttacgtcttcgaattgaaaggtcggtttaaaagctcctggaaaagctatgccttgacattcagatgtagattctggagcagcaggagatacctgaagaacggcaagctaggcgaccggcgatcacccacacaatccggagaacagtgtttcccactttttacagaatgcacaaacacatcgtgaaaataaagggtaggcaataaagctccggagaaaacaacaacaaaaaagtaaatagcatctcttgaagagagctaagacaggaaagactttcttagccaaaatggctacagtccttaatggaaaagcaagtcacacctagtttagccctacaacgaggatcagaaataaatattccgtctaactagtgaaaatattttttaaaaaattaaaatgaaagcctatttaacaaacagctttactttcaagttagtattattatctttggctgaagcccgctgcttagctaacttcagtttaagaaactgttcttcctaaatttgactgtcctttttaagcccccactccttcaccccacgctccccagccccctagcccttctcctctcctgccaccattcccatttcccgggccctaagtctccaggaatgaaggtgctgcgcaaaaagtattccgctctgtgggttagcatctaacaaaagtgtactctgaatttattgtgtcttatctttgtttcacaaaataatttgtttttctcacttcagtgatgacgagaaaaccttaaaatctgtttaacatcttttttaattttcaatgtagctaatgtagcagtgttcagaataatagctaatgtgctttatttgtatttatttaatcaaaaaatcttgggccgggcgcagtggcgcaagcctgtaatcccagcactttgggaggccgaggcgggtggatcacctgagggcaggagttcgagaccagcctgaccaacatggtgaaaccccgtctctactaaatacaaaaacttagctgagtagggtggcacacgcctgtcatcccaactacttgggaggctgaggcaggagaatcgcttgaacacgggaggtgggggttgcagtgagctgagactgcaccgctgtactccagcctgggcaaccagagcaaaactccttcttaaaaaaaaaaaaaaaaagggccgggcgcggtggctcacgcctgtaatcccagcagtttgggaggctgaggcgggcggatcacaaggtcaggagatcgagaccatcctggctaacacggtgaaaccctgtctctacgaaaaatacaaaaaattagctgggcgtggtggtgagcgcctgtagtcccagctactcggaagactgaggcaggagaatggcgtgaacctgggaggcggagcttgcagtgtgccgagattggcactgcactacagcctgggcaacagagcgagactctgtctcaaagagggagagaggaaaaaaaaaaaaaggtctggcgtggtgtctcacgcctgtaatcccaacactttgggaggccgaggcatgcggatcccgagatcaggagtttgagaccagcctggccaatatagtggaaccctgtcgctgctaaaaatacaaaaattagccgggcgtggtggcgcatgcctgtagtctcagctacttgggaggctgaaggagatcccgggaggccgaggttgc

SEQ ID NO: 585259 - DNA, 4001 bp, Homo sapiens
aagctatataatttgttctgggaaggggaaacacatatggccacatttctgcatataatttcagaaacttgttgtattcccctcaagctgatgtagaccttagtttagatatttacttctggaactacagaaagcaaaaatcgactgctatgccaatgtaaattggcacatgaagccatttagtatttttagttttcattttcctaggtttttcttgttgctttcattttttcagttgggttttgtttatttgaatgtttatatatgctttgcatgtgctgtgttctgtgtccatttatgtgccggacagggagtgggaagttgaaaaataattatgggacgggtgtggtggctcacgcctgtaatcccagcattttgggagtctgaggatggtggatcacctgaggtcaggagttcgaaaccagcctgaccaacatggtgaaactccgtctctactaaaaatacaaaaaatagccgggcatggtggtgcgcgcctgtagttccagctactcgggaggctgagacgggagaatcgcttgaacccgggagccagaggttgctgtgagccgagattgcgccattgcactctactctgagcaacaatagcgaaactcctcctcaaaaaaaaaaaaaaagtaataatatagaatactattccttttttcttaactgggttgaaattctaagaatcttttatatataatattttaaatatttttaagatacaaaaacattttgtaaaaattttaagtattctacactggatgccattcataacagtttatgatcttaagtaaggcttgtaattaccaagaatacagtaaaacttcagtatctttatatatgagtatatagaatagaaaaattgtatttgtaagtagaatgacataaattattttttcacttaaaaattacaacttttgcttattagaataaaatgaacacatatgaagtcaaccctgaaggaaaaaaagtcaaaaacaactttgaggaagtgacaagaaaatattttaggattaggggtgtgtctcattactcccaaatggtattttgccagtggccaaattttctttaactaaaccaagaacaatgttgattattagtgctgcatccaggctcgggtgttcacattttttcagttttcatgcacattacttgtcttgctttccttatattttaaagaatttgattacattattttaaccagctaaattcgccaatgctgcgatgactaaaccggaattaaggaagacattcctttccctcacactatgtcagtagcaaaagagatatttcaaaagttcttttcttatgaaaccaatttgacaagggacacatcacagcacaacataagaaaaatgtgcttatcagcacaatgggctagccttctaaccagcacttggggtaaaacaaacatgctacggttaagtatagcattttccttcaaccagtcaaaagaactgtggtctagacctacacagcagcaaccccctcaaatgaggataaaaccaaacctgttggtggtaaacacggaaaatatgcaggtaattacaactctatagctgaaaaagtgggtggctcttaaaagagcctttgggattgggtatgaagacgttagaattacttagagctggtgtacttggtgacggccttggtgccctctgacacggcgtgcttagccagctccccgggcagcagcaggcgtacggccgtctggatctccctggaggtgatggtggagcgcttgttgtaatgcgccaggcgggaagcctcgccagcgatgcgctcgaagatatcgttgacgaaggagttcatgatgcccatggccttggatgagatgccggtgtcggggtggacctgctttagcaccttgtacacgtacacggaatagctctccttgcggctacgcttgcgcttcttaccatccttcttctgcgccttggtcaccgcctttttggagcccttttttggagcaggagcggacttagcaggttcaggcatgataaataaacacttcgtccacaacctaaagagaaatgcaagtgtcctcactctgcagctggtaatatttgtagagctcctatcgtaaactggcatttaaaagcttacacattgattggatgaattgtctctgtgtgccctgtggtatgcaaattaggtgattctagcgtttctttgcaattggttggttgttctagccaatcaaatagcgttatttacaattcgacctccaagtataatagtttctcacttgctaacaaaattcacttttacatttttgtcttcattgcttaacatcgtttttaagaattcaaaatgtccggacgcggcaagcaaggcggaaaggcccgagctaaggctaagacccgctcttcgcgggccggactccagttccctgtgggccgcgtacaccgcttgctccgcaagggcaactactccgagcgagtcggggccggcgcgccagtgtatctggcggcggtgttggagtacctgaccgccgagatcctggagctggcgggcaacgccgcccgcgacaacaagaagacccgcatcatcccccgacacctgcagctggccatccgcaacgacgaggagctaaacaagttgctgggtaaagtcacaattgctcagggcggtgttctgcccaacatccaggctgtactgctccccaagaagactgagagtcaccacaaggccaagggcaagtaaaacgagaactcttatattggctttttaaggaagcagtcttaacaaaggctcttttcagagccacccatgtattccttaaaagggctcacattttctgtgtaaatagctattttgcagttttctttaataatttttccatttataagtgggtgttcttaacactgaatcgtgaaactaaccgtccattttaaagatgccataaaaatacataagcaaattggcggggcgcggttccttacgcctgtaatcccaggactttggaaggccaaggtgggcggatcacagggtcaggagttccaggacagcctgaccaacatggtgtgaagccccgtctttactaaaaataaaaaaatttgtcgggcgtggtggcgcgcgcctgtaatttcagctatttaagaggttgaggcaggagaaaatgttgaaccccggaggcggaggttgcagtgagtcgagatcgcgccactgcactccagtttcggcgacagagcgagactgtctcaaaacaaacaaaaacccaaaaaagcaaactaattaaaatgcaaagagactttatgtcacatgtaatttaaatcgatcaatgcagcggctcgttaggattgcaaagctgttaaaaggcctgagacatacaggagagaagttaatgtttgtcagtgtttacatttacataaaaatatagttagtgacttaaagcaacagaaccagaacaaatgttttattgtcttttgtatgcatcttaatgatacgaaataacctgtaatttgtaagtattttttgggtttgtttttgcaagccactttcaactctactgagctaaccctaattaattatcaataggaatacaaacctacatcccctggagccagacggcccttaggtggagcttcttagcacagtgttcagcatgactaaaagggcacactggtctttttgtgccatttataaatttggcttttttttttttttttttttacagcagattacacaaataccagttgaacttgtaaaagataagagtgctttcatatgaggatgacatattgtggtgaaattaaatgtgttcatgtagcttaacatcaggtttcatattgttacttatgagttaatagtcatggtgcatttggaacaaattattgaaaatatctccaagtttaaatagacaaatcaagatatgaaattaacctttctaaacttaagagggtaaaaagaaatcacttggccaatcacaactagcgcgcgtctttttaaaacgttgatcaaagccagtttcagcgccaacatttaaaaaaaaatta

SEQ ID NO: 585260 - DNA, 4001 bp, Homo sapiens
cctgcttcagaggaaggtcatacgaacattcttgtctatgttgttctactaatgtcttagaatatttactatgtcaaggcgccatactttggagtactatgttgtcagaaacctgaggttgctcatggagtactatggagtagtgaccttttttttttttttggtcccattttagaaatttgattaatgagtataaactaatggtttctatgtttgagacggagtttcgttcttgttgtccaggctggaatgaaatggcgggatcttggctcactgcaacccccgcctcccggtttcaagcgtttctcctgcctcagtctccgaagtagctggggtaacataggcatgcgccaccacgcccggctaattttgttatttttagtagatacggggtttcaccatgtgggtcaggctgtttttgaactcctgacctcaagtgatccaccagcctcgcctcccaaaatgctgggattacaggcgagagccactgcgcccagccagccaaaactgtaatttttttttttttttttttttttttttttttatgagatggaatctagctctttcgcccaggatggagtgcagtggcgcgatctctgatcactgcaacctccgcctcccgggttcaagtgactctccagcctcagcttccagagtagctgaaactacaggtgagtgccaccacgcccggctaattttgtttgtatttttttagtagagacagggtttcacagtgttagccaggatggtctcgacctcctgacctcgtgatccgcccgtctcggcctcccaaagtgatgggattagaggcgtgagccaccgcgcacggcggaaaacgagattttttagatcaactttacattgccaatgcccatggtattccctccacaacaaactccacaagagtgctcagaaaagtcaaacttgttatcaggtgatctttagggacccaaagactactcttcctaccctttccagtgttgcccaggctggaattgcactagcgtattcacatgttcctgcagtctctagcccgagagtttaagctatcctaccacctcagcctaccgagtaaatgatagtacagacgcaagccgtcacacctggttagcttcatttttttgcagagacgagttctatgttgcccaggcaaatctgttaactcctgagctgaagaaagcctcatgcatcgacctcccaaagtgctaggattacaggatcttgccaacacagaacaggagtatctcctgatcaattttttttgagacgaagcctcgcctttgtcgcccaggctagaatgcaaaagcgccatgtcttttcactgcaacctttgcttgctgggtttaagtgattctcctgcggcagcctcccgagtctctgggatgacacgcgactgccccacgcccggctaatatttgtatttttagtagaaacgagatttaaccacgttagccaaactggtctcgatccgcacgcctcggcctcccaaagtgctgggattacaaaatcggaaaaattattccctagaaaacggtgaaattcaatattaaagctctttatgtgagacttgagtggctctgaaaagagcctttgagttttaaagcacctaagcacacatttacttggagcttgtatacttggtgacagccttggtaccttcggacactgcgtgcttggccagctctccgggaagcagcagacgcacggcggtctggatctccctggaggtaatggtcgagcgcttgttgtagtgggccagacgggaagcctcgcctgcgatgcgttcgaagatgtcgttaacgaaggaattcatgatgcccatggccttggatgagatgccagtatcggggtgaacctgttttagcaccttgtacacatacacggagtagctctccttacgactgcgcttgcgcttcttgccatccttcttctgcgccttggtcacagccttcttggaacccttcttcggagcaggagctgacttagctggttcaggcatgctgtcagaaaacaataacagcagtgagaatgaacgcacttaaataaaagctcgtgtctagagtctctccttttataggcctttcatgcaaataaagaattcaaaatatccagctctgattgggcaatgtgttagtgacgcatacatgtaaaatagccttcaccttatttcctttctaattggttggctcgtcaaagaacaattttaaccaatcaaattgcgcctttcacaattctaccgatgactataactagcttcttattcctccatcgagcccattctttttctttattcagtggattgttagttcttctgctgttaggaagccactatgtctggacgtggaaagcaaggcggcaaagctcgggcaaaagctaaaacgcgttcttccagggccggtcttcagtttccagttggccgtgtgcaccgcctcctccgcaaaggcaactactccgaacgagtcggggccggcgctccagtgtacctggcagcggtgctggaatatctgacggccgagatcttagagctagctggcaacgcggctcgcgacaataagaagacccgcatcatcccgcgccacctgcagctagccatccgcaacgacgaggagctaaataagcttctaggtcgcgtgaccatcgcgcagggcggtgtcctgcccaacatccaggccgtattgctgcctaagaagacggagagccaccataaggccaagggcaagtgaaatgattactagtcaaatccgtcagtgatcccgagtcccagaaaccaaaggctcttttcagagccacccaccttttctgtaaagtgctggaatacacatacgatgcctgaaatctcaatgttcactgtcctaatttttaacgaacgcttctgacgttactggtcagttctttattgaaatccttgctcacatttcatgcactaatttatcttactggtgtttctttgcagtaaaaatgcgtttataaaggtatacaagaatagaaaccgaggttgtgacaccaaggtttcactgcgttattttgtgtataggtccatgctgtgtatacaaatttatcattaatacacaggctgtttattcatgtgcacttgtcagaaaagggtgaaatattaatacagaaacgagagaacaaagaaggatagctgcccattagcatttcagggcgggctttttaagttttaaagatgactgcattccggctgggctcagtggctcatgcctgtaatcccaacactttgggaggccaaggagggcggatcatagggtcaggagttcgaaatcagcctgcccaacataatgaaagcccgtctctactaaacaaatacaaaaagtagccgggcgtggtggtgtgcatctgtagtcccagcaacttgggaggctgaggcaggagaatcgcttgactccgggaggcagaggctgcagtgagccgagatcacgctattgcactccagcctgggtaacagagcaagactacgtctcaaaaaaaaaaaaaaaaaaaaagactacattcctctagtgagaattgtgtttgttggatttctcttttcaaaaggagcaattaacacagtattctaaaataaacactaaacgaaactaagcagtaacggcctgacgccctaggtcagacctgtaatcccagcaatttgaaagactaaggcagaagaatcgcttgagcccaggagatcaagaccagcctgggcaataaagcgagacagccccctcacctccacaaaaagtaaaaagcctgccctgcccggtggctcatgcctataatcccagcactttgggaggccgagatgggcggatcacttgaggtcaggagttcgaggccagcctggccaacgtggcaaaaccctgtttctactaaacatacaaaaaaattagccaggcatggcggtgggctcctgaaatcccagctactcgggaggctgaggcaggagaatcgcttgaacccgggaggcgggggttgcagtgagccaagatcatgccattgcactc

SEQ ID NO: 585261 - DNA, 4001 bp, Homo sapiens
ttatagtattactttctatatttcagtgaggttgtacattttattaaagcacttctatgaaatccttgtaaatcactgatgagacatggccagatgagaatataaatgggtagcccctatttgtaaccatagttccatcaatatagacttaaactctgtgctctctcccttcctctgtcacggctctcttgtgctctccccacccctcctccctgtccactagggaggaggcaagaatgtctacttttgaattccagtgctgctggctcctcttcttctgccatctcttttgctccaccctccctccagaactgcctccaggaacttgcaagttttcaagattatgttaattcaccttttggcaatttaaattcagtcccatcaaaagccggttaaaagaaaaacgtgaccttcagacttacgtttctttctttagtttgtgagtttattgtacaaatatccactttagatttcaatccaggtaaaggacagggatagtttctatctttctcactgctctttactaagtattttctgtaatttaataggttctcaataaatgaataaattactagtccaaccaccagatacttttgaggaaaaactgaacgtacctctcagatataggctcttaatatactcttccctttcctcctgctacccccatattttatgagccaagagaaatgcccatgagggtggaggaatgtggggatttcagtctatattaccctaccattaaaatcggtaatcttgatatttaaaaaacccacagcaggagttgtatacatagttttggtgattcctgttagcgttttcaagttaagactgcctgagcctggcctttttgctgactgccaaccaacgttacctaaaaacaaagacacattgttgccaggccctttactatttatattctctgctcttccttgtcttacaaatcttaagtttttcaaagacagctagaagccctcatactacttgccaaataactaaaggtttattgcatggcattttgttttcatttccataaagtttgtctcctaatccttatctattaagaaatttaaatttttctcaggtacttggtaaactacaatatcccagttaacattaacttccacgagactcctacaaagaccacattatgctatctagagtgggttattataggcactaaatgtactttcaactcattttgaatactcaaacttaccagctctagactggtggacgtgttgctccaaattgattgcattttaagttgcaaacttagtttttggttcctaaacaagaatgcccacttttcctgctgtgtcaaattatctgctcagtaatacaaggcaaggccgaggtgggaaaacttgcttgagtttaagaccagcgcttgagtttaagaccagcctgaacaatgtagttgtaccccacctttataaagacaaataaactctaaaagcttagtgtttgtcaaacgcacagaataaacaggtgatgtaggaaaattttacctgtattggcgacacttctcccatagaatacagcagcacccagcattaaaactcttaattgaaatcattaagtggctctgaaaagagcctttgggtttgaacatgcgtccatttatttggagctggtgtacttggtgacggccttagtgccctcggacacggcgtgcttggccagttccccaggcagcagcaggcgcacggctgtctggatctccctggaggtgatggtcgaacgcttgttgtaatgagccaggcgggaagcctcgccggcgatgcgctcgaagatatcgttgacaaaggaattcatgatccccatggctttggaggagatgccggtgtcggggtggacttgcttcagcaccttgtaaacgtatacggagtagctctccttgcggctgcgtttacgcttcttgccatccttcttctgcgccttggtcaccgccttcttggagcccttcttcggggcgggagcggacttagctggatcaggcattgcaacaagataaaggagtaagaatacaccccaaagtgaaggctcaacagcacagctggccgtttttgtaggtcttttatgcaaataggtgcttaatcattctcaatccctgattggaccaaatcagccaataaaaaagttaaattcaagtctactttttgattggatatttatgcgaaacctaccctaaatccttttctacacctcccgggggaaaaaacgtagtttttcattcaaaacattagaaaaactaatgccttgccagtaacatctacctataagttctgtctccttaggtgagaatttaaacagaaacaaagacggatattatgtttctagtttcctaccaaattgcagcttccggatttaaaattatctatgaataactaattctaaaatggaaattagctaaagatttacgtgtttccagaattataccattggctttcttttataatctgatcaaggtcattagcattcttacataaaaatttaagctttttcagtaatcaaaggatgaacacatctcaagagcgatgggattttaatatcccctaggaacggagtgtctggaagtgaaaccagtgtttgttgaaaggttcagaatatatgaaatagggtacttatattaaaaataaaatatttcttcaaagtaagagttttttaaaaaatataaaggagacattgagctggaccaatcactctcaaacgcggtatttttgaatcgctccggaactgcagaacgttcatttccgtctgtcaaacataatcccaaacaaactgattaaaataaaatcaatgaaggtacgtaatacaggtaggcacataaaacataataaaatgtaaggaactaggggaaaaaagcatttagataggttaagattttctaaaatgagacctagtagctgatcacaagtcctatcacactacataattcagggcgcgaaactggaagattcggaccaatcagaaggactttgcctttataaataggagtaagaacaactgtttgttcagttgtgaccattgcttgaaacccattcctatggcacgcacgaagcaaacagctcgtaagtccactggcggcaaagccccgcgcaagcagctggccactaaggcggctcgcaaaagcgcgccagccaccggtggcgtgaagaagccccaccgctacaggcctggtactgtcgccctccgtgaaatccgccgctatcagaaatcgactgagctactgattcgcaagctaccattccagcgtctggtacgtgagatcgcgcaggacttcaagaccgacctgcgcttccagagctcggctgtgatggcgctgcaggaggcctgcgaggcttacctggtggggctctttgaggacaccaacctgtgtgctatccacgccaagcgagtgactatcatgcccaaggacatccagctcgctcgccgcattcgcggagagagggcataagttgtactgagggtgtgcgccaacttaaaccaaaggctcttttcagagccaccaacaatttcagttgaaagcgccgtagcactagggagtaatgtctcctaaaacaaggagggtggagggttaggggatgggggcagggccggtggctcttctaaactaggcttttgtgtcttggccattgtcttcaaaatggccgatagtggcggctcacgccttgtaatcccagtactgtgggagcccgaggagggcgggttacttatacaaaggtcaggaattcgagactagtctgcctaacatagtgaaaacccgtcttcactaaaagtacaaaaccaaaaaacaaaaatacgggtgtggtggcgccctcctgcagtcccagctatatcgggggctgaggaaggagaatcgcttggacctgggaggcagccgttgaagtaagccgagatcgcgccactccactcctccatgggtgacagcgaaaccctgtctcaaaacaacaaaacagaaaatggttgtgtgctgaggcaaaaccaaaactacagggaca

SEQ ID NO: 585262 - DNA, 4001 bp, Homo sapiens
tccccaccacaatacagtgctcagaaaagttaaacttgctgccaggtgatctttagggcccaaaggtcaccattaatattattttatttttaaaagaaacttttgctggtgtaaggactttgctgtgcaacaaagaatatgtgtatctcctgaccagttttcttttattacaattgagcctaaatttcctgactcctctgacagcaactaggctcctgcttgggatggtctctaacaaacagtgggaagtaatccttagaatcagagtagattcaaatctcagttttatttatgtgtaaggggctagttacttaaccttaattcttgaggtcattcacctgtaaaagaggagcttccatttcacagctgactgtaggaaaaaaaaaatcaatgaatgaaataatgcattctaaggactaccacacaaatgttaattccttgtaaccctcctctcttaaaatgaattttcaagaaagggagtagctgtggacaaagtcgttccaggacacggaggaggaggtttagggagaacacagtccttggagccttaaaaaggcttacagataaaagcgtctgaatgtagcaccgggaattttcatttctttgctccaacttcaggctatcctgttgcctgttctttgtcttaaacctcaatatgttcagctaagaagatggtagagttcctgatcttgccaagaggtaatatgtatagctacgtgaagtaatccagtaattataaactcagtaaaatttgtagagaaatcagtggacttgcaagggggatatgagaacgtctggtagcgatctgccatggtttagaaatgcaaccaacagaggtgatttcctccatcatatgccgctccaaccatttgcaagctaacaacgaactaaaagacgagtttcgctttctcagaccttattttagatttaagactaccccaaacttgatttccacccggctactccaaatcaagggcaataggatgataaagtgaaactaaaaacgaaaacaaaattttaagatggtggtgtgcggggagaagaaaagtggggatcaatctagaacacgatttttccttagctgctgagtgaaatgtgtcatattaagctgcatacgagcttactccttggtgacgcttacaatctataggggaaaaaacaacgaacctggatttttttttgagatgtctcgctcttataccccaggtttgagtgcaatggctctatctgggctcactgcaacctccgcctcctgggttcaaacgattctcctacctctgcctcccaagtagctgggattaagttgcctgccaccactcccggctaatttttgtatattttagtagagacagggtttcaccatgttggcgaggctggtctcgaactcctgacctcaggtgacgcgaccgcctcggcctcccaaagtgctgggattacaggcgtgagccactgcgcccggccgaacttggatgtttcagtaaacccttactatcccatgtgttgcttagccattttaccttgccaatgccaagtctggaaaattacagatctttaaatgacaacatgggtggctcttagaagagcctttgggtcgttagcgcttttacccaggtaactagtttacttggagctggtgtacttggtgaccgccttggtgccctccgacaccgcgtgtttggccagctccccgggtagcagcaggcgcacagccgtttggatctccctggaagtgatggtcgagcgcttgttataatgcgccaggcgggaagcctcgcctgcaatgcgctcgaaaatgtcgttgacgaaggagttcataatccccatagccttggacgagatgccggtgtcggggtggacctgcttcagcaccttgtacacgtacacggaatagctctccttgcggctgcgcttgcgcttcttgccatccttcttctgtgccttggtcaccgccttcttggagcccttcttcggggcgggagctgacttagctggttcaggcatgttcgcagccgaagtgataccgtcaaatgaccacaggaaaatgctggtgagcccaaacgccctcattatttacctcgtgtatatgcaaatgaggctggctgagtttcggtttctcattggttcttttagtgtctgaatatatgataggccatttctgaactcctaaatctcatcggctctcccagaagctcaaccttgcataatttgacctttcaactataagtatgtaagtcagaagtggttttttttttttttttttttttaaatttttttaaacacctgcttttcgattggctgaaatctgtgttcaggagatagcacagtctactttgccgaatatagattataagagtttagctcttgcgttttactagaatcaatcactttccttcttctaaacaagtatttaaatacttcactgcgtctggatgtggaatgcagggcagcaaagctcgcgccaaggctaaaacgcactcttccagggctggtctccagttttctgtgggccgagtgcaccgcctcctccgcaagggcaactacgccaagcgggtccgggccggtgcgccggtgtacctggaggcggtgctggagtacctgaccgccaagatcctggagttggcgggcaacgcggcccgagacaagaagacccgcgtcaccccccgacgcctgcagctcgccatccacgacgagaagctcaacaagctgttgggcaaagttactatcgcgcagggcggtgtcctgcccaatattcaggccgtgctgttgccctgtctatacaagtgactgactaggcaaacaggactaatgagaaaatgtttaatatctcaagtaagtgctttaatgtagtcgggaagaagcaagttcagtaacgtttacaaaaccttgtaaagtttagatggacagggccactgcagtgttcaagttatcctgcagaagaggctagtgggggtggtatcctggaatatcatcaataggacccaacgaaaagtaaatgataagagtcgttggaaaacctaaaattagcctgtgccttaaaaattctcaaccgaagcaaaacaccatttgggacaaaatagaattcagttaacatttgttgctcactgttgtatgtcggtgacttcttggctcgtgatttcccaggtacatcacccaggaatcctgccttataatggtcaaaggtttccagctagcagcagtccaggtgactcaagaaaacggcacaagataaacttctcaaaacgtggtcctccgaatctggccccacaacacatctactgaatgagaattagcgtcttccaagtcttaaagtagtcgtttacggactacagcttgagaagcgcagaattagaactttaagaagttaacgttcttggatcgcagactaaccgagaagagaggattcaaaaatgaagtgattcatccaatcagattttccagtaattcaccaatcacatcgttggactcttcagccaatggttttgttgcgcgggtcttttgaaaatcaacaaggccaattagaatgtttctgagtatatataagggcagtttccactctgccaagtggctgagtttttctttcaggtagtctgagatggcccgcaccaagcagactgcacgcaagtccaccggtggcaaagcgccgcgcaagcagctggccactaaggcggctcggaaaagcgcgccggccaccggcggcgtgaagaaacctcatcgctaccgtcccggcaccgtggctctgcgcgagattcgccgctatcagaagtcgactgagctgctgatccgcaagttgcctttccaacgcctggtgcgagaaatcgctcaggacttcaagacagatctgcgctttcagagttccgcggtgatggccctgcaggaggcctgcgaggcctacttggtggggctctttgaggataccaacctgtgtgccatccatgctaagcgagtgactatcatgcccaaggacattcagctcgctcgccgcattcgtggggagagagcgt

SEQ ID NO: 585263 - DNA, 4001 bp, Homo sapiens
agaaactctacagacagttttcaaaggctggacaagtgtccgagaaaaagctaaaaaaacagaagaaatttcataaagcaggcaatatttaactgggctttgaaaaaaacaggacttgagtcaacaagggaaacgtgtgtatttgatagtggatttaacaaaaatactaattgttttagatgttattactgtgctaaatttagatccattttaaataaactagatagtaactcaagtttatatacaattactacctttgaaaccaaaacctagtcatagtgggagcttccaaatgctttatagaccttggatttttacctaagagacacatgactgaagttacaacctagagcaacatcgtttgttgggtgactggttctcatttgtgacaacctgaataagggggaacttgtttttcctcacttcttctaggcaaagtcaaaaacagtatttaaaatactaacgaaaggagttttaaaattgaaattgacttgtttcagaaaagagtctgggataaatgtcctcaagctttctgccttcattacgccccgaattgtcctgtttaggcttctaatgcctttgcttatatagatataccataaagggaaaatagtattctaatcagaaataaagcattgatctttctcaggctgaaaactacagcattcaaattccgttgtagccgggcttgatggctcatgcctgtaatcctagcactttaaggctgaggctagtggatcacctgaagtcagttcgagaccagcctagccaacatggtgaaaccccatctctactaaaaatacaaaaattatccgggcatggtggcgcatgcctgtaatcccagctacacggaagggtgaagcaggagaatcgctggaacccgggaggcggaggctgcagtgagctgagatcgcgccaccgcactccagtctgggcgacagaggaagtctccttctcaaaaaaaaaaaaactgattatgttgccataaagggtccctttaaaaaaaaaaacgctctatccaacgaaaactaattagaaataaatctccttcccgaaagcgataaaatactaaagaatgagaaactgacagtttactgagtttgtaaggaaggccaaataaaggcggggtttggattcctttggcgcacccaagccgaccgtggacttcctggatacaacaaccaatcaggatgcagaggaagggcgggcgttgcccgggcaaattcaaactgacaaccgctgcaacttggcactgttccaaatcactaaccgacgggggaccgacgagtattttaattggtttctaacgtattttaattggtttcgaacttataatagaaaatttcccatctccttacttaactctaagattagaatggcagatctaaaaaaaaaaagtcactaaggattagttaaataactgctctacttcagaccaaaaaacacagtagcaagttacaagggtttgtcagtggccagcagaggaggaatacaagcaccagctctttctttgagaacatgggtggctcttaaaagagccgttagggttgagagtttgcaaccaactcactgtttacttagcgctggtgtacttggtgacggccttagtaccctcggacacggcgtgcttggccaactccccaggcagcagcaggcgcacggccgtctggatctccctggaggtgatggtcgagcgcttgttgtaatgcgccaggcgggaagcctcacctgcgatgcgctcgaaaatgtcgttcacaaacgaattcatgatgcccatggccttggacgaaatgccggtgtcagggtggacctgcttcagaaccttgtacacatagatggaatagctctccttgcggctgcgcttgcgcttcttgccgtctttcttctgcgccttagtcaccgccttcttggagccctttttcggggcgggagcagacttcgctggctctggcatagcactgtgtagctataaagcgccaacgaaaaggaaaaacagcgtgagcagggtatgacaaggcgcttttatatagaatcgcttatgcaaataaggtgaagagttgaagtcttgtgtctgattggtagttattcagggtaacgtcagaggtcaggtctgcccaatcaggattcgcaaatccagaagacgcactactattggttgaaattaaactgcagccctaaccaacaacacgtcttctttttcgcgcccaatagtgtttataaaaagcgccgcctttcccgttcactttgtggttgctcgtagtgagttgcgctcgctatgtctggacgtggcaagcagggaggcaaagcccgcgctaaggccaagactcgctcttctagggccggtctccagttccccgtgggccgagtgcaccgcctgctccgcaaaggcaactatgccgagcgggtcggggccggcgcgccggtgtatctggcagcggtgctggagtacctgaccgccgagatcctggaactggcgggcaacgcggcccgcgacaacaagaagacccgcatcatcccgcgtcatctccaactggccatccgcaacgacgaggagctcaacaagctgctgggcaaagtcaccatcgcacagggcggtgtcctgcccaacattcaggccgtgctactgcccaaaaagactgagagccaccacaaggcgaagggcaagtaactatctgtactagtttgtggcagctcaagtaaaatcgagtccaaaccaacggctcttttcagggccacccacgtcttctctaaaagaacttaacatttattccatgtgaaagaaagtgagacatggacaagactctagtcataaattacccatctttttgaaaacagtgtagcgaacaccgcagatttaaaagaaaaactagagggaaggtggtccagattttaccacgcttaaaagttaagatgtgaacaaatctcttaggccattacttaattttaaacttaatcagtgtgtgtccacagagcaccagtggcttcgtgagttcttgaagcactttggcccaaaagagttatcgcccgggctagaatttagcagacagctgttccacgcgggccagggcggcatgaagaagtcccgccgctacgtgcccggcacagtggccctgcgcgacgttcggcgctaccagaactccgagctgctgatcagcaagctgccgctcctgcgagagctcggcggtgacgccgctgcacgagagcgaggctgaagaactttgtgacacaatagtccacctccctgcaaaggctctgtcagagactcacatctttcctgatggatagctgtgaagcattctcttacccaccctactgcatgttgcaaagtattcctttaaaatgaagtgagtaaaatactgggatgacgttatctggagcccaagaaagatggctcatttggaaaggcctaatatcccaagttgcttacctagaagaacttgacaggatagttaataataaaccttaaaacccatgaagaaatctgaggtaaagtgttagcacacagactgttaaaatgtctgcctcacagataggagggaaaatatatagaggattataatatggttcaacaaatgttgatgagtattagaaatgtacattagaaatattagaaatgtttatgactattagaaaagtacagggtattgggcgttcctgacacaaactgaggcctcctagcaagactggcagttttctgtaaaggagggttatttactacggtagtgcaaataacttttggtgttgtagctaaataaggaatactcatgccaagattgcacaattgtgcctcctccctctgttcactgaactctgatgtaattttttttttttttttgagacggagtctcgctctgtcgcccaggctggagtgcagtggcgctatctcggctcactgcaagctccgcctcccgggttcacgccattctcctgcctcagcctcctgagtagctggggctacaggcgtctgccaccatgcccagctacttttttgtatttttagt

SEQ ID NO: 585264 - DNA, 4001 bp, Homo sapiens
tgatctaggctcactgcaacctttgcctcctggcttccagcaattctgcctcagcctcccgagtagctgggactacgggcacatgctaccacgccccccctaatttttgtactgttagtagagacggggtttcacactatgttagccatgctggttttgaattcctgacttcaagtgatctgccctcctatataggtatagatatagatcagtgcctcctatataggtaaacaataaatataattatttgttgatacatttcttagaatattaatgtaaccccaaaattactggtaggataaataagacttggatcaacagtgaacatatgctttgcatgtatgaagtttttcaatatgaccctgctaatctccaaatgcctaagggcgggcaatatccccaaagactagaacaatgcgtggccaaatatgttaaatacacacacacacacacacacacacacacacacacacacacacaaaattcccctgtgaaactggcctacatttctaaatcacaaatttagccaggtaacaacctagcttaaaattcgtggactctttctttcacttggttcttccaaaaaagtttcacactgctcatcaccggcatagtcattctagcctctaatcacacaataaaacccaccacctaattctaacccaccacctaacacttagctcaaaccctgtgctgctggggaagttcccttctcctctactccaacttcttgcttcggggcggactgtctctagtctgtctgttgtctcccctctgaatctacttgcttttcattttccttttctataagctttcttgtcaaaaggaaaaattactgattggaccaattgacgctgaacatgccttaaaaactagtaaactattccaaaaatctccgtgatgatttcatgttccgtttcttcactcctgagaaaagctgtgctcctccccttacccttgcagactatcctgcctggtggtctggcatcttcccgatgtcccgtgggctgcagagatggaatcagggggtgagggggaagcaaagcaaggcagagctgggtacagcctagaagaggttaaataaggtaactgctcgagcgaaagccatacgtactggaacgccatcgggaaccaaatttactaatatataaactcacgttagaacgccattacatggtggaaagtacacgtgacacaataggctttcaacaagttctaacaggaagtcacagcactcgacacaacggaagtatccattttcgcgccaagagccaggaagcactttctgttaacacaagtttcctgcacatccctaattttttaggcgccatattcctcactcagtactaacaaagtgtatgtggcttctccttagccagactcgattacaagcactgcatgcattactcagtgtgataagatcatgataatccctttaaaaagatcgcccgaatttaagcctggattaggaacacgtgtttacagctctaatatcgataatttaagtggctcttaaaagagcctttggggttgggctttaagacgcttacttggcaagtttacttagcgctggtgtacttggtgacggccttggtgccctcggacacggcgtgcttggccaactccccgggcagcagcaggcgcacggccgtctggatctccctggaggtgatggtcgagcgcttgttgtaatgcgccaggcgggaagcctcacccgcgatgcgttcgaagatgtcgttgacgaaggagttcatgattcccatggccttagaggagatgccggtgtcggggtggacctgcttcagcaccttgtacacgtatacggagtagctctccttgcggctgcgcttgcgcttcttgccgtccttcttctgcgccttagtcacggctttcttcgagcccttcttgggcgcgggagcggacttcgctggttccggcatgttgaaggcgaactacgagcctgagacgagcagcagatcgagaaaacgggaagtaatgggagcaaggtaccaggagtcgtttttatataggacctctcatgcaaataaggtgaagagtgaaagtcctgtatctgattggtggttattagggtgacgtcagaggttagttatacccaatcaacccaatctgcaaatccaaaagacgtacttccattggttaaaactaagctacaaccctaaccaatgacatatcttctttttcgcgcccaatagtgtttataaaaggcgctgcctttcctcgttggctactttcagtaagttgtgaccagtatgtctggacgtggcaagcaaggcggtaaagctcgcgccaaggccaagacccgctcttctcgggctgggcttcagttccccgtgggccgagtgcaccgcctgctccgcaagggtaattatgccgagcgggttggagccggcgcgccagtgtacctggctgcggtgctggagtacctgaccgctgagatcctggagctggctggcaatgcggcccgcgacaacaagaagacccgtatcatcccgcgtcacctccaactggccatccgcaacgacgaggagctcaacaagctgctgggcaaagtcaccatcgcgcagggtggtgtcttgcccaatatccaggccgtgctgctgcctaagaagactgagagccaccataaggccaaataaggagcgaggttgtgaaaactggaaaacaaaggctcttttcagagccattctacactgtcttagagaaagctggacacagtcatgtttgtttcacttcatgtttgcttcgctagataacattgtaaagcgcttctttcgcggttgggctggagcaactctttacaatgtttctaaattaacccactggaaagcaatgaagacccaaaagttgttgtaggatactccggagaagcttattcagcaggggtaataagtgaaatcaaacgtacaaatccctgaaatctatttactaattccagtggtttttttttttttttttttttttttgagatggagtctccaacaggctggagtgcagtggcgcggcgcgatctcggctcactgcaacctccacctcccaggttcaagcgattctcctgtctcggcctcccgaatagctgggattacaggcacacaccaccacgaccggctagtttttttgtatttttagtggagacggggttccaccatggtggccaggctggtctcgaactcctgacctcaggtgatccgcccgcctcggcctcccaaagtgctgggattacaggcgtgagccacagcgcccggcctccagtgtaataattctattacattaatagtgttgtcaaacagccataaaaatgggatatacttgccattctttaaaggcaaattttgcaattctaagtattcttgaaaagcaagaaagggcagcctgattcttaagtggtctaactcttaagagtaactttacccaggtgatgaaagtctagtgactcatttgcattagaatttgattccgatggaaggagaatatgggatgcagaatttcctgaatcccatatttgtaaatccttagtcccatttctttggagcaggtgtattaatgcactcttgtagtagcttaggatacaacatagctttttctgtctagctaatttgtattatcaaatttattagatcgggattgctattgcttttgattgcttgtccacattaatttacctaccctaggaagccctatgagtttccttcctccgccccaccccctcttgatattacttggcctgcttttacttcatagcctcaaggctttctggctattcccacaaaatgccaaacacattttctgtcttaaggcctttgcactttaaattccctcttcccctgataactacctttctcactttttttcaatctatgtaggtctctgatcaagtaacacctataaagaggtcatctttgtttatctcctctctaaaatggagggccccattacgctctctatgcctatggggataggatatatattaattgaaatattac

SEQ ID NO: 585265 - DNA, 4001 bp, Homo sapiens
attagtgatttcattttgattgacaactttcccactgtacaatttcacactttaggcaatttactcgagctctctgaacccccattttatgatctgtaaaacaggtataaaaatagtaatttttcacaaagttgttatgaaagctaaatgatttaacatatgtagagagctttttaggacattatctggcacatgataagcagtaaataattatgaaaaagagccttcttattttttactagatagaatgatgtactgtaatttattgctaatcagtcaaattgcttcagtcttatactacaaacagtgctgctggaaacccctgcatatattattttgcatattttcaaaaatagtaaattcctaggggtgaaatttctgatgtaaagataggtgcattttaaaattttgacaggtattaccaaattttcctttatgaaagcactaccaatttgtggggccaccagcaatgattgagaattaaggtctgggaggcttattcaggattttccattcctatagcagaatactatgactggcctatggtgaatagtagatgcttaataaatgttagtaaattggatggtaaatagtatacgaaaaacagttgggtttgggtgaaaacaagaaaaacttttaaaaatctactctggcatcttttgctagcaggcattgacaattaggagaaggcaaggtgttaacttttactgatctcccacttttttttttgagacaaggcctggctttatcacccaggctggagtgcagtggtgcgatctcagctcactgtaaactccgcctaccaggctcaagccatcctcctacatcagccccctaagtagctgggacaacaggggcgcgccaccactcctggctaatttttgtgctttttgcagagacggggttttgctatgttgcccaggctggttgcgaactcctgggctcaagggatccgcccgcctccacctcccaaagtgctgggattacaggcatgagccaccgcgcccacccctctagtttccagtttagtcggaaagattaaaaacgccagccttgttttcctagtgctgtttttggtttttacctcgggtcttttgtcgtgccttaaaatcatgtctggttgcgcaagtgagggaaaggattgggtaaagggggcgccaccgcaagttgctgtgcaacatccagacatcaccagacccaccacctggagcctggcctggcggtgtcaaacgcattctggtctcatctttttagaaacccgtggatgctcaaggaatttccggataacgtgatcccggatgcgcttgactgacttacacggaacgagcaaagcgcaaagcagtccctgctaaggacttagtttatgccctcaagcgcaaaggtcggaccctctatggtgttggtagctatatgcacgtacctcatgtacatttcaccttaaatggctttcaaagagctagattaatttagtggatagatcaaaatgatttatgacccctcgccccccagtgataggaagagcgaaccagctcttctttagataatagtgagtggctctgaaaagagcctttgggttggacaagagcttgagaatttacttggagctggtgtacttggtgacggccttggtgccctccgacaccgcgtgcttggccagctcccccggaagcagcaggcgcacggcggtctggatctccctggaggtgatggtcgagcgcttgttgtagtgcgccaggcgggaagcctcgcttgcgatgcgctcgaagatgtcgttgacgaaggagttcatgattcccatggccttagaagagatgccggtgtcggggtggacctgcttcagcaccttgtacacgtacacggagtagctctccttgcggctgcgcttgcgcttcttgccatccttcttctgggccttggtcaccgccttcttggagcccttcttcggggcgggagcagacttggccagctcgggcataatgaaacaatagtggcaaaaccaaaacaagaagtcggtctcctctttttatataatagtttatgcggccgaggtagtgggaaggtctctgctgattggtaattatccgtggatgacgacagatgccagttttgcccaatcaaaataggtatcctgcataatcgagtcctattggtctaaataaaaataaaacgtaagccaatcgcacagcttccttttcgcgcccagtagaggctataaaatgtacgtttttctagtttcacttcagtctttcttgaccgtatagataataggccttttgccatgtctgggcgtggcaagcagggaggcaaagctcgcgccaaggccaagacccgctcttctcgggccgggcttcagtttcccgtaggccgagtgcatcgcctgctccgcaaaggcaactatgcggagcgggtcggtgctggagcgccggtgtacctggcggcggtgctggagtacctgaccgccgagatcctggagctggctggcaacgcggcccgcgacaacaagaagactcgcatcatcccgcgtcacctccagctggccatccgcaacgatgaggagctcaacaagcttctgggcaaagtcaccatcgcacagggtggcgtcctgcccaacatccaggccgtgctactgcccaagaagaccgagagccaccacaaggcgaagggcaagtagaagcctggattagtttgcagcaactcaatcccaaaggaaccaaaggctcttttcagagccacctacaattttgtggaagaactgagcactatgtttaatgtaatttctcgtctttgcctacttctaaaccactccaaaggttacgtagatcagtcttcggtgtcttggttaggtagtgacaatctcgttagctttataaaaagcctggataacattaaaagtattaaacacgccttcatcttaagcttagtggaagaaaatttagtttttcctaagctggcattatccaagtatgttgaattctgtatggttcaccgtcgggttttacttttagtctgttgaagcaaacatgtctgctttggggccagatgttttctgggtcttggtaaataacaaaccgggcattcgacgttcaatccaaatctagatcaacgacttggattcttcatttctgagaaatatctctcgaatctgtataattaattgcatttgaacattaatgattgagttgagaataattattagactaattagaacagttacttatggtgccaggtagttctctttgaagcattttctgaaaattcattgaaattaaaatttcccgagctttcccacccccagccacacaaattgatttcttagtacagagatgacttaatttgtttcagcatggtaaattccacttttaaaatatctgacttgatgtttttaatctgaatcagatctggatgtacgaatggaatagattcttaaaagaaaatgaattacatttctagagtattggaaaaataagctgcaatggaattactttaatctaaaagtgaaaagttcacataaagttgtttctttgacattttttggccttgaatttctcacatgcgaaccagcttttcttggttataaaaatagaagttttttaaatttaagtggtcaaaagatagaaaattgaggggacaggtgtataaggctgtcctgtccagtattgcagccactagccaattgtggatagtgatcattggaaattccatagcatgaattttatataaaatacacattgcatttggaaaagtcagtgccaaaaagtgtaaaatacctaacaattttaatttcgataacattgaaatatgttggctatattggattaagcaaaatattaaaaattaatttttccttgttttgttacaatgttctcctagataagtgtaaattacttatattgctctcatttccactggaaatcgctagtatagtgaacaactgtatagcgaaaatagaaaataaaatatggagaccatgaactgctaagtctgtcagaggaataggtgaa

SEQ ID NO: 585266 - DNA, 4001 bp, Homo sapiens
aaatcacttaatacccctgtaaaatcatccacacttccccaactcccttttccctgagaagaagggtatgtaatcatctgtattctattgcatggggcgtgggggggagggggagggagtaatcactgattctcccccatgcacattaataaatttgtatgccttttctcctattaatctgccttttgtgagttgacttttcaccaaaccttcagaggacaaaggggaagttttcctttggattctacagtttcaatagacaaccaaaagttaaagttaaagttgggaattatttaaatatgcttcactctttgaatgtattattcttacttaatctattaacatgtatatgtctttgctaacgttttgataatttattgaatggaatcctaaattggaaattcctagcataaatcacacatatgttagaaagtatttttcaggttgggtttctttaaagaagtgtgaggattcaaaggctctggaaaagcaatctcagtgcagatgccttttgaatccttccaggtatctgagttttctcacaattttaaaaattgatttaaacataactagaatatttctggcaatttaactgtaacacatctacagaacactcactaggtattcacagtgatattaagagcaattattttttccagttcattttctttgatttacctgattttttttgagacagagtcttgctctgttgcccaggttagtgcagtggcgcgatcacgactcggttcactgcaacctctgcctcccgggttcaagcgattctcctgcctcagcctcccgagaagctggtgttacaggcacgtgccactgcacccgtttaattttttgtatttttagtacagacggggtttcaccacgttggccaggctagtctcaaactcctgatctcaagtgatccgcccgcctctgactcccagagtgctgggattacaggcgtgagccaccacgcctggactaaccctccacatatttatttatgactttacctataacttctgcttccctaaaatgtacaaaacagttgcattctgactgcctcagaaccactttctcatggtctcgggggattgtgtcttccctaagccacggtcactcatagttgctaataatcctctttaaaatattttgggccgggcgcagtggctcacacctgtgatcccaacactgggaggccgaggcaagtggaccacctaaggtcaggagttcgataccagtctggccaacgtggtgaaaccccgtatctactaaaaatacaaaaagtagcagggcctggtgccacatgcctgtggtcccacctactcgagaggctgaggcagaagaatcgcttgaacccggaaggtggagattgcagtgaaccgagatcgtgccattgcactccagggtgggcaacaaagtgagactacacctcaaaaacaacaacaaaaaacaaaaaaaaacccacatatacaagtacatttatatgtacgaagcgagtcccaaagggtacctaatgggagacaaacttaacagtgaactggctctttcttgagaaacgtggacggctctgaaaagagcctttggggtgtgggtcacggcggaactgttactgcagcgagaggctcacttggagctggtatacttggtgacggccttggtgccctcggacacggcgtgcttggccaattccccgggtagcagtaggcgcacggccgtctggatctccctcgaagtgatggtcgagcgcttgttgtaatgcgccaggcgtgacgcttctccggcgatacgctcaaagatgtcgttgacgaaggagttcatgattcccatagccttggaagagatgccggtgtcggggtggacctgcttcagcaccttgtacacatacacagagtagctctccttgcggctgcgtttgcgcttctttccatccttcttctgagccttgttaatggccttcttggagccttttttagggactggagcagatttgactggttcaggcatggtggaaaacaaaataaaagacaaccttagggctgtttcgtcctctttatttaaatgttattatgcaaattaggagtagaataggtcagtgctgattggtgattatccgtggatgacgtcagatgccagttttgcccaatcaaaataggtatcctgcatactcgagtcctattggtctaaataaaaataaaacgtaagccaatcgcacagcttccttttcgcgcccagtagaggctataaaatgtacgtttttccaatttcatttcagtctttcttgaccgtaaaggtaatagaccttttgccatgtctgggcgtggtaagcagggaggcaaagctcgcgccaaggccaagacccgctcttctcgggccgggcttcagtttcccgtaggccgagtgcatcgcctgctccgcaaaggcaactatgcggagcgggtcggtgctggagcgccggtgtacctggcggcggtgctggagtacctgaccgccgagatcctggagctggctggcaacgcggcccgcgacaacaagaagactcgcatcatcccgcgtcacctccagctggccatccgcaacgatgaggagctcaacaagcttctgggcaaagtcaccatcgcacagggtggcgtcctgcccaacatccaggccgtgctgctgccaaagaaaactgagagccaccacaagactaagtaaagaccgagttgaaaagcgcataaaaacaaaggctcttttcagagccacttcaacaatcataaaaagatgacacgagtccgttttcagctgcttcaccactacacagtacactcatgatgtttcggtgttaatctttaacctgtttacattgcctgaatttcaaggttttttttttttttttttttcttaatgtagatactaacaaggtacgtttgctaacacgtgttttcaggggttttaccttggtggccaggctggtctctgactcgacctcaggtaatccacccgcctaggcctcccaaagtgctgggattacaggcgtgagccactgcgccaggccagtttgtggtatcttgaaggcattttactgggacacaactttgacaaaagtcaaagcctcttactgggagttacatagtaggtactggtgggttttatttatgattctgggaaactcactgggctgtaaggaatatagtatagtattcggtttttaatatgcttactagaaaaagtatatggattgctactagacagtgtgtttctctacagtttcacagtctctagattgaaaactgagggtagagtcctcagccctatttcctggcctctaggaaaggagctgctcaatgggtatatttaaacaaaaccagacagttttatgtttaccaatgtatacattggtcatgttttgttttctatttttaatttttgcacttacaagagtttggaataaaaaaaaattggccttagaagttttctaattaagggtctttcaaacatatacatgttcggcagtgacccaataattacatgtatttatgttagtgtactgctgaaatcacatgttaataatagttaacttcattgtatgtgttctgatatttttctgtttaattctgtatgtaattaacctttttgtacctgggtgttatgttacaaatgtatcctgtaaacacttacaattagtaagtgagttaaatacttagtaactgctggataagtagatggccaagcatagtagtccaagctggtgatgttcgatggtaaggttggttctgaatacttattgattccaagagcactagtgggtgaatacctacactcagaaaaaaatatctcttctgagaaaagccaaaggctattttgagaatagtgaggtcagttcctcatgttatctttttttttttttttttttttttttgagacagggtctcgctttgtcacccaggctggaggacagtggtacgatctcggctcattgcaacctccaacttctggacacaagcgattctcccaacgcagcctcc

SEQ ID NO: 585267 - DNA, 4001 bp, Homo sapiens
aagtgctaggattacaggcatgagccaccatgcccagccatggttttacttctgagtttaaaaaaaatgttattatatatgaaccttctgagacttacatttctaaaattcaaccaggtactgtgtgtacctcaataaatgcattattttgaccatgaacatgtagttgcctctagtatttttatctattaaaaatggcattttttccattctcatatgtctcctgttgcatgtgtgcaaaatattctttcatgtaaacagctaggaatcgaatggttgggtcactggagtacacttactggataaaaaatattatcaaaaaccttcagcaaatacaatttgatgtggaagagttcccacactgattcttggcaaagaccaaaatacttttaaatatgccactcctaagtgtttaaaatgaagacactcattttgatttcctgagttgggggtgggggaaaacaatggagaacagcccttctcctcctctatttttttttcttttaacatttcttccaattactagagatacagtaaacgcaagtgacacagacaagaaaacatggagcagaccctaacagaaaaagtagggaatagaaactatgttcataaataggaattccacacaagagaattatgggaatgagtaagacagcaagattcctccaaaaaacctgcactgccaagaattttcccaactagaacactcaccagagaaaacggtggccaagtttcaaactgccctcgcagtgtcgggattggccattgacatcaactcagcccgattgacgtgtacggtgctgtaaactgggttcaaacttttttctactgcctttctatcttaatatttagcaaatccaaactggggacaagggaggagaaacagcaccactctcaaaacaaacaagtcgatttgtacgtttgtgtgtgtgccaactgcttcattactaaagtacacatgaagtttagggacagagcgccggaagcactgtggatattttaccagtgacacttaagtattatattttctttggggtcaacaggaactgaattttccctttactaggtttgtctgatgataaacctcatccttcttcagatataaaattgtctcaagcgttgctgcaacatgcagtacactgcagtgctaattaatttcttttctttttctttcttttttgagacagagtttcgctcttactgcccaggctggggtgcaatggcccgatctcggctcactgcaacctccatctgccgggttcaagcgattctcctgcctcagcttcccgggtagctgggattacaggcgtccgccaccacgcccagctatttttttgtacttttagtagagacgggtttcaccatgttggctaggctcgtctcgaacttctaacctcaggtgagccacccgcttcggtttcccgaaccgggattagaggcttgagccaaaattagtttctaacaaggctaaaggaatcttggaaatcgtctttgtagcaagtaagaaatacctgctgtaagaacagtgagtgccagttctctttgggaagactgagtggctctgaaaagagcctttggggtgtgggccgagactgaccgaacgttccgcggtgggcgggctcacttggaactggtgtacttggtgacggccttggtgccctccgacaccgcgtgcttggccagctcccctggcagcagcaggcgcacggccgtctggatctccctggaggtgatggtcgagcgcttgttgtaatgcgccaggcgggaagcctcgccggcgatgcgctcgaagatgtcattgacgaaggagttcatgatgcccatggccttggacgagataccggtgtcggggtggacctgcttcagcaccttgtacacgtacacggagtagctctccttgcggctgcgcttgcgcttcttgccgtccttcttctgggcctttgtcactgccttcttggagcctttcttcggggcaggagcggactttgagggctcgggcatgactgggagtaactgccggaaaattggaggaaaaaaacaggaagacggtagctctgtcaacctaccgcttattcactgcttcttaacgcaagtggggtagagaatgaagttgtgcgtttaaccagtggtgagtcctggaaacgtatattaactttgtccaatcaaaataagtgtttttcaaaaccgcaatcccattggttaaagcgaaactgtaatgttagccaatagcacagcttagttttcgtgcctctgttgactataagtagcggagctttagcgttacgtcagtctcaggaacgttactgattgaattttttacgtcatgtcgggacgtggcaagcagggcggcaaagctcgcgccaaggctaagacccgttcttcaagggcgggtcttcagttcccagtgggccgagtgcaccgactgctccgcaagggcaactacgctgagcgggtcggtgccggagcgccggtgtacctggcggcggtgttggagtacctaaccgccgagatcctggaactggctggcaacgcggcccgcgacaacaagaagacccgcatcatcccgcgccacttgcagctggccatccgcaacgacgaggagctcaacaagctgcttggtaaagtgaccatcgcccagggtggtgtcctgcccaatatccaggccgtgctgctgcctaagaaaactgagagccaccacaaggccaagggcaagtagcggggctggagcagttcattactcatacctcggtccaaaccaaaaaggttcttttcagagccacctactttttcaccaagtagagctgtgttcagttttatctgatagtcgagtcattttgcaatggcactggaatgctgtatggagatgaagcaaaactaaacggcttttacaccacattgttttgagatagaaagtagacattgaaatgtttacggtacatcaagaaatttaggcgcggcagctcgcgcctgcaatacagctgaaacaataagaaaagtgaggcaagagaataacaaagggagctgaaagttagagggcagaataagtaaaagcaaagggcagaagtaaggtagatgggcgggtgaacaagaagcgagataacaagcagtgaaccttttgcagccgaaacaaaagagataatgtgagcaaggacctcgtggccggcaagatctggaacaaaccagtttaagaggcagctcttcagagatgggcatgcgtattagagaggaaaagtatccttaacaaaagcccgtatgataatcagctacttaaggttcatgcatatgggctacatatcatgcatatatttaagattataagatagaggcacaagccacagaggacaaagtaagcaacaaacctatcaataaaagggcagatgctggctatagattaggcagcactgggaacagaaaacatacacacacgcacgcacacacataaaatgactcaaactacagcaagctgacgctgatctcacctcgcagaggtcagtccgctctctcccacccccgagagtgtaatactctgtttactaaacttttgctgctttgctttgctatctgtgtgtgtgtcgtccaatttctaccgggcaccaagagcctggaactgtttggcaccatccggtaaacagaaccgctttgggaagccgaggcggaaggaccgctagagccttggagttcgaagccagcctgatctttacaaaagtaaaataactaaccgtgcctggcgtctcatagcctgtagtcctagctactcgggaggctgagaccagaaggatcacttgagcccaggagttcgaggctgcaatgagctatgattgcaccactgcagtccagcttgtgtgacagagcaagagtgtttcaaatgaacctagtgtcagatatttactttctgtattacagaggactgaaagctagctaaataatacttttcagtgtacctgggttccagagataaaattggtaaactaacctttgctccttacttgggcttttagttt

SEQ ID NO: 585268 - DNA, 4001 bp, Homo sapiens
tggggaagagaacattttagggaagtgaacggcaaatcctacaatgtattttgaacgacccactaaccaattggcataattcggggctgtttgtcacctgtgacagagacgagactattcgtccgagatagccttccacccatagctgcaaaggaagtgacgtcaggaaaataaaggaaaagttaaggggtgattttaaagcctggagtggaattgtggaggggcttgctattttgctgctaaagatttacaatagaagtaatttattgaagaggggataacgcagtggcagaggatgcaatgctatgagaattcaggcactgttgagaagaggggatcatgccttgaaaagtctccactcccttgtactcgcacgctcttggtttacctcctatttctgtgatctcttctggggtccgcttctctttaaacgcggggttctccaacttctatctcaggattcctaatcatggactttaaaatcccagcctgaacgctgcccccgccccagctaatcctggcacacctccctccccaaggccaactgattaacattgcaaaaaagcggctttcccaagttgccaggttctttgttcaacattttatcctaaaggagcttccttagcctttaatgtttcccgtcccgctttgacaccaataatttcaacccaccctaacatatctgcagcgatgccagacgagatgcctattctctaaagtgtatggaaaatggacaccggtaagtcaatgtcacccaggatccgtacaactgcagtaagagggacggttaattcacagcttccagctcttggcgccagagtccgatgcactcctgcagataacggtcatttccattccgggagaacctcttcgaaaaacaacccggatgagactatctggcaaattgcagcccttggcgggcttttcaaatagagcgttgaccaatcaaagaagggggacgttacaggcactgaaagaataacccggccgcgcgcgatggctcacgcctgatatcccaacattttgggaggccgagatgggtggatcacgaagtcaggagttcgagactagcctggtcaagacggtaaaactccgtctctactaaaaatgcaataattagtcgggcacggtggcgggcgcctgtaatcccagctacttaggaggccgaagcagaattggttgaacccgggagacggagcttacagtgagccgagatcgcggcactgcactctatcctgggcgacagagccaagactccatttaaaaaaaaaaaaaaaaaacaacacaaaaggaaagagtaaccgaaaaccgaaagcaaacttgtaattatagcttaaagcacaactgcaagcctttttccccaagggtatctaagaacccaagctaaatttgtctgatggagcgtctatactcacacgcaaaaagcctagggagcttagcttaccttttcccgccgtcttccctcctaatggaggccggccggagtccacccaaaagactacaagcaaaatgcacaggctctttctctggaagcgtgagtggctctgaaaagagcctttggattgctggcagctgcgagagctcacttggagctggtgtacttggtgacggcctttgtgccctcggacacggcgtgcttggccagctccccgggcagcagcaggcgcacggccgtctggatctccctggaggtgatggtcgagcgcttgttgtaatgcgccaggcgggaagcctcgccagcgatgcgctcaaagatgtcattgacgaaggagttcatgatgcccatggccttcgatgagatgccggtgtcggggtggacttgcttcagcaccttgtacacgtagatagagtaactctctttgcggctgcgcttgcgcttcttgccgtcctttttctgggccttggttacggctttcttggagccctttttgggggcaggagcagatttagccgggtcgggcatggcggaggagagtgaaagagcactcaaataacaagaatgaggacaagctgggttatgccctatttatttacaagtctatatgcagatgagattgagaaattcttctgtctgattggaagttactcagatgacgttaatatcaatatagtccaatcaaaacacgtatattcagaaagctcatttgcattaagaggaagctgcaagcttagccaatggcccagcttctttttcgcgcccagcagctgctataaaatgcgcgtccctgtaggttcctttcactcactttctgacttaggccacaggtcgttttaccatgtctggacgtggcaagcagggcggcaaggctcgcgccaaggccaaaacccgctcctctagagctgggctccaatttcctgtaggacgagtgcaccgcctgctccgcaagggcaactacgctgagcgggtcggggccggcgcgccggtttacctggcggcggtgctggagtacctaactgccgagatcctggagctggcgggcaacgcagcccgcgacaacaaaaagacccgcatcatcccgcgccacttgcagctggccatccgcaacgacgaggagctcaacaagctgcttggtaaagttaccatcgctcagggcggtgttctgcctaacatccaggccgtactgctccccaagaagactgagagccaccacaaagctaagggcaagtaagggctgaactttaaaaatgtaaacttacaagacaaaaggctcttttcagagccacccaccatttctacggaagaactgagcactctgttctccaaacctatcagaaatttgtggccgagttcaagcactgaggccattactttcctattgggtaaaataaaagtattgaatcaggcctagtaaatactatccaactgctaccttataacatgaaggaacctccttaattgtcccctccccacaaactgtcctgggtctttaaaaaacttggggccgggcgcggtggtttatgcgtccttagcattttgggaaactgaggcaggtgggtggggaggggagaaatctctagggacctggagttcgagaccaccctgataacgagacccctgcctcttaaaaaaaaaatgactgggcgcggtggctcacgcctgtaatcccagcactttgggaggccgaggagggtgtatcacaaggtcaagagatcgagaccacccaggcaaacatggtgaaaccctgtccctactaaaaacacaaaaattagccgggcgtggtggcgagcgctactaaggagacaggcaggagaatcgcttgaacccaggaggcagaggttgcagtgagccgagatcacgccactgcactccagcctgggcgacagagcgagactccatctaaaaaaaagaaagaaaaaaaataccaggcgcgaggccctcgcctgtatttggcggactgacagcagaaggaacacttgagtcccaggaatttgagatttcagtgagccatgacctcgccactgcactccagcctgggtgacaaagcgagaccccgtctcaaaaaaagaaaaacaaaacccaaacaaaagtatttctggtgatcatttgctcctgtgaatataataaatgttaaactaacctttttgttgtctttatgggtctttatcaataccagaacctggtagttctttgatcaactaaaatctccatcctaataaaatgctgttgtcagaactacccagattcactggcaaaaatctaatcactgacccaaacctgtaattccgcgcatgctaatgaaattaagcaataatttacataattaatccaatcagccattggattgcattaaactcagttaatgaagaggtcagataccatttattggtatcatttagtcaagcacctatcaaactccttccccacaccacactggacaaaactaaagttttggtgttttagagaatgtgccagcctaagtttaaattgtttttgttctgggtcttggtacagtcattaaaagatttaattaagcagttacaaaacggaactactttttgga

SEQ ID NO: 585269 - DNA, 4001 bp, Homo sapiens
tgctctcagtacatgattgagggatacttaaatgtctctgtgattttatttcataatcgctaaaagatggtttttttttttcctaaaacagggtttttgttttttctcaataagcttcttagcttcccctccggctccctggcttgcctcaggaaatattagctcatcagttctgattggttgacagctacgaatggccctcattgattgggcagcgcttctttgtcccttggaaactaatacaaatttttaacactactttttttccactctttcttcagagttggaatatcgttgctcccctacccatatgtagtgagtggagggcaaacttggagttcccctaatctttcctttttaggatgtcagctcagtatcattcatcttaattacacattgagcttcttgacttaatggatacagctcttcttttgtttagttgggcggccctgaaaagggcctttggttcagaaatgcaagctgtggagaaatcagcaaccttaaccgccaaagccataaagggtgcgtccctggcgcttaagcgcgtagaccacgtccatggcagtgactgtcttgcgcttggcgtgctccgtataggtgacagcgtcacggatcacgttctccaaaaacaccttgagcaccccgcgagtctcctcgtagatcagaccagagatccgcttcacaccgccacgccgggccagacgccggatggccggcttggtgatgccctggatgttgtcacgcaacaccttgcggtggcgcttggcaccccccttacccaaacccttcccgcccttaccacgtccagacatgacttcccaagaagtgaaccaagagcaagtgagagaataggaaaccgatctttatatatctacgttacccctgcccccacctccagcggacactgagactgaaaagcgcgcaggcgggaaatgtgacgcctacagtccgctcctttaacccctcctccaagccccaggaaatggcgggagcagcgattgggggagggtggggagatgagggtgggaccaagcaggcttgaccaatggcctttattttcttaacagagctacaggctttgaggaactgggttaagaattaaatgtaaacccattctgactccagaattattttaagtcgaactttttttttaaccgaatctctctgtcgcccagactggagtacattagagccatctcgattcactgaaacctctgcctctcaggttcaagtgtttctcctgcctcagccttcagagtgtagctgggattacaagcgctcgccgtcgcgcccggcgtgtttttgtatttttcgtagagacgggattcggccatgttggccaggctgatcccgaactcctgatttctggtaatccgcccgcctcagcctctcaaagtgcttgaattacaggcgtgagtcaccgcgaccggccgaaatcgattggttttgaagccttcagtagcattaaaacgaaaagtgctcccaatgcattcccttttgtcttaaattggtttcttacagctactttacttgaaaaggtggtggctctgaaaagagcctttgcttggaccgtcagagagaccacagtaatcacgccctctctccgcggatgcggcgggcgagctggatgtccttgggcatgatagtgacgcgcttggcgtggatggcgcacaggttagtgtcctcaaatagccctaccaagtaggcctcgcacgcctcctgcagagccatcacagcggagctctggaaacgcaggtctgttttaaagtcctgcgcaatctcgcgcaccaggcgctggaaaggtagtttacgaataagcagttcagtggacttctgataacggcggatctcgcgcagagccacggtgcccggccggtagcggtggggctttttcacgccgccggtggccggagcgcttttgcgggctgccttagtggccaactgtttgcgtggcgccttgccaccagtagacttccgagcagtttgcttagtgcgagccatgacggaaaaacagcacagcggaacacccaacactagcgcaaatacgcccatgagctgctctatttatagtgtgtaaagtgcagtgattggatgatagaagacgctaaatatgacgttacacactctgattggtctatctttaagccagcaacaatcgtgcagtttcaccggctactatattctattccaactctacagatgattatttaagtggtattttattactactattattttattttacttttgctttgttccccaagctggtcttaaacttgggctcaaaggatcttcccgcctcagcatccagagtagctgggattacaggggagccccactgcgccggcttggactttaattttttaaacttgtcctcttctacatctggttttcataacctgaaggctgtgtttattttccataaaacaaggcattgattccaaaggtattataattccccaattccgtataaccttcagctctttaggaaaaaaaaaaaaaaaaaaaaaaagagggaatactgctcacctcctctccggaaatgtaccctttacgggaatttctgaaacctttcacaagaattggattcctttgtaatgctttaattgacttaggagtgttattgaaatctacaaagcatctcaaacatagtaggattacactattactcagaaacattttctatgagacgtctttctcttgattatgctctttgaatcctaaacttgcagcgttctgcagcttttgttttctaaagcctaggtgtactctgccagtcacaaaatggcgtttctccagcactgccgccaggtaccaccagctgggagttgttcctcttgcggagcaggaggtggacttggcccaagagaaactggatagtggttcgcaaggaacataatttagcattgccaagagctaatgcaatcattttgaaaatctcaaaacactgaaaagtggattgtgacctttttaaattcacaagagacaggccacattctatcttttgattggtttaggctattttcttgaacagccatttagaaagcagatctatcatccttcatttgcatggagcgttcccattttatttgaaaccagtttaacccaatagaaaaaagggaggcagaacccattatttaaagtggaaactcctgaatcagataattaggagtatttccttttcaaaagttgcgttttttcagatacctcgcttattacactaagaaaggtttatatctttcacaaagggtttacttacaaaaatcttccaattttgtatacctgtgtttcataactgactagccgtcaaaccaagatgtagagtttccaaccgttattttccaaatttttagaaattacgtgaaatatttgaatgcatgccttctcaataaaatgggacgtaggaagcactggtgcagaagatgggtacaatacttatctgggaccactccattatttggttggcacgttgtttgaacaaaaaggggaaaagctcaggttacttagcatggttcggacttatttgaaaactaccacagcaggagcggaaataagaccgcattacctcactctctgctgtgctgtgctagggggttatccagaataggattgtagaagtggatgtcgatttaatagttttttattctcccattagctgagtctctgattggcaatgtgagatcgttttagcttattgatactttgaaatgcacttaacagccacaaacaagttaaagggttgttaccataaaatcttatccccagggtgtgcttgcatttatcacccgtgtttgctttcacactaagtggacttaactccccagcagaatgcctgtcagggaaccggtttcgtggacccagcatttaacgcctttcgcaggcttgtgaggcccataaatatttgttgaataaaagaatgagttgaccatgtcatggtgcgctgattgcgtgtgctgacatggaacacaggttgtaaaccttaataccaatttggggcatgt

SEQ ID NO: 585270 - DNA, 4001 bp, Homo sapiens
atcctcagacagtaatgtaactttattcttttatgctattcgtcagacccagtacctccaacacatttgtttcctacagataaagaaaatataaaaagtcaagcgctatacatcagatccagcacatctataactggaaaaaaaatacttgaccttcagctgggcccagagcttgtgagtagtcaccttggcatagaccaagtccattggcatctctaacatatctatactgtctgtggataacaaatgtctatgccagttagagtcgcttgtataagagtcaagaaaaacgaatcataaaacaaactgacatattcattttcataatttttaaaatgcaaatattactttataaaccaaaaactgccttattaaaagctggaacacaaatgaatttaagtaaacgatgcaattcaaatttaatcttttgtgtgtgtgatttgttgttgttgacagttggtcaggcgattttagtatggtacatcagtttacattctagatgtaggccaagaaagaatgttaggtgtaaaaaatatttattgtaaaaaagaatgtgaggcaaggtctttggaattagtagttttaatgttggacattctgtggttgttctaaagttagtctgtaaaatgtgatgtaaaagctatatgataaaaaaatacaaaatataaaaattttaaagtaaatattacttttgtttgcgtacagtattcccatccctctaaattttcttccagtactcaatccccaacctccaaaaccgaaaagcaagatcaacagaaagaaaatggttaaaacttgtaaattctagattttaataactacaggcaagaagtactgaaaaaaagaatgtggcatgtcatggtgcatagtcctagaggagacaaagcaatgcaaccagatagactatttacaagcaaagccacacatataaaaattcatatataagggattaaattatgcttggtcgacagactgacagatttaaagtgggtagctagctatggataaaatgagagccagttagatccctgcctcacattttgcaccagaataaatttcaggttaatgttaacagccaaatgaatttaacagtatatatatatatatatatatatataatatatgagaaaacctaggggactatgtattgagctgagaaaatcttcctaagcattttgaggaagacactggaactcgcaagacacaattttctaatcttttcaaagctttgcaaaaatgcctagtaagcgccagttaactacttaccagatttttcccttactcttacaaagttgtttaaacaaatgctaatcatagcaagctagaggcctgaatgatagtggacttacacagcttctctccaaatagcaccttaataaggtcagaaataacctacactgcaagactgaccaaaccgttatttctgttaatcaactttaagaccatagtctaatgctttccgggggggtccttagaaatttgttctgttaagacaacaaaaaattatcacagctactttcgttggaataagtgggtggctctgaaaagagcctttgggttttaagactgatgaaaaagtgactttacatttacgctctttctccgcgaatgcggcgagcgagctggatgtctttgggcataatagtcactcgcttagcatggatggcgcaaaggtttgtgtcctcaaagagccctaccaagtaggcctcacaagcctcctgcagcgccatcaccgcagagctctggaagcgaagatcggtcttgaagtcttgggcgatttctcgcaccaggcgctggaacggcagcttccgaatcagcaactcggtcgacttttggtagcggcggatctcgcgcagagccacagtgcccgggcggtaacggtgaggctttttcacgccgccggtagccggcgcgctcttgcgagcagccttggtagccagctgcttgcgtggcgctttaccgccggtggatttccgagctgtctgtttagtacgagccatggcaaaaccacagaaaagcttgcctgcagagacgtctgtggaggaaaggaaagagctactcttcttttatagagtcagaccaccaactattggacccaagaaaattcaaaaatccccgcgcccttcttggattggtccatctctgtgcctggttgcagattaagagaggctcctgcccattaccgtagctactctgacgtcattttgttaaccccttagctgctatatccactgtggacaagtcttgtactggaaaagtttcctgaagtcttaaaatttacaaccacacaaagcaacgcggaaacctccaattgtttctagttaaaatataaaaaagaaatcagagaatattggagacgattagggaaatttgcatatgcgctttatttaaaattgtatttttctgggtgtcgcataagaagtgtgggcaattagaaaaatgctcttagccgggcgtggcggctctcgcctgtaatcccagctactcagaaggctgtcaagaggatcgcttgagcccgagttcgaggttacagtgagctgttatcacgccgctgcactgcagcttgggcgagagggagactccaccccaaaacaaagcaaaacatccccaaactggaaaaaagctcattttgggaaatacatactcaaatgttcagtggtaatgtgtgtgctctcaattgtgtatgccattaattgctacagcaaatggtatgacatattcaaacttgtgtggggcatgcgggttttaacacttccattcaagatagttaggaatgcactcatgggtataatttccttcctctaaaatgtagtaactgctgtgtgtgaaacttaacgcgaatcacccctgtaaacatgttttgtgctgcatggcacttctcccacatacctagaattcctgaggtttctatggatctaatttctgcaggacaaattactaaaagtgccacactcaaagccattaaaaacacctcaaaaacatctttatgggcggcataatccaaagcacaacagctcatttaatggaagtcgtaggtggctctgaaaagagcctttgctgttaggctgattttgtctgctgacagaaaaacagcagtgcatgaagcgttaactcttcactttcccttggccttatgatggctctcagttttcttaggcagcagcaccgcctgaatattaggcaaaacgccaccctgcgcgatggtcacacgccccaagagtttattaagctcctcgtcattgcggatggccaattgcaggtggcgcgggatgatgcgggtcttcttgttgtcgcgggccgcattgcccgccagctccaggatctcggcggtcaggtactcaagcaccgccgcgagatacaccggcgcgccagccccgacgcgctcggagtagttgcctttgcggagcaggcggtgcactcggcccacaggaaactgcaaacctgcacgagaagaccgagtcttagccttggcgcgagctttaccgccttgtttgccgcgaccagacataactacttctgataagggaaaatcgccacaagaaaatgtaatgaaactacattagaacgcaaggcagagaagtatttatactgactggaggtaggctgtgaggaattctcccattggctaatgtcaaatacccaatgggaaatcagaatctgcatccttcatttgcatgtaatccttccgtctggtgtaaggtttatgtttgacccaatccccagtctggcttgacgagccttcgacttgaatactaataataattggccgaattaggattttgtcaaaataccttttttaagcatgagtggaggttttgttctggttattttgactttcagccgctcgtgcttttcccggattgtgactcatgtttttggaaaggagtggactccgaccaatttctaaatagatatttaagaggtccttcaaatcgggcgcagtggctcatgcccgtaataccagcactttgggaggccgaggacggcgggtcaggcgttcg

SEQ ID NO: 585271 - DNA, 4001 bp, Homo sapiens
caggagatcgagaccatcttggctaacacggtgaaaccccgtttctactaaaaatacaaaaaattagccgggcgtgttggcgggcgcctgtagtcccagctacttgggaggctgaggcaggagaatggcatgaacctgggaggcggagcttgcagtgagccgagattgcgccactgcactccaacctgggagacacagcgagactccgtctcaaaaaaaaaaaaaaaagaatggcttcaaggaatgttcctactgctcactggaataactcacctaaattcctggcaagatgcaggtctagataaaatgttatgacatctaagtattcaaaacacattcccagcactgagagtgagtgtctagtggagagtagaaacgtatagagccagaagctagtctggaaagaattcttacaaagtttacaacttacatgtgaaaggagcttaacagaggattttccaaatttgaaaacaatcctaaaaacttacttgacattaccaataatgtgttttgaaactgaaatacttctaagttatgaagaaaacatattatcatcagccaccctggaggaaagattgaattctatttccattacctatagacaacattacaaaataatttcgatctgaagatggaatcagagtattcagtcaaaactacaggaaaatatacttggtagtgtcatattcagaagttaataaaatatgctattttctgaattttgtgatggctgttgttttgtcagcttttataaaattggaatttgattttattttcccattataaatttatatttacagtctgcagtacttttgcatttttaattttacattatagtttttaatagttaacaagttgtaaaaggtttgatccccagaaaaccttgatctaccccatcagttaagtatactaatatatttagaaaatggatgaaatcagcatttgaatatttttaaatatttattaaaagaggacatgggtaaaagagctttgcagttgccacccttcattctcaaattccctggataaggatgaccgcataatctttggatggtcatacgcaagtcttgtgtacttgttacataaatctatttagtggacttttggcagtgtgtactgaggccagtttcttccacctgagctctgactccacctccagcagcccaaaaccaatactgaattttggggtcagctattgtttttgtggacttaggtaactacacacacattgtctttatgatagctttaataatactgccatcagaactaaaattgtcacgtggattaaaaggagtgacggtggtgtccccaggagcctttcaatatgtaagtatttacacatatacatgctaaaaagacccctaggaattttttaacaagggcaaaacagtaactcagcttgttttctcgcagtaaaaccggttgaaaaggcctgatagacttgtctgcagttacaaaacttgtgtgtagttatcacctttatatctcctggaaactaacatagacaaccgaatgggttacaactgtttttaagtgaaattgtgagtggctctgaaaagagccttttcaatgaggaagaaacgggcagacttatgccctttccccacggatgcgacgtgccagctggatatctttgggcatgatggtgacgcgtttagcgtgaatagcgcacagattggtgtcttcgaagagtcccaccaggtaggcctcacaagcctcctgcagcgccatcaccgcagagctctggaaacgcaggtcggttttgaagtcctgggcgatttctcgcaccaggcgctggaacggcagcttccggatcagcagctcggtggacttctggtagcgacggatttcgcgcaaggccacggtgcccgggcggtagcgatgaggtttcttcacgccaccggtggccggagcgctcttacgggctgctttagtagcaagctgcttgcgcggagctttgccgccggtagacttgcgagctgtttgcttcgtacgagccatttgcaatgagagcacacacaaaagtgtagtgaactgagagcaagtggcctttaaatatagtgagaaacattctgattggtcctgtaatatttcaaaagtcccgcgcgataaaatcattggctgaagagtgaccagactgattggttcattactagacaatcttattggatgagttgccccaccgcccatcctgtccttttcgtttcagttatctgcagcgacaaattgtctaaaattctagttcatccagtcccaaagaacagagtgtataacaaggtatctaaggatttttaaaatgtaaattccgattcagtaagtttgagtgggacttgaaattctgcattcctgacagtctcgcaagttatcaatgctggtgaacactcactaaaccaccagaaacgttcagactcatgtcgggaaataacgcttatattcagagaatgagattccatgctattttgttactggcgaacagcaagtttccttgccctttgttttctaagtccaagtcacattcccaccctgcctgttctcaaaatgtcttattttggttggccttaagtttcactttgtatactctaaaatgtactttctaaaggaaggtgttattttctcgaaacttaactttttaacaccattaggctaggggggcggtggctcacgcctgtaatcccagcattttgggagggcgagatgggacgatcactagaggccaggagttcaagacaaccctggctaaaatggtgaaaccccgtctcgcataaaaatacaaaaactagctgggcgcggtagcagacgcctgtaatcccaagtacacaggaggctgaggcatgagaaccgcgtgaagcggcggggtggaggttgcagtaagccgatatcgcgccgctgcactccagcctgggtgacagaactagactgtctcaaaacaaaccaatccaaacgaaaagcaaaaaataccctaacagaagcaagttatcatcctttcttgtgtaactatggacggctctgaaaaatgccgtttcaagtgtaagctacgttttctgatttgagtgtttacttgaccttggccttatcgtggctctgttattttggcaacaggacggcctgaatattggacaggacgcctccctgagcaatagtgacgttgcccagctgcttgttgacctcctcgtcgtttcggatggccagctgcaggtggcgggggatgatgctgcgggtcttgtcacgtatggcgctgcccaccagttctaagatctcggcggccaggtattgtaagtacactggcgcaccggctccgaccggctcaaaataattgccctttcgaaaaagatgacggactctgccctattgggaactgcaagcccggtagcgacgaacaagtttttgctttagctccattttccacgtccgcaaatagcgacctatgaaagcagcggaaaactgtgaaagacaagcaagctggaatggcgcctgaacaaatccttttatacaaactgcaaggctgcaataggaagctatcctattggtcaattatgtttggtgctttatccaatagaaaaagataacataaattccatatttgcataaaccccacccctcagtgaaaccgtgtttcttttgtccaatcagaagtgaggaatcttaaaccgtcatttgaatctcaggactataaatacatgggctctgaactgttctctgtactactctgtagtggagagtgttagtagcttttctattctgtttaggaatagcaatgcctgaaccctctaagtctgctccagcccctaaaaagggttctaagaaggctatcactaaggcgcagaagaaggatggtaagaagcgtaagcgcagccgcaaggagagctattctatctatgtgtacaaggttctgaagcaggtccaccccgacaccggcatctcatccaaggccatggggatcatgaattccttcgtcaacgacatcttcgagcgcatcgcgggcgaggcttctcgcctggctc

SEQ ID NO: 585272 - DNA, 4001 bp, Homo sapiens; identical to SEQ ID NO: 585245

SEQ ID NO: 585273 - DNA, 4001 bp, Homo sapiens
agttaggctgttttcctcacgcactgaatctccaattcacaagacccacatcttcatgtctgacaggcttccatgaacaaaaatttcttccataaatctccaggacttcttactatggctaccttggcctgcagagctatttacagctttgtcactattaattttaccacatgactaacctctttccttagtgcaactagtgggaaaagagcacattcaaaaaagttagtagaaatttctcaatgagttaaaaatactgcaccccatatcaaaactgaggaatttgctgaaatgtttaaataaacaaaattcttccaaatagcatgcagtatcccatatagtacatacacccttctgtatttccaaataacagcctgtatgatttcgtaacagaattccttattttccttcccttcacctaccagtttcgaagctgtgcctttgtatggaaaggaaaggcagaatattttctgtaagaactttgaagccgtccaaggattttcatgttttgttgataaatatggggtacttttaatgagatttgattaagacagggtatttactaaagttgaaaagttcttttaagatatcagccggaaggccgggcgaggtggctcatgcctgtaatcccagctactcggaaggctgaggcaggagaatcgcttgaacccgggaggcggaggttgcggtgagccgagatcgcgccaatgcactccagcctgggcaacaagggcgaaactccgtctcaaaataaataaataaataaataaataaataaataaataaataaataagaaaagaaaaaagcaaacaaaagatatcaactggaaagttgaaaaggctcatgatttctgcattttcctttcgcactcaggtttgagacacacccatctgcaccttcgttgctttgactcctgcagtttagaacctatgcaaggctgtcaagtctgcaagagctgtgtgttagtgccacgggtctaggtgttccagctaataaccttagccttagaccagtatcaggcgcacagagagtaacgttgaccgcacccaaggcaccgaccgtcgccggcaagtagctgggtctcaaaacactagtggagtaaggcagcctgatgcagatcaaaagcgctggcccctcgggcaaggtcaaataaacatcaaggaaaggcaaaaccaaggcgttgaaagcctatgcagttaagacctaaaatgcaggccaccacatgaaagagcgttgagccagaaaacaagaggatgggttaagcagggtacaattaagtggccaggagtttagaaaacgagaacaatgtacaagaaagcagcagagggcctgaacagcaaaacaaagccagctaaaccaatggagaacagcgtagggaggcccagccctaggcgaaaacctgagggagcgcttaaatttggaaatttaaatgaagcatcgagggaactgaatgccactatttcaaatgtctatttggatcagtgcagtttagtggtctaatgcgtctcaaaggattacagcccttttcacggacaaagtggttggctctgagaagagcctttggatttaaggtttgtactcaaaacaattcacgccctctccccacgaatgcggcgggcaagctggatgtctttaggcatgatggtcacgcgtttggcatgaatagcgcacaggttggtgtcctcgaaaagccccaccaagtaggcctcgcaggcctcctgcagcgccatcaccgcggaactctggaagcgcaggtcggtcttgaagtcctgagctatttctcgcaccaggcgctgaaacggcagcttccggattagaagctcggtagacttctggtagcgacggatctcgcgcagagccacggtgccagggcggtagcgatggggcttcttcacgccgcccgtggccggagcgctcttgcgagctgccttagtggccagctgtttgcgcggtgctttaccgcctgtggatttacgagccgtctgcttagtacgcgccatagttcatctgcaaagtaaatgagttaggaagattggtttgcccctctatataggaacagaatcactctgattggattgtggacgatccctgttagtgatcggttgctaaattccggaagtggccgtagagattcacgattggtttattttttcagtgcaagattctgattggtaaatttggatagagaactggctctttcaaacaagtcgttttccgttacaggtttctttgatgtttcacgtagaccatgacctgcaaagacattgatcatttaacttaatagactgatctgttatcctgtttagctataaaaaatcgaatgtgtttgcgttagaaagtgctttagaattttttttccaaaatctccgctgcttttttctgcattttcctgaagtttttcccttccttattcactcatttaaaatccgttgcctaagtatctctcaatgattcctcgtttcattatagagtacaaggctaattcactcaaacaaggttttctaagatacactgttaagcataaggaactttgtgtttcatttgtgttatagtaaaattctaatatcctggaatccctacctctgtaatatcgggtttgactcaaagaacttaacactattatttcgttttgttgaaattaaaacgtccagacataatggcaagagccgtcaaaaaaagtattttcaatttaaaatcttgaaaaagatggcggcgaagagagtgttagaaggttgtttctctgtaagacaacaatggcgcagtttctccggatccctgcgggagagagctgaggtgcaccgaacaatttaagacacatccaacagaacttttataggaactggactcacccaaataacaggacttcttaacttggttttcgcttccacactcaacagctcccaattactttgaaaaagtaacaaatgtttactggaaaagattcttaaagaatgacattacagcctaacactattgtgaattaacctatcggattccctgtaaggtgttcttttcctagccaataaaaagagcagtttgggaattcctaatttacatacttttaatctattggctactttggttcaggcagagttttgatttacaagttcgcgtttgtgtaagcgtactataaatatttcagagagggatagtgcgcgtgcgtgcccgttgcaaggtctagtttctttttgtttttctttcccagtaggttttctttctcattggaaagctattttgtaaagtgtagcaggttcgcaatgacgctggcatgtagtccaaggcgattgacatcatgaatatgctggagcccccgtcctccagggaggggaaacggctaaaccaaatttatcactgcccgcaaatgcccgcggatgtctgcaagctggagtggagaggagacaaaggatgctttgtgcattcctgctcattccctgaattctgttaaacctgccctattttagggcattcatcaaaattctgctaaccacaggattgatacaattgcacctttcaagttagtgtctattttgcaaatttgaattatcttaggactcgtgggcaagtcttgactgaaattacacattgtcgtgcgtttcaatctcacatctgaaatatatatgagtcccttgcttctctccttttcagaaaaagaaaattctgtacactttaaatcacggtaaaacggttaggtatgttggcaaaattgtttcataggaagcaagggaagaactgaaatccttttgtataatatgattacgtatttgtgggctgggccgtttgttaatgagagctatgcaccccctgtgcttttcctctccacactccctacatctcatcttctgaggcccaagacctgtttattgatattatcttctgttttctcattttcattttagttttttcatttctattattagaatgttaatatctacatctaaaaaatgtttccaaaatcaaaagataaactttaggtcacagtcagtgagaaccattaaggaaa

SEQ ID NO: 585274 - DNA, 4001 bp, Homo sapiens
aaacaaacagtcctaaagatcatgggtttttgaagcagggtcagcaatatctaaaaaatcatgtaactgcataaatgaattatggcctaatgagcaggtcaccacaacaaaaagccaagagtgcaaacaactatttgtggggaaaacaaacaaacaaacttgataaaccatggaattccaagcaataaaagcagcaatcccatcacagcctatttctacattattttgaaataattagattttttttttttttttttttttttttttttgaggcggggtctcactctgtagcccaggctggagtgcagtggcacgatcccggctcactgcaacctccacctcccaggttcaagtgattcttctgcctcagcctccctagtcgctgggattacagttgcctgctaccacgtccggctaattttttgtatttatagtagacagggtttctccatgttggccaggctgattaaattactagaataacaagaaattgcgctgggcacggtggattacgcctgtaatcctagcactttgggaggccaaggagtcacatcacctgaggtcaggagttccagaccaatcatagccaacatggtgaaacccccgtctctactaaagctacaaaattagccgggcgtggtggcacacgcctgtgatcccagctactcgggaggctgaggcaggagaatcgcttgaacccgggaggcggaggtcccagtgagccgggatcccgcattgcgccactgcactccatcctggctgacaagagcgaaactccgcctaaaaaaaaaaaaaagttgcaataatatttccttgaaccccgttttccctgagcatagtgtacagcttcacctgcacctcggggttttaattggaaggctcccatgccaagtaaaatttgtattatattaacttgtatccgtttctcctgttgatgtctcaaatgaactctcagggcaagccaaaaagaataataatgatttaactccccatactgtcacaaataaagctttcgtacacttttgtcaacaagttgtttcctttgtccctgtagttttggttttgcctcagcacacaaccattttctgttttgttgttttgagacagggtttcgctgtcacccatggaggagtggagtggcgcgatctcggcttacttcaacggctgcctcccaggtccaagcgattctccttcctcagcccccgatatagctgggactgcaggagggcgccaccacacccgtatttttgttttttggttttgtacttttagtgaagacgggttttcactatgttaggcagactagtctcgaattcctgacctttgtataagtaacccgccctcctcgggctcccacagtactgggattacaaggcgtgagccgccactatcggccattttgaagacaatggccaagacacaaaagcctagtttagaagagccaccggccctgcccccatcccctaaccctccaccctccttgttttaggagacattactccctagtgctacggcgctttcaactgaaattgttggtggctctgaaaagagcctttggtttaagttggcgcacaccctcagtacaacttatgccctctctccgcgaatgcggcgagcgagctggatgtccttgggcatgatagtcactcgcttggcgtggatagcacacaggttggtgtcctcaaagagccccaccaggtaagcctcgcaggcctcctgcagcgccatcacagccgagctctggaagcgcaggtcggtcttgaagtcctgcgcgatctcacgtaccagacgctggaatggtagcttgcgaatcagtagctcagtcgatttctgatagcggcggatttcacggagggcgacagtaccaggcctgtagcggtggggcttcttcacgccaccggtggctggcgcgcttttgcgagccgccttagtggccagctgcttgcgcggggctttgccgccagtggacttacgagctgtttgcttcgtgcgtgccataggaatgggtttcaagcaatggtcacaactgaacaaacagttgttcttactcctatttataaaggcaaagtccttctgattggtccgaatcttccagtttcgcgccctgaattatgtagtgtgataggacttgtgatcagctactaggtctcattttagaaaatcttaacctatctaaatgcttttttcccctagttccttacattttattatgttttatgtgcctacctgtattacgtaccttcattgattttattttaatcagtttgtttgggattatgtttgacagacggaaatgaacgttctgcagttccggagcgattcaaaaataccgcgtttgagagtgattggtccagctcaatgtctcctttatattttttaaaaaactcttactttgaagaaatattttatttttaatataagtaccctatttcatatattctgaacctttcaacaaacactggtttcacttccagacactccgttcctaggggatattaaaatcccatcgctcttgagatgtgttcatcctttgattactgaaaaagcttaaatttttatgtaagaatgctaatgaccttgatcagattataaaagaaagccaatggtataattctggaaacacgtaaatctttagctaatttccattttagaattagttattcatagataattttaaatccggaagctgcaatttggtaggaaactagaaacataatatccgtctttgtttctgtttaaattctcacctaaggagacagaacttataggtagatgttactggcaaggcattagtttttctaatgttttgaatgaaaaactacgttttttcccccgggaggtgtagaaaaggatttagggtaggtttcgcataaatatccaatcaaaaagtagacttgaatttaacttttttattggctgatttggtccaatcagggattgagaatgattaagcacctatttgcataaaagacctacaaaaacggccagctgtgctgttgagccttcactttggggtgtattcttactcctttatcttgttgcaatgcctgatccagctaagtccgctcccgccccgaagaagggctccaagaaggcggtgaccaaggcgcagaagaaggatggcaagaagcgtaaacgcagccgcaaggagagctactccgtatacgtttacaaggtgctgaagcaagtccaccccgacaccggcatctcctccaaagccatggggatcatgaattcctttgtcaacgatatcttcgagcgcatcgccggcgaggcttcccgcctggctcattacaacaagcgttcgaccatcacctccagggagatccagacagccgtgcgcctgctgctgcctggggaactggccaagcacgccgtgtccgagggcactaaggccgtcaccaagtacaccagctccaaataaatggacgcatgttcaaacccaaaggctcttttcagagccacttaatgatttcaattaagagttttaatgctgggtgctgctgtattctatgggagaagtgtcgccaatacaggtaaaattttcctacatcacctgtttattctgtgcgtttgacaaacactaagcttttagagtttatttgtctttataaaggtggggtacaactacattgttcaggctggtcttaaactcaagcgctggtcttaaactcaagcaagttttcccacctcggccttgccttgtattactgagcagataatttgacacagcaggaaaagtgggcattcttgtttaggaaccaaaaactaagtttgcaacttaaaatgcaatcaatttggagcaacacgtccaccagtctagagctggtaagtttgagtattcaaaatgagttgaaagtacatttagtgcctataataacccactctagatagcataatgtggtctttgtaggagtctcgtggaagttaatgttaactgggatattgtagtttaccaagtacctgagaaaaatttaaatttcttaatagataaggattag

SEQ ID NO: 585275 - DNA, 4001 bp, Homo sapiens
atgttgttattgaagctggatgagaggaacataggttttattaaactattatctcctttcccatatattctggaatgtcaaataagtttttaaaataaaagcaatatgtgaaaaaaaatgacaagttgctaaattaataaagatcataaagaaggatctgctgaatacccaaacagggccttgtgctaatctgtaaaggaagggttctatatgaaaacatatcttggttgtatgccaagcagcccaggatggtatgtgttcctccttgtaacatccctaaaaacctgatacttccaatcactaaaaggacctcggtggttcaaaaaaacaaaaaacaaaacaaaacaaaaaagaaaaaacttacattagtgttgccctaagaaattcttataaaagccaggtgttgaaagatagtcaagcaagccagaaagtctttagagaccagtatattctctctgaaggcaaactacaaggaaactgattcaattagaaaactgctaagcctagagtcaaaccagagctaataagagtattaaaatttatgtagcaaggagtctcagccccagctgttagaagcacctgaattttaataattaccattccctgggcccactctagattgctattagtctcattgaaccccaggtaaagatttttctaaagccttcccatgtgactgtaatgttacattgagaaaactgatctgtaaagaaatcaaactattttaggggattgttctgtgcacttgctttagagaacatttcatagaatatttcattctgtaacataaataaacatgcattttgcaaaagctcactccttgtaagagttcacaggcaggatgcctttactgatgagaccaaaaccaacaacctaggcttcctaaatcagtgttcatgagaatcatctgaggtatatgcagattgactccagccctagatggggattgaaacaagctcccatgtaatgccctgggagcttctaacaagttcccacgtaatgcccatgctgccagtaatgtagaggccaatctggctttcgtttctgccgccaatttctaatattgaattaaaaaatggatcatttcacagaaaaaccaagaactgtttaaaaaaagggggaattgtggaaatagctgcttcagacacgaaaaagcagcaaccaaggatatccctacctactctcaactgccaatgctcatacctgtaaagttttaaaagggattaaccagaaatacacaacgaaaaaaaatcccatctataatgggtgtaagtagacaacgcgactaacgcttgagacaatgtatataaacgcccccaggtggccccttccactaccaaatcgaagctccaaacccctaaaagccagtttagaaaaggacgctgacaatctggcactttcgggaaaaagcacgggaacaaatatagcaagcttaccattaactttagccaatcaaatgaggacttaagtactaaaaccaatgtttagtttcaaagatttgattagttaatcacagctattttcgggtgaaagtaggcggctcttaaaagagcctttttaagttggatagaattactgcccggaaacctctacgctctctccccacgaatgcggcgagcgagctgaatgtccttgggcatgatagtcactcgcttagcatggatggcacacaggttggtatcctcaaagagccccaccaagtaggcctcgcaggcctcctgcagggccatcaccgcggaactctgaaagcgcagatctgtcttgaagtcctgagcgatttctcgcaccaggcgttggaaaggcaacttgcggatcagcagctcagtcgacttctgatagcggcgaatctcgcgcagagccacggtgccgggacggtagcgatgaggtttcttcacgccgccggtggccggcgcgcttttccgagccgccttagtggccagctgcttgcgcggcgctttgccaccggtggacttgcgtgcagtctgcttggtgcgggccatctcagactacctgaaagaaaaactcagccacttggcagagtggaaactgcccttatatatactcagaaacattctaattggccttgttgattttcaaaagacccgcgcaacaaaaccattggctgaagagtccaacgatgtgattggtgaattactggaaaatctgattggatgaatcacttcatttttgaatcctctcttctcggttagtctgcgatccaagaacgttaacttcttaaagttctaattctgcgcttctcaagctgtagtccgtaaacgactactttaagacttggaagacgctaattctcattcagtagatgtgttgtggggccagattcggaggaccacgttttgagaagtttatcttgtgccgttttcttgagtcacctggactgctgctagctggaaacctttgaccattataaggcaggattcctgggtgatgtacctgggaaatcacgagccaagaagtcaccgacatacaacagtgagcaacaaatgttaactgaattctattttgtcccaaatggtgttttgcttcggttgagaatttttaaggcacaggctaattttaggttttccaacgactcttatcatttacttttcgttgggtcctattgatgatattccaggataccacccccactagcctcttctgcaggataacttgaacactgcagtggccctgtccatctaaactttacaaggttttgtaaacgttactgaacttgcttcttcccgactacattaaagcacttacttgagatattaaacattttctcattagtcctgtttgcctagtcagtcacttgtatagacagggcaacagcacggcctgaatattgggcaggacaccgccctgcgcgatagtaactttgcccaacagcttgttgagcttctcgtcgtggatggcgagctgcaggcgtcggggggtgacgcgggtcttcttgtctcgggccgcgttgcccgccaactccaggatcttggcggtcaggtactccagcaccgcctccaggtacaccggcgcaccggcccggacccgcttggcgtagttgcccttgcggaggaggcggtgcactcggcccacagaaaactggagaccagccctggaagagtgcgttttagccttggcgcgagctttgctgccctgcattccacatccagacgcagtgaagtatttaaatacttgtttagaagaaggaaagtgattgattctagtaaaacgcaagagctaaactcttataatctatattcggcaaagtagactgtgctatctcctgaacacagatttcagccaatcgaaaagcaggtgtttaaaaaaatttaaaaaaaaaaaaaaaaaaaaaaccacttctgacttacatacttatagttgaaaggtcaaattatgcaaggttgagcttctgggagagccgatgagatttaggagttcagaaatggcctatcatatattcagacactaaaagaaccaatgagaaaccgaaactcagccagcctcatttgcatatacacgaggtaaataatgagggcgtttgggctcaccagcattttcctgtggtcatttgacggtatcacttcggctgcgaacatgcctgaaccagctaagtcagctcccgccccgaagaagggctccaagaaggcggtgaccaaggcacagaagaaggatggcaagaagcgcaagcgcagccgcaaggagagctattccgtgtacgtgtacaaggtgctgaagcaggtccaccccgacaccggcatctcgtccaaggctatggggattatgaactccttcgtcaacgacattttcgagcgcattgcaggcgaggcttcccgcctggcgcattataacaagcgctcgaccatcacttccagggagatccaaacggctgtgcgcctgctgctacccggggagctggccaaacacgcggtgtcggagggcaccaaggcggtcaccaagtacaccagctccaagtaaactagttacctgggtaaaagcgctaacga

SEQ ID NO: 585276 - DNA, 4001 bp, Homo sapiens
tattttgttttgcttacggtgttgattccaattaaaagtattaaagcattattttaatttgtaaaatattaatcataaattatttatctttctaaattccatatatgtggaaataatgaaatcatgaacccacacacaagaaaatgaggatgagcagattgtgaatgttgcagtagtgatcttgatatcaaatttccaaaaaagtgtattaagaatgtaaccaattctaataactgaagatacataaatagccaactgaaacaagatagagaattaaaactgctttttaaaactcagtgtaaaaatactatgatctttccacttacatccttcacaggttaagctaaggagagacagagatgataacacacatacacaagccaatttgccagggaaaatcttgaatacttataagaatgctagagagctcacagaagaagttatagaaatctagcattctgaatacaagaatggatgaggtaagggctttcctggcccacaagaagctgatttgagcatatctaccaagctgatgtatttctttcatttgagattttccatgtgggtatgtctccttactattatatacccatgcattcattcatttatccaacaaatactgatcaaaagctcctacgttactggagatatgcgagtaaacaaaagttcctcctctcatgagcctgtattttagaacacacaagcaatacatcagcaaactctggtacagcatatagtgacaaattctagggtgaaaaaaataggtggggattatacagattttatttagtcatacaaagcctcattgagaaagtaacatttaagcaaagactcaagtattttatcctgtgctcaaaaaaactaccacaggcttacctacaaggcagtcttattttgaatactcctgacagttcagagttttagccactgtcagcagaagtcagagaaaacactttctctcccacacgtatttttacatggggcttcaaagggaatgttctctggcgggctttctccagaagacttttaaacctcaaaccatctgtcattaactacatttaagtggtttaagcaggcccaaaatccggcttgaaaaaattcaaagaaaacttaacactgcttaggaacggggggcggggagagaacgtttcactttagccagcatgagctacattaacctgaatttttccaacttcagtacaaccttagttttatttctggcgtgttggcaagaaatatacacacaccacagtacaggttagcagaaaattagaagcaccatccggtcaaaaccgggctgcggagatgggagagcaatacacgaaggaacttttggctacactcaatgcttacggaaaaatgccggacattattagatgttaagactcccaaaattagcattcaaaaagggataggctgagtcttacgaaacagattgtataacgtctggaaatgggccctatctactacaggcaaaacaagtaccaggaagaattcctgagagaaacagatcttttcagcgcgcatgtgggtggctctgaaaagagcctttgggtatgtaatcagtgagtccttgagactcaagccctctcgccgcggatacgacgtgcgagctggatgtccttgggcatgatagtcacccgcttggcgtggatggcgcacaggttggtgtcctcaaagagccccaccaggtaggcctcgcatgcctcttgcagcgccatcaccgcggagctctggaagcgcaagtcggtcttgaagtcctgcgcgatctcacgcaccagacgctgaaaaggcagctttctgatcagcagctcggtggacttctggtagcggcgaatctcgcggagagccactgtaccaggccgatagcgatggggcttcttgacaccgccggtggccggagcgctcttccgagccgccttggtggccagctgcttgcgcggagccttgccgccggtggacttgcgagcagtctgcttcgtacgcgccatgccttcagagctagattcacttcaggagaaagagaaagctagccgcttatttatagtgagagtctgaagctgattggacaaaagtatgctgaaggcctacccaacagtaaccggattggcgaaggactcaaatttttgttgttcacctattcctctgacagacttagcagttcatggtctccatattttattttctattttcgctatacagttgttcactatactagcgatttccagtggaaatgagagcaatataagtaatttacacttatctaggagaacattgtaacaaaacaaggaaaaattaatttttaatattttgcttaatccaatatagccaacatatttcaatgttatcgaaattaaaattgttaggtattttacactttttggcactgacttttccaaatgcaatgtgtattttatataaaattcatgctatggaatttccaatgatcactatccacaattggctagtggctgcaatactggacaggacagccttatacacctgtcccctcaattttctatcttttgaccacttaaatttaaaaaacttctatttttataaccaagaaaagctggttcgcatgtgagaaattcaaggccaaaaaatgtcaaagaaacaactttatgtgaacttttcacttttagattaaagtaattccattgcagcttatttttccaatactctagaaatgtaattcattttcttttaagaatctattccattcgtacatccagatctgattcagattaaaaacatcaagtcagatattttaaaagtggaatttaccatgctgaaacaaattaagtcatctctgtactaagaaatcaatttgtgtggctgggggtgggaaagctcgggaaattttaatttcaatgaattttcagaaaatgcttcaaagagaactacctggcaccataagtaactgttctaattagtctaataattattctcaactcaatcattaatgttcaaatgcaattaattatacagattcgagagatatttctcagaaatgaagaatccaagtcgttgatctagatttggattgaacgtcgaatgcccggtttgttatttaccaagacccagaaaacatctggccccaaagcagacatgtttgcttcaacagactaaaagtaaaacccgacggtgaaccatacagaattcaacatacttggataatgccagcttaggaaaaactaaattttcttccactaagcttaagatgaaggcgtgtttaatacttttaatgttatccaggctttttataaagctaacgagattgtcactacctaaccaagacaccgaagactgatctacgtaacctttggagtggtttagaagtaggcaaagacgagaaattacattaaacatagtgctcagttcttccacaaaattgtaggtggctctgaaaagagcctttggttcctttgggattgagttgctgcaaactaatccaggcttctacttgcccttcgccttgtggtggctctcggtcttcttgggcagtagcacggcctggatgttgggcaggacgccaccctgtgcgatggtgactttgcccagaagcttgttgagctcctcatcgttgcggatggccagctggaggtgacgcgggatgatgcgagtcttcttgttgtcgcgggccgcgttgccagccagctccaggatctcggcggtcaggtactccagcaccgccgccaggtacaccggcgctccagcaccgacccgctccgcatagttgcctttgcggagcaggcgatgcactcggcctacgggaaactgaagcccggcccgagaagagcgggtcttggccttggcgcgagctttgcctccctgcttgccacgcccagacatggcaaaaggcctattatctatacggtcaagaaagactgaagtgaaactagaaaaacgtacattttatagcctctactgggcgcgaaaaggaagctgtgcgattggcttacgttttatttttatttagaccaataggactcgattat

SEQ ID NO: 585277 - DNA, 4001 bp, Homo sapiens
ccgcatcggcctcccaaaatgcaaagtgctgggattacagatgtgagccactgcgcccttcctttttccttccttcctcccttccttccttccttcctttgttttctttcgtcagctatctttagtgatcctgtattttaggtgtggcccaagacaattcttcttccaacgtggcccagggaagacaaaagatcggacaccgctgcaccagttgctgggatacatgcctctttgcaagagtgaatccaatatgagaaaggaaggcacagatatgaggctgagctggctgagagcactagggagaaaaattgccttcacatctctgccagatatctcctaggtcaagatgtgtgcttcaaaaagtttaagagcaaaatgaggtcatgatagtcacatatgtagagcacatgaggaaactctaaaacagctggaaataatggaaaagtttggttagaaaccaggaagagctttaaaataccacttgaagtttaatacccagactgattctctctgaaaaaaaaaaagaaagaaaaaatctcatgaaaatccaactccacagtctatgacaagcatatggtgaaatgacaggaaaatattttttaaggtccacttagagctagaagttcatttcatagatgacagcatgcagtaggttaaagtatccctcctcagaggcccactacctaacacatggcttgctaaacattacattgaaacagaacaaaagtgtcgagctttttgtcaaaactgttacttgcatggggtacgatggcaactttgttatgtgcatatgctccaaggtggtcaagttacatgggctatacaagagctaaatagcttacattgtaccaattaagtaacttatcattcattctttcctcccttctgagtccttattgtctattgttccactctcatgtgtgtagtttttagagcctgttgttttttgtatttttgaggcggagtctcgctctgtagcccaggctggagggcagtggcgcgatctcggctcactgcaacctctgcctgccaggttcaagcgatcctcctgcctcagcctcccgagtagctgggactacaggcgcgtgccaccacggccggcagtcttttttttagtggacaggggggtttcaccgtgttagccaggatggtcttgatctcctgaccttgtgatccgcctgcctcggcctcaccagagcctgtggacactcattgtgctacttgttcccttcagtaggggcaggtagatacgcaggagacacattcctcaaggataaaaacaggaatacttttcaaaactaaacttcatctgtaaaattgaccccatgacatgtcttttttgagtgataatccttatcagtaggaacaggttctgtatgtgaaattgatttagcataccaacagcctgtgacctgactcctgcattatagtgtgttgggccactaccacgttttgtccacagcttgtatttaacatggagctaagacacgtctcaaaagctacagcttccttttggtgacaattgaggggctctgaaaagagccttttggggttggacagacttcttgggctgataggaatatttatgccctctcccctcggatgcggcgcgcaagctggatgtctttaggcataatagtgacgcgtttggcgtgaatggcgcacaggttggtatcctcaaatagccccaccaggtaggcctcgcaagcctcctgcagcgccatcaccgccgagctctggaagcgcagatcggtcttaaagtcctgtgcgatctcccgtaccaagcgctgaaaaggtagcttccggattagcagctcggtcgacttctggtagcggcggatctcgcgcagggccacggtgccggggcggtagcggtggggcttcttgacgccaccggtggccggagcgctcttgcgagccgccttggtggccagctgcttgcgcggcgctttgccgccggtggacttgcgagctgtttgctttgttcgtgccatggctaagtagacgtacctactcaacacaaatgagagaaaaaaactgatcatcccggtatttatagctgccctcgcgttctgattggacagtagactgtgccatgccacgtctcacacacggaattggctcccagtttaatctgctagtgaaagggagacattccgcctctgttttgggtcaagaaacgtaaaatggttttgctagctaaagaaaaacaaaaacggaaacaaaaaaaaatcccccaaaagtctaggatttttcatgcatcaaaatcctgtttaaatataagcttgataaatctaaacttgccttgcactattttaattacgaggtgtcattactgatttgacaaaaagttaaagaacgtaaaggaaaagtgaaactagagtaaatttgtaaatggaggcattgaaggggatatgaaattcgagcgttgtggtatgccagtatttctcaaatttaaacgtacttaatgttttagaagttggccgactttttctgtaaagggcgatattaaaacattttgggcgttgcggaccacagtgtcatagttacacagccctcgcattggtagcggtaaagtaatcgatacaagataaatgagaccggctgtttcattatgacttttgcaaaaaccagagaggcgttatagatttggccgtgtatcagagaagccggcacttttaaccactaagtaatgctgaaaggggcaccgaacctcaaacttcagcgactgcttatgtggaatcgctaatttgccaaaactgccatacgtttaagtgttcttaagaaattaactatctttagtctacagctctttcacagacttcatgggtggccctgagaagggcctttgaggaaccgtgtaagtaagtaaaacactcagccgccaaagccatacagggtgcggccctggcgcttgagcgcgtaaaccacgtccatggctgtgactgtcttgcgtttggcgtgctccgtgtaggtaactgcatcgcggattacattctccaaaaacactttaagaactccgcgtgtctcctcgtatataaggcctgagatgcgcttaacgcctccacgccgtgccaggcgtcggatggcgggcttggtgatgccctgaatgttgtcgcgcagaactttgcggtggcgcttagcgcctcctttgcccagacccttcccgcctttgccgcgcccagacatgtcttgtactaaacaaaatgcaacacggcaagcctcgcagcagtactttatatagtaataaatcggacctgattgggaactctccacaccagctgcatccggtcggccgattcacagaccttgcgccctgcccacgacttcaggaaaaaatggaaaagggggtacttaaactccagtttctaaaaatgatgcccagttaaaaattactcagctcatcttgcccttctacagtgttttaggctgaccaccgctgcattccattgtctgggtctttgcagcctgtttttcctgtcacctcttagcatcgattgttctagtgctttgtggctgctggaatcaaatggcgccatctctagaggggtaatcacagtcgtttcgggcatttgtgaaatagcgtgtagaaactgcttccgtacaaactcgaagtgatcagcctatggagtggctgactgcaaaagacgacgcctgatgatagctccaaggtgggattcctcacctttctcaaatttggttctctattcttttccttatattttactctttctgtagctgtcctttctgttcctttctctccctcgccaaccacatttttggggcaagaactttctatttttttttcctcattccacctagaaacacttcaggaagctgtttgagaaagaaaggtggcttttaccctgtatttccttagaattgtgaaggtgccgcttgagctccctcatgttcctcttttctgttgaactaggaaatcagctgtgcccagaaaccctgtcttttacatttacaaataaagtgcaggaggaaaagaccga

SEQ ID NO: 585278 - DNA, 4001 bp, Homo sapiens
tagctgacagcctgtgacaaagtagttttctctcctttgagtcagtcttagattcctctttaggcaggaaagggagcctcagagaaagccagtacttgcatccactgtttactaatgtagatttccttgataggtatacaattcttttacaaaaaagagcttttcagagctattcctatttctgcagtttctctgaatagccatcttgaaatatgacaaagtatacttcggggtggcatattttagtctcccacaagagccactccaaactaagattcagagataaaatcaggttcaataaatattttttgtgtacctaatgtgttttctggggcactgtccaaggccctagaatatattactgcatttaacctttaaagcagtctcttgaggaaagtaaagtgaaggaaataaaaatattttaccccaaaagatatttctttgccctattttgaaatggctgcctcagggcccggagaccgatgaggccctgcaaatcagtcttttgtgggggaaatttccatttgttgccaggctttccctttctagtcctttcctggatctaggagagattaactgagagtctgatccttttttatttttattttttaagagactgtcttgctctgtcacccaggctggagtgcaattgtgcaatcatagttcactgcatccttgaactcgtgggctcaggcaatcttcctgcctcagccttctgagcagctagaactacagttgtgcgctgcaacacccacctttctttttatttgtttttcgtagagacaggattttgctgttacccaggctgatctcaaactcctgggctcagggaatcctccttccactgcctcccaaagtggagggcatgagccaccacgcccaccctgacaagagacatttaccatctattttttctgaggactactagctatgtgttttcatctacataacaagacccgccccccttgctagccaagtctcttcctttctccctcctataatctgttttcccaggttccaagcttgcactctttctataatctcaaggtgatatataaacttctgtatctcattggtgggtgggtcctcattttgaagtctcccgtgtctatgtgctaaatcaaccggcctcatgtccgtgattttcagcaagcttccaggggacccaagggcagtgcccgtttcagttaaaaatggcatctcatttaacctgtaatctaattgttagttatggggttctggagatgctatccccaaaggacagcatgtgcaggaaggactttggctttccccttgaagcggattgaccttggatatagatttgctgactttcctcggagaaagtgagacccttgtgagatgggtcacagaggacaagtgaaaaggaccgtcttagaagacaaaggacactgcaaggaatcagaatgaacaacccttgacgactttccgccagtttatccctgctttaaagttgatttaagacagtcgaccaatggtgtgacagctatcctcagtgagaatgtaagtggctctgaaaagagcctttggaagcttggaagcaattaagaaacccaagatagagcaggggattatgctcgctcgccacggatacgacgcgcaagctggatgtccttaggcataatagtgacacgcttggcgtgaatagcacagaggttggtgtcttcaaagagacccaccagataggcctcgcacgcctcttgcagcgccatcaccgccgagctctggaaacgaaggtcggttttgaaatcctgcgcgatttctcgcaccaggcgctgaaatggcagtttgcggatgagcagctcagtcgacttctgataacggcggatctcacgcaaggccacggtgcctggcctgtagcggtggggcttcttcacaccgccagtcgctggagcgcttttgcgcgctgccttggtggccagctgcttccgcggtgccttgccgccggtagacttgcgagctgtctgcttcgtccgggccatagttgagaaagctatgctctgaaagcaagcagctgaatgagcagtggcttctaccagaatttataacgatgatctgatcctgattggtcagaactgttgtaggaaaaacctggttggttgttaatactatcttcatttggttcctgccacttttttttttttttttttttttttacctgacggcttctaattctgtcgcctaggctggagtgtggtggcgcgatctcagctcactgcaacctccgcctcccgggttcaagcgattctgcctcagcctccggagtagctgggactacaggcacttgccacgacgcccggctaatttttttttagcagagaaggggtttcaccatgttggccaggctggtctcaaactcctgatctcaagttatccgcctgcctcggacttccaaagtgcttagattacaggcgtgagccactgcgctcgtcctccgcgccacttttatttattgttttcaaccaatcatgttaagattcccccaatgaaaagataatctgacctagaatttgtgtaggtcagtcgtagtcttaaactcatttccaatgggtcatttttcctatttcggatcgtgtaaaaatacatacagtagaacaacgtatttgctagtatttccaaaaagtagttccgttttgtaactgcttaattaaatcttttaatgactgtaccaagacccagaacaaaaacaatttaaacttaggctggcacattctctaaaacaccaaaactttagttttgtccagtgtggtgtggggaaggagtttgataggtgcttgactaaatgataccaataaatggtatctgacctcttcattaactgagtttaatgcaatccaatggctgattggattaattatgtaaattattgcttaatttcattagcatgcgcggaattacaggtttgggtcagtgattagatttttgccagtgaatctgggtagttctgacaacagcattttattaggatggagattttagttgatcaaagaactaccaggttctggtattgataaagacccataaagacaacaaaaaggttagtttaacatttattatattcacaggagcaaatgatcaccagaaatacttttgtttgggttttgtttttctttttttgagacggggtctcgctttgtcacccaggctggagtgcagtggcgaggtcatggctcactgaaatctcaaattcctgggactcaagtgttccttctgctgtcagtccgccaaatacaggcgagggcctcgcgcctggtattttttttctttcttttttttagatggagtctcgctctgtcgcccaggctggagtgcagtggcgtgatctcggctcactgcaacctctgcctcctgggttcaagcgattctcctgcctgtctccttagtagcgctcgccaccacgcccggctaatttttgtgtttttagtagggacagggtttcaccatgtttgcctgggtggtctcgatctcttgaccttgtgatacaccctcctcggcctcccaaagtgctgggattacaggcgtgagccaccgcgcccagtcattttttttttaagaggcaggggtctcgttatcagggtggtctcgaactccaggtccctagagatttctcccctccccacccacctgcctcagtttcccaaaatgctaaggacgcataaaccaccgcgcccggccccaagttttttaaagacccaggacagtttgtggggaggggacaattaaggaggttccttcatgttataaggtagcagttggatagtatttactaggcctgattcaatacttttattttacccaataggaaagtaatggcctcagtgcttgaactcggccacaaatttctgataggtttggagaacagagtgctcagttcttccgtagaaatggtgggtggctctgaaaagagccttttgtcttgtaagtttacatttttaaagttcagcccttacttgcccttagctttgtggtggctctcagtcttc

SEQ ID NO: 585279 - DNA, 4001 bp, Homo sapiens
cccaaggtggtggtgggtatgcctaagatgagtatgacatatcagcaatgctatgaacatagcaatgctatgaaaggccaggcaaaacgtaacaggagctagtcgtggcttattgttacaacgactatacctcccatatgggtaatcgatatccacacacccctctacattgactctggaattcaggaaagggaattaaaattttctaacttatgtaccccaatgatttcaacaatatctggcatatgagatcaataaatatctttaaaataccaactaagaaagacataaaatgacccaccctccataccaggctcatttttgctcctctgattcctgaaactatccagaatgcagctatgaattctctccattgtcagttttaaattaagccaagctgggtacttgtgtaattcctcaagaaatcctggatgaaaactgtcaggtggaaaacaggacctcaaaataaagagacatccatcactgaagctaacatcgtgaggctgaaatcagtcctataacaatggtaccaaaaagagcacaatgagaggcatttgtgaatatttactcagatgagagtaagatatttccctatcagctaacctgaagttcacatcccttttccagctgagttctgaagctagatgtacttaactggaacacataactgcatcaggaacatcctttaaaactatggctaccatggcttgactggacaaaccccaggcttccaggtttagcacaggtggcccttcacagaccaacattgcctatgctaccaacctcatgtcctaccaccctgcttgcatcatttctctctctgcatatataaaaatatatgtgtatgtatataatcagctttattgatatttaatgtaccacaaaatttgcccactttaggtacagttcaatgaattttaccgtgttttcttagttgtacaaccatcatcacaatttaatttcggaatatttctatcacccaaatttccatttctgcgtaaagggggaaaaaaaaaggttaactgctgaaggccgcggtaacactgaaaaaggtgccttttctctctaaaacagattttaatctcccctgaatttagtgtcctgggtattccaggagtctgaatagggtttcaattttcagggtctttttaatagagtaaaactgtattggtggcgataaatttagtattgctctcagtacatgattgagggatacttaaatgtctctgtgattttatttcataatcgctaaaagatggtttttttttttcctaaaacagggtttttgttttttctcaataagcttcttagcttcccctccggctccctggcttgcctcaggaaatattagctcatcagttctgattggttgacagctacgaatggccctcattgattgggcagcgcttctttgtcccttggaaactaatacaaatttttaacactactttttttccactctttcttcagagttggaatatcgttgctcccctacccatatgtagtgagtggagggcaaacttggagttcccctaatctttcctttttaggatgtcagctcagtatcattcatcttaattacacattgagcttcttgacttaatggatacagctcttcttttgtttagttgggcggccctgaaaagggcctttggttcagaaatgcaagctgtggagaaatcagcaaccttaaccgccaaagccataaagggtgcgtccctggcgcttaagcgcgtagaccacgtccatggcagtgactgtcttgcgcttggcgtgctccgtataggtgacagcgtcacggatcacgttctccaaaaacaccttgagcaccccgcgagtctcctcgtagatcagaccagagatccgcttcacaccgccacgccgggccagacgccggatggccggcttggtgatgccctggatgttgtcacgcaacaccttgcggtggcgcttggcaccccccttacccaaacccttcccgcccttaccacgtccagacatgacttcccaagaagtgaaccaagagcaagtgagagaataggaaaccgatctttatatatctacgttacccctgcccccacctccagcggacactgagactgaaaagcgcgcaggcgggaaatgtgacgcctacagtccgctcctttaacccctcctccaagccccaggaaatggcgggagcagcgattgggggagggtggggagatgagggtgggaccaagcaggcttgaccaatggcctttattttcttaacagagctacaggctttgaggaactgggttaagaattaaatgtaaacccattctgactccagaattattttaagtcgaactttttttttaaccgaatctctctgtcgcccagactggagtacattagagccatctcgattcactgaaacctctgcctctcaggttcaagtgtttctcctgcctcagccttcagagtgtagctgggattacaagcgctcgccgtcgcgcccggcgtgtttttgtatttttcgtagagacgggattcggccatgttggccaggctgatcccgaactcctgatttctggtaatccgcccgcctcagcctctcaaagtgcttgaattacaggcgtgagtcaccgcgaccggccgaaatcgattggttttgaagccttcagtagcattaaaacgaaaagtgctcccaatgcattcccttttgtcttaaattggtttcttacagctactttacttgaaaaggtggtggctctgaaaagagcctttgcttggaccgtcagagagaccacagtaatcacgccctctctccgcggatgcggcgggcgagctggatgtccttgggcatgatagtgacgcgcttggcgtggatggcgcacaggttagtgtcctcaaatagccctaccaagtaggcctcgcacgcctcctgcagagccatcacagcggagctctggaaacgcaggtctgttttaaagtcctgcgcaatctcgcgcaccaggcgctggaaaggtagtttacgaataagcagttcagtggacttctgataacggcggatctcgcgcagagccacggtgcccggccggtagcggtggggctttttcacgccgccggtggccggagcgcttttgcgggctgccttagtggccaactgtttgcgtggcgccttgccaccagtagacttccgagcagtttgcttagtgcgagccatgacggaaaaacagcacagcggaacacccaacactagcgcaaatacgcccatgagctgctctatttatagtgtgtaaagtgcagtgattggatgatagaagacgctaaatatgacgttacacactctgattggtctatctttaagccagcaacaatcgtgcagtttcaccggctactatattctattccaactctacagatgattatttaagtggtattttattactactattattttattttacttttgctttgttccccaagctggtcttaaacttgggctcaaaggatcttcccgcctcagcatccagagtagctgggattacaggggagccccactgcgccggcttggactttaattttttaaacttgtcctcttctacatctggttttcataacctgaaggctgtgtttattttccataaaacaaggcattgattccaaaggtattataattccccaattccgtataaccttcagctctttaggaaaaaaaaaaaaaaaaaaaaaaagagggaatactgctcacctcctctccggaaatgtaccctttacgggaatttctgaaacctttcacaagaattggattcctttgtaatgctttaattgacttaggagtgttattgaaatctacaaagcatctcaaacatagtaggattacactattactcagaaacattttctatgagacgtctttctcttgattatgctctttgaatcctaaacttgcagcgttctgcagcttttgttttctaaagcctaggtgtactctgccagtcacaaaatggcgtttctccagcactgccgccagg

SEQ ID NO: 585280 - DNA, 4001 bp, Homo sapiens
ccaggctggtctcgaacccctgaccccaggtgatccaccaggctcagctttccaaagtgccgggattacaggcgtgagccaccttgccgggcctatatttcttaagctctatgtttcgttctgaagcttgaagtgggtggaagcaaactgatagaatttggagaggtggttaggcatcccgggaatgagaaacagcccgaagctgccactatcacaggctttggcattgctagaagttaacgtggcacttacagctaggccgtggtgttctgttgaacaaactatttgacagagcacagagcatgtaagtggtgaggccagttgagttagccaagaaaagaggagtccaagaactgagccagagtacaccagagtatgtagtggagtacagctttctcattctttagtagggctgtgtagagaaatactctattttatggatgtatagatcactctagtcctttctgatgaaaactttacagttgccactcatttactattacaaacaatgctgcactacattatgtttcagtttttagccatctcatctggtctcagcatttatttatctgctgatgactcacacatttttatctccagctcagacctctcacccgaactcacttattcaactgcctattcactatatcctcctgtcaggagaagcttgttagcaaagtaaccagaaaacaaagttgattttttttgctgaagtagccatcaatatatttgttactaaatcaaagatgctgaatatttggctgacttctaaaaatctggtcacctaactttgacacttcctaggtcgtacagtttgaaactttcacaattaaatcagttttggaatttacaatttaaggcaggaatagaagactattgggttgacaggtacagtgaagatgcaagtcatctgagaatcttacatcagagggggcttccatcttatagctgctgccacggacctcggagtcagaagaaatttgagtccttatttataaaacagactcccttagtctactaagtgggaatttacgaactgcgtaggcagcctgcttaggggagcctccagcctgaggactgaaaatagcaaagcagctttaaccgccagtcctactccagagaagggggaggtgacgtcactcagcaggacgccaagctcaactagaaatggaagtaaaggcttctggcgctaccggcagggggcggttaaggacggcaggtgttaccagggaagctaaaagtacagcttttgctgacgttaagtcagatacgcctgggaaaacagacctgacacccattttaatccacctactcagttccaggcagctagcatcttaggctctcgtacaaataacgcacaactcgtttttaaaactaaaaagctgagctactcatttatcggactcgcgctgcacgttaagttgcttgacatgtcaaaactatagcattgaagtttatagctcacttatctcggagacctcgtttacttagctgatttctgctttagcagccactcagaccaaacaacctggtctctcccaactggtttataatagttctacatactaggcagaatagccgagtaaagccattgagatgttaccatccgaaagaatacaatcacagctctttctgagagggagtgggcggccctgaaaagggccattggaagaaaactgacgaaaagattaaccgccgaagccgtacagagtgcgtccttgacgcttgagcgcgtaaaccacatccatggcagtgacagtcttgcgcttggcgtgctccgtgtaggtcacggcgtcccggatcacgttctccagaaacaccttgagaacgccacgagtctcctcataaatcaaaccggaaattcgcttaaccccaccacgcctagcaaggcgccgaatggccggtttggtgatgccttggatgttatcccgcagcacttttcggtgacgcttggcacctcccttacccaaacctttaccgcctttgccgcgaccagacatgtctaaccagctgacaacaaaaaccaggtacgcgaaaagaaagcaagccacgagcatttatacacgaacatcggaccttattgagaactgaaagcgggagcgaggataaggaggcgttgctgcctcactttttgctccgcccctcgaggggcagtgacctaaggactgcgagggagaacacaatagtttcactttttaatccctttagtttttccctcccgtttacgacactactatttgaatctgaatttataccctcgactgagaattttaataagggcttatattaagggctttcactaatatgccggagtggtaaactttttaagtctttcaagtgcttgaagacatattgactattcaaaggtacttaaaagagcaggcgtgaaaagatcactctggccttatgttttcttgaaagctgacctgtttcttagaagcagtaggtgaaattctcatatgaaagatgttctcactgtagtttaaaaaaagcaacattcttctcaaggataggaggctgaggccaagagaattctgtacaaaccttgcactagcccttgctgggcgcttctctacacagttatatattctagcctaaatccctttgctttagcgcatttttacattttactaattgtccaattcattatataagtagctaactgctttttttgggctttcattaccttatgagagcacctgtgtcacgtaaaacctgtgttaaataaatgcatatacctttctcctgttaatccattttacattaatttaatttgctggtccagccagagccctaagaggatgggagtggagttttgctatccttcacactgtactgtctcattcagaagagggtgatagctcattgcaaccgtgccttcatctgtaaatcgggttatgatgatactcaggggacttttaattagctaatgtgaacgaggcatgagaagagactgtggaaaagaaataaatattacataatatggtttaattttagatgttactacttaaaaaaatctgctcagagttgggatattgtcctgaactctcattttcgtgtttttactcccaacactatattgctagcagcaactatgtatgtattagtaaggattgtttttttaaaatcacagcctgtaataacgtacaaggtgttgacagattccgtttagcttttcatatgtgacatgttaaaattgtccgaaaatattcctttgttctcttttccaaggtgcaatacaatagcagcattcgtgctttcctatagccaagtctggagtgtagttcaactctccatacacgcttctcactgttgttttaaatttcctgaaaacattcttaaatcacttctattggaaaaactgcaagggctactgctaaatttttaagtctgaaaaatgcaccccaaacttgacttctttctctgagaatcttagccatctcacccaaatctaacaaaccaaaactgattttagacttcaacagcattagctgtaaacttcagcctgcagcataacatcactttgttgtgactgggcaggaaaaaccctgttaaactgtttcaggcgcgtccgtgtgaagagaccatcaaacagggtttgtgtgagcaacaaggctgtttattctacctgggtgcaggcgggctgagtccgaaaagagtcagcgaagggagatggggtgggtccgttttataagatttgggtagatagtggaaaattacagtcaaagggggttgttctctggctggcaggggtgggggtcacaaggtgctcagtgggggagcttttgagtcaggatgagccaggagaaggaatttcacaaggtaatgtcatcagttaaggcaggaacagggcattttcacttcttttgtgtttcttcagttacttcaggccatctagaggcatacgtgcagttcacaggggatatgatggcttagcttcggctcagaggcctgacaaactgaacaactgggaacaaacaacatttaatgcacacaatctc

SEQ ID NO: 585281 - DNA, 4001 bp, Homo sapiens
taaacagacatagtttaattttcctttgatttttgatttagtattcttactgatcatcataaataaccaatgctaatgttagtctactttggaccatggtatttcgagaaactttgaacaaagtcccctgcaaaactatgcattgcattatttcacatacatttatgttttccagacggttcaatagtacctcacttttctgaacttatttgtatagtttggcatctttttaaaaattgtgtcctataatgaaaggttgtaaacattatgttttaaatttgtatagataaaatcaaccacagacctttccttgcttggatgtaattgccattgtttcccaatgagttcggaattactaggattgtgcaaaaatatgcctcacttgcctgacatagcagagagccattttgcctaaatgctgtgcccagcaatggactgtcaccagattctcatcacatacagtgaggatgaacaactagcctctcccagcagctggccggtctctcaataatatgggactccctcaagatggcttcctgcacctttgctcctctagccttgtatgtatacaaggctagcatgcctggcatacataaggttaaaaacaaaatcaataagttatggttcttcctccagttctggggattattagaccacttttttgttttgttttgttttggatggagcctcgctctgtcacccaggctagagtgcagtggcacaatctcggttcactgcaacctctgcctcctgggttcaagcagttctctggctcagcctcccacgtagctgggattacaggtgcccgccaccacgcccggctaatttttgtatttttagtagacggggtttcaccatcttggccaggctggtcttgaacgccagacctcgtgatccacccaccttggcctaccaaactgctgggaatacaggcgtgagccaccgcgcccggacttagaccactttgttttggccaataggacaacagccatagaaccctccgcaaatgagagcttgtccctaaagatgctttatttacatagctgtgtgccgcatgagccaaaaggtgataacctttgttcaacacgcgcctccagcccttcggttaagtccaaagtaccattcttagaatgctctaaaatacataatttttttttttttttttttttttttttttgaggagtctctctctgtctcccaggctggaggggagtggcgcgatctcggctcactgcaatctctgcttccgggctagctgggcctacaggtgcagaccaccacgcccggctaagttttgtattttttttggtagagggggtttcaccattttggccaggctggtctcggattcttgatctcaagtgatacactagctttggcctcccaaagtgctgggattacagtcgtgagccactgcgcccagcaaaatgctttttgtggagccaatcactttattagcgcttacctctctatgcctactttatgctttgaaattttgtcacagtgtggccggtcatggcaaacacaattcattcttatgcaggatgtcacggttatttctgtcatccaaactcattctcgcaacgcatttcagctctttaaacgactttgtgagcggccctgaaaagggcctttgggtttttttgtttttgttttttgaagttctcaggagaccgcgtattcttagattcagccgccgaagccatacagagtgcgcccctgacgttttagggcatatactacatccatggctgtgacagttttgcgcttggcgtgctccgtataggtgacggcgtctcgaataacgttctctaagaaaaccttaagcacacctcgagtctcctcatagataagaccggaaatgcgcttgacgccaccgcgccgagccaaacggcgaatagccggttttgtaatgccctggatgttatcccggagcaccttacgatggcgcttagcaccacccttccccaagccttttccgcctttgccgcgaccagacatgattcctatcgcagtggaaggtatgaactgaaacagttccttaaatacaaacttggcggacctgattgaaaacaacatgagttggcgcggttttttttttttttcaaatttggtcaccaagtgggtggagcaagaaaaactgtttcattatggttcattgttttgattggccagtgacagcttgctctttgtgggagtggaagggtgtttgcaagttgaatgcgctgtattcctgtcagcttaatgacgctaagcatagccccattccacatttctttttatttccacttgctaactaataaattacggaatagtttattggggaacatacaaataatgtttaaaggaggtcagatttataggtcaagggatttaccctcccaatcattttaatatttttatttaaaccaggcattttgatggccttctctgtgctggacaaggtataagtttggctatgaagtttcactcctaaagaccctatgttttgggaaggcaaaaaggtagccaaataattgcaaattaaaacctcataagtgcaaacttcttcctcgtcactttccctatctcgattcaaatatttgttgaatgactcatttttctgcaaaagtctgagagagacagggaatataaacttaagtctggataatatgttttcccgggacgctcttcctggtctgctgtgcctgtttgctgtgcctgaaattccaaacactcttcccttccctccgtttttaatcccctttcaacttgctacagctttagagaaaagaacattcgttttgtacagttggggattaattgaagtgtagggctaatacttgattaaggtcattacaaaatctacagggtcttcctctgggaggtttttgtgataagattattggtgttaaaataaggctaatccccttgaaaaataaatagaatagcagaattgggtctgaatgtggtttgaagaaagggacttctcaattcaaaattttattcttagcttcctgcgggagctttccagaatgcccataagatccacttttgtttaaaaaacaaaaacaaccccacccaccactctctggttaataaatgaatttctattgggaatatttagaatggggctgtggcctgtgagagacattatatagtaacctcagacttgctcacatgaagagaagaaatccaggaatggagaaaaaagacccaggaaaggccagaatgctctacatgtcatattgtttgtatcacttctgaaataattgattacattcttctgccccaaattgagttcttaggttcttccactcactgtccacatgccacaacacagaccttataactagagacttagctaggaagaaatgtcaaacattacagagaaaaaatgcagagtctgagatcataagtaaaactctgaaatctcaacatgccttttaattcatgaaaataaaaaatatagcagcatatgcaatatgacaattctctgaaaacatacatcatgtgaactaccctggaacacatctcgccaagtgccatcttcattttaaccagaggtctaggatgcctttcctttattttgcctattatatcatttataaaaccccatttttattttgatattttatttactttctatttcctgctcctaatatctcctttctaaacttttctcaatgacagtgactcaaaaacaatgaatgtcagaacaaatatttaaaggatctgtacatgtagatatatatatttaaaatggattcttccactctgcgaagaattcaggcatactcaatcttatggttagggagagattaggctcactcgcctaatctgtatggcttctcgttcgctttccatttcaccttcctctcacccatcagatcaaactcattcattgaacaagagacctaagcccttcagattaaaactctgcaaacaagttgtggttgagaggatacatgaagcattcaaacaaataaatctatgatattaatcagaggttaatctatgat

SEQ ID NO: 585282 - DNA, 4001 bp, Homo sapiens
agactcaacaataaataagcttaaagacagatatttttgtttcatggaacaaatccattgtgattagtccagctttgtgaagcagctctgctccttgtgatcaatcaggaaatttcgttccttccaagtcaatgttctgtcatctcctagggcctgatgttctctaattgctcaaaatgaaatcaataccattatacttggggaagaaggtaacatggaagtttcaaagcccagacctggtagtaacttttctatgtgtctcacctgtgttggaaataatgtagccacatgcttacatctgctcccagaaagaccaggaaatgttgtctcttgctagatagccacctgtccagctttctttttattatgataaagtgaaaaaactttattggaaaaataagggtttactcaatattctccacaaattaaaatccattttgaggacagcgaataatacagtggcatactgatagtcctgcgattgtaaggactggagtaacccactagggaatggcttacttatttttgtctcatttcctgaggtgtaaagggaaagaaggtgggaatttaatcatgacaacctcggttttaaacacccattcatgcaaccacagtaacctgatctatgatttaaggtaaaatgacttctgttaataataaagtctaagactatttaagataaaaggacaacaaaaaaagaactcgttcaacatacctttaaattggccacgggtacataaataaaaagtccttttaaattcaacaatagaaaatcagtagatctggatggaaggcagctcagaggaacagaaccaaacaagttggcctctccccattccactaaaaaatgttgaatcttatgtactttcatggttgtttctcccacggtaattactactttcttctttaaagaatgtatttgccagtcaagtgcctccaacacacctcccatccccccacaccaataaccatctgaatgccattttgtcttcctttcatataacaatgccttggtaggaactagtaactacctccatttttttcactattcttcacggcagcatcagcctttaccacttgccttctgagatacaggttttgctaccttgtttctccagcagctacagtctttgctaccttgtttctctgatagccatgaagaatgttagcagcagtttgccatgtttccttacagaaatacagaaaacacaggccaagcgtggtggctcacgcctgtaatcccagcactttcggaggcggaggagggaaatctcttttgagcttgagttcaagaccagcctgggaaacatggcgaaaacccatcgctgcaaaaaatacaaagattagccgggtgttggtggcgcaagccggttgccccagctacgcaagaggctgaggcacaagaatcgtttgaacccgggaggcggagactgcagattgccgagatcgcgccattgattactccagcatgggcgacacagcaagagtgaaaataaactttaatacactatcctcaccggccagtaagatatgaagccaaggcgtaataagaccatttaacttgaaaaccggagctactaaacacgtgaaactacacttttagcagtgactactactctttctcctgagtggataggtggccctgaaaagggccgttggttttgcggtagtgtactgtagaggtaagctcagccgccgaagccataaagagtgcgtccctggcgcttgagcgcgtacaccacgtccatggctgtgactgtcttgcgtttggcgtgttccgtgtaggtgacagcatcgcggattacattttccaggaaaactttcagcactccgcgagtttcctcataaatgaggccagaaatacgcttgacgccgccgcggcgagccaggcggcggatagcgggcttggtgattccttggatattgtcacgcaataccttacggtgacgcttggcgccacccttacctagaccctttccgcccttaccgcggccagacatcttgaaaccacagctgttaaatctgtaacgcaatacgtctggcagagccacgcagcacttttataatagcatgacggacctgtttgaaaacctcatgagaaggggcgggaaccacagtcagttcccgcccttctgtgcaattctcccttgctcagactggaggagaccaagaggggcctgaggcaacaaaagagcctcagctgggatttaataaatactgctaggtatatatatatatatacacacacactatacttgcagccattaactgagccatcagttcataaactttcgacaaagaagcctgacaattgtcccccacttttcccagaatatcaaataattagtactgtttccctcacagggtgctttttttttttttttttttttttttttttgagacgggttcttgctctgttgcccaggctggaatgcagtggcacgatctaggctcactgcatcctctgcctcccggattcaagcaattctcctgcctcagcctcccgagtagctggggttacaggcgcccgccaccatgcccagctaattttggtatttttttagtagagacggggtttcaccataggccaggatggtctcgaactcctgaccttgtgatccacctgcctcggcctcccaaagtgctaggattacaggcgtgagccaccgcgccgggccataaggtgctttcaaagtattttaagtaactcatatctttattgtctctgagattatttttattgatttatgcattcctagttaaccaagcagggctctttggcatgcaggctagatagtgctactgagggaactaaaagtatatgaaagttacacatttagaggtcaaattaggataagatcaccgagggccgattgaaaacatgactatgtacacccgtaaaagaaaaccttgttgggctgaaatttatgaaaatttatgctttgattgtgcctttaatcatggacagattgtagctagcactgcatcattcaccatattctattactccagcaaattggcatcatagtatccctccaaactatcatagagacagcctgcttgacatacatgctgtgggggtgaccctgggcaagctatactaagtttccttgttgtaaatgtatttttaaaaatctaacttgtaagtatttgttaagttgaaacagataatcctatcaaaatgcttagaatagtgtctagattccaaataagcaatgactaaacattaattatggtatagtacaatattgtgggtgttttcaattcctatccttaaggttcacccttctaaagggatgagagacagtattctaatttgctaaaatctgatttcgagaactcctcaaaataataaataattaaaaacttaactcatcattaatccccataaaaagttccaggtcctttgggtggaatatttggcttttccttcatgacttgtgagaagaaccaagtttatcacagctgtttgctgtttattgagtttatggtacatggaaaagattgcagagtaaggttcttagcctgggatacatagaaagtcttcaggggatctgggaatgagtatagaaaaaaaaaaagtcaaatcttttttttttctttttactattctccaacagaaacagcattttttctgtgtatgaactcaggcaacaaacagtgtaattggcaggacaagtgcttctatttatatcacattctcattgccaatatctcgaaatttcatttaaaaatctcaatcctaaagccgggtgcagtggctcacgcctgtaatcccagcactttgggaggcaaaggcgggaggatcacgaggtcaggagatggagacaatcctggctaacacagtgaaaccccatctctactaaaaatacaaaaaaattagccggacatggtggcgggcacctgtagtcccagctactcaggaggttgagacaggagaatggcgtgaacctgggaggtggaacttgcagtgagcagagatcgtgccactgcactccagc

SEQ ID NO: 585283 - DNA, 4001 bp, Homo sapiens
gattaattgggattacaggtgcctgccaccatgcccagttaatttttttatttttaatagagtcaggtgttcaccatgttggccagactagtcttgaactcctgacctcaggtgatcgacccaccttgccctcccaacgtgctcggaatagaggcatgagccactgtgcccagcccaaacttgcgatttttctatcacttggaatttacataaaccggacatcatgtgtttctgatgtagtgtactatgtacattacatctgtaaactgttcctgacaggcatattcacccgatttcaattaagtgtatgaaagtcacttgtactttacaggacatggggagtacagaagccaagtaaaacgattaagaatcaagccaatacaaaacaaaagcaaaacaaaaacattctgtaagtctggtctccgagaaatcaatgttcaaaaatggggaagtaggggagaggagcctgttttagataagaaaactggagacacaacggaagttatggctggatccttctttaaacaaaccacatctccaagacatctggggcataactgtggaatgacgacatatcttttttgaacaatagacaatgagatccaagcaggaagtaacaaagactttattttcagagggagaagtaatcccaggatggaatgagcgctctgtggcagtgaaggggagctggaatatatatatgccttacagagtcaaccttacatacagattcagtaggtttggaaaaattctatgagtattcatgagggaggagatgaaatcacaaatccgtctccccgaccaaaattggggggcttatgtagcgagaagggcgagaaaacaggaaatcagggagggataaggacgcaatcatgatggatgaaacatagggagtctcacggtctcgatgcaagtgatctggtgtttcagttcctgcctcaggcaggaacatgagttcctaaacatgagttcctaaacatttgtctcatgtgagataaatgctaaatttcaagctttagggtttaaagagagtcaaattcttttattcaaaaaacagcaaatatcataacttctaagggacaactgggttggcttaatagaattccgaaatgaatgcttgcaacctctccttgcgtgagcttatctaccccaggaacttctacacacctaaactcggtcgttaggttaagtaatagaaaacaggccgctagaatttaaggcccacactcctttccaggaagatgattggttgcgctaattcgcgggtccggcccattgccaggcaccggctttgttcttcgctctccgccattttgagcggttacgcagtgtcttgcggttttcccacttatgtcgaaaaccatgcatttttaggtactcaaaataaaagtggtaaggtaaacagacactattaccctagccttttcagtgcaatctaaggccctactacaataaacataaaaggatcgtagcctaaaaaatcgtatgccgaaaccccaaatgtaatttggaacgaaaaaaaaaaaacggctgaaaaatatacgtacctgttgacaggaacaattaacttataaagagaccaaccaatcgtctaacaagtcatgagctcttttgcggaaaactgtgggcggccctgaaaagggcctttgatttgggaagtcgagatgctgagtcgtttaagcggtagcattagccgccgaagccgtaaagagtgcgtccctgtctcttcagcgcgtagaccacatccatcgctgtcactgtcttgcgtttggcgtgctccgtgtaagtcacagcatcacgaatcacgttttccagaaacaccttcagaaccccgcgagtctcctcgtagatgagaccagaaatgcgcttgacacccccgcgacgagcaaggcgccggatggcaggcttggtaatgccctggatgttatctcgcaggaccttacggtgacgcttagcgcctcctttacccagtccctttccgcctttgccgcgaccagacatgaccaacacaccaacgaaaatagccgcaaaaatctgaaaaacaagcgacggtagtattcttatatgccgggaattcggacctaaatgaagactgaaaacgcgcatacgggaactttggtgctgcctgctggccctacccttcacagatcagactgggatgacgtcaccaacgactccagttcccgccggcagagtccgctctccatggagtcatctctgcaagtcttgcgttcccaaagaggaaatttaggcatattttaacaactaaatgagattaaatacattaacatgtttaaaatcatttgctgcttgggatgctctaggacgattgaacaggagctttggctcacaagaccggaactgcagtaatctccttccatgaggagttcagctttgtccccataggcacggttcctctggcatttctgctgcttgctctcttggggacggaacccccttaggaagtgtttgaaaactgcaagatctcaccctctccaccaccaagccaagggaaatctgaccaaaaggattttcctcccgaagagaaaaacacggataattagtgatcccgccgggcgttgtggctcacgcctgtaatcccagcactttgggaggctgaggcgggcggatcacctgaggtcgggagttcaataccagtctccaacacggaaaaaccgcatctctactaagaatacaaaattagccgggcctggtggcgcatacctgtaatcccaactacttaggaggctgaggtaggagaatcatttgaacccaggaggcagaggttgcggtgagcccggatcacaccattgcactccagcctgtgcaacaagagcggaactccgtctcaaagaaaagaaaaaaaaatttttgatcccatgaattctggtcctcgctgtggacgcccgtattacatttttggcttatttttctttcttccctgtttattaaaatttataattatcatttaaatatctagccaactcgcacatctaaacctagaaactcactggtgtgttaatgtttacttctctattgttagttttctgttctctttgatgctggtagcagcctttatcacaagagaattggcaacgtgtaatgggccaagttattaaataggcgacttcctacaggcttttaaaataaaaggtgttgggactcagaaaacaatgctacaaaatgaaggcctccgtagtaactttttctccttctcctaccttcctctttctccctcccattcttccccgaagctagctataggaactagactgcttccttcccaagatggaacatataaaccaaagctagactcaaagctagccataaaacctaaaaaatatgaatccaactttccttctgcctttttgtgtaaaaactggcagtaaagaaattgcctggcctacctcgtttgattgtaggtcataagaccccgattcaagagagggcttgtcctattcccaggaggagagaatgctgcccaagaaagtccaagaatatagacaggccttgctgggctattatcattagctcagtctattagcattagctcgtaccctttgtgtccaatcatatttctacacagctgtccctactttgttgaatctaagcataaaaatgtatgatttcccctgtatctttgagtcttcagttcgaaggctactgggtacatgttagttaatttgtatgccctgctaggcatgcaaatgttaggacttctactgtgaaaagaaatcaaatatgtagaaactaaacaaaaaggaactgtaaattgctgctgttaaaatgccagcaatatcaaaactctgtgagactgtgatatttaggaagaatttacatgcttctataataattttaatagtatttacatatttgtattatatatataaaattgtaatttaatagaacattagttaatacattactgaattttttttttttaagttttttcggctgtaagtttattcaatgcaaaacaatcctctccagttttactgagg

SEQ ID NO: 585284 - DNA, 4001 bp, Homo sapiens
ggaatcaggtaaaggcttcttgaagaggaaaccccaagttgaagaatatttgtggaacagtgtatgtaatgaattaccattgacaaaaaaagaacagatgagaagccacttcttcggtatggtgaaaaaatgaaaacgttaggagtcaggatcgcgggtgataaccgggtaggttgacaaagcacaaggagaaacactttgggttataaattaccagtacttgagaaataaagcagtaaaattatcaatgacctgaaatcacagtaagtgccccaacaaagaattcactgggtaagacaaaaacttgggcttttttttttctttttgagacggagccttgttctgtgccccaggcctggagtgcagtggcgcgacctcggctcactgcaacctcagtctcccgggttcaagtgattctcctgcctcagcctcccgagtagctgggactacaggcgcgtgtcaccacgtctacgtctaatttttgtatttttagtagagacgaggttttgcagtgctagccaggctggtctcgaactcgttgagctcaagtgatccacccacctcggcctcccaagctgctggaattacagatgggattgcagacatgagccaccgagcccggccaaactttacttttttttttttttttttgaggcatggtctctgtcgcccaggcaggagtggagtggcaccatctcagctcactgaaatctccgcctcccgtgctcaagcgattctcctgcctcagcccttgcagattagctgcgacagcaggcgtccgccacaacgccgggctaactttcctatttaacttttttagttgagacggagtttcaccattttggttgcccaggctagtctcgaactcctgagctctagtaatccgcccgccgtggtctcccaaggtgctgtgattcaggcctgaggcaccgcgcccggacacaagtagtggattaagtttaccagtaattgatctgtccacagccgccctaagattactcacgttctatgcctaataaataacactaaggccgggcacggtggctcacgcctgcaatccctgcactttgggaggccaagaagggcggatcacctgaggtcgggagttcgagaccagccagaccaacacagaaaagccccttctgtactaaaaataaaaaattagccaagcgtggtggcgcatgcctgtaaccccagttactcgggaggttgagtcaggagaaccgcttaaacccgggagggggtggttgcggtgagccgagattgcgtcattgcactacagcctggacaagagcaactccatctcaaaaactaaacatgtaatgctagtgtagttaagtcccagccacctaacataggagtaaatttcagaaacgtgggaataaaacacatcacatacgtcataaaaggctgctggtattcccaaaccatttccaccatcttttcctgtgaatgtttgcgatcgaaatacctgaacaagtttctaatgtttcgccttccctttctccttagcacatccgccatcttaggaagatcgctaaaaacggctcggtttaactcagttagaatcccaaatttacaaaacgaaacccaagtcgtcatcagttacagcccttcgtgtgacgaaggaggtggccctgaaaagggccttttatgggtgagctgttaaataaaaagccggggtgaggctcagccaccaaagccgtacagagtgcgtccctggcgcttgagcgcgtagacaacatccattgcagtgactgtcttacgcttggcgtgctccgtgtaggttacggcgtcccgtatcacattctccaggaacaccttaagaacaccgcgggtctcctcataaatgaggcccgaaatgcgtttcacgccgccgcgtcgggccaagcgacggatggcgggcttcgtgatgccctgtatgttgtcacgcagcactttgcgatggcgcttggcgcctccctttcctaaacctttaccacctttgcctctaccagacatgatcgaagacaaacaacaactcttaacttttgcaactttgctacacactgaagccccttatatatcaattatgcggacctttttggagactgaattggaggggcgggaacgaaacctctgtctccgccttttccgtaacttactgggcgtcccctacactattgccttgggaaggaaagggggcggtgagggtaggggaaatgcaagttgatttgactccttcctgtttccttgtttgggtcttgagtgtaggtttctgtgtcttctagtccagtgcctgtgggctctcgaactgataatgtctgtctcctaaaatccttattatttgcaaaaaggaggcagtaacgctacacttgtctaccgaatggatagacaagagaataaaattattatttcttttgaaacagttttgctctgccccagactggagtgcagtggcgtgatctcggctcactgcaacctccgcctctcgggttcgagcgattcttctgcctcagcccctgcagtagctgcaactacaggcgcgcgtcaccacgcccggctaatttttgtatttttagtagagatggggtttcgccatgttgactaggctggtctcgaactcctgacctcaggtgatccacccgcctcggcctcccaaagttctgggattacaggcgcctagctttaatttttaaatgtgaagattctttgaaaatgtatttttactaattttttttttttgatacggggtctcactctgttgcccaggctggagtgcagtggcgctatctcggctcactgcaacctccgccttctgggttcaagcgattctcatgcctcagcctcacgagtagctgtgatttcaggcacgcgtcgccacacctgggtaatttttgtattttcttagtaaagacggggtttcgccatgttggccagggtggtctcgaactcctgacttcaggtgatccacccaccttggcctcacaaagtgctgggattactggcgtgagccaccacgcccggccatttttattaattcttaaaatgtagcaatacttcttaaatttggccaatcatgagacttagcgtttggcagagacatatacattcacatcgtttttggcattcctaataaagaaagacctctagtaagggaaaccaatattaattgaagtttcattcttagtttttcaatgtataatgcaatatctgaggtgtaaagataaggaatcccaggcttgaagacattatcctctaataaatggcattgtattgttggctcgattctggagtctcactaccttgctacctaccactgctttcatgccactaaagcatacatggtaaatcatggtgaataaaggtttgtaaattaacaaaaataatactaataaattctgtgaaatactgtcctaataaaagattccggaagaagtgttctacacacagatcatagggtatgtgtagtagaaaaattcaacattaactcttacagtctactgcttcacattcattgcctcctatatactgcaagggtaacttaaaaatcccgtctctgctggtgcctaaaagcagtgagaagattattcattttgtggagttaagagtctacttaaattttggcttaggttcagttacctgtaggaatagacacaaggatctcaagtgctctcctttttgaggtaggcaccaaacaagcatcattcattcattcaacaatttaatgtccactacatgccaagaatagtgtacaaataccaggtttacaaagataatcacatttattctcttaaagaactcaaaagtttagtaaagggaaaagtacactcagggttagggggcagatatcagaccagcatacttctacttactgtcaggtatttaagggcggagcagccatatcccagctatactggcatcactctgaagcttgttagacatacagaatttcgggcccaaccccaaatcaatggaattgatattacatttttaatgagatctctaagtgggtggtaggt

SEQ ID NO: 585285 - DNA, 4001 bp, Homo sapiens
ttctttaagaaaccctcctccaattatcccatgtgagtaagctacttgtttcctgtcttgaccttagcagaacccaatattttcactacacagcacaaagtttatggccataatatccaaaagaattgatgtaacttaaatgcaagtttctccatgtcacacctcattaacatgcttccaacagcataaggttaattctcagtttctcaatttgcaagaggaggccctcctcaatcaggcaactgccaggcatgcatctttggtcatatatgtattcccagtctccatggcatcaaactacttattgccccttgtgtcttcacactagtggagacctaccctctcccaacagtacctgaactgccctgttcccatgtccctcccctctggctaacagctgatcatgatgagtgagagcaagaggaataaatgtgcctgcatatgacaagtgtcatgcggctcagtgtcctgctacttgcatcctctctctgcagacaggtcttttacacttacctgttcagagacctctcccgtgatggcaccagagtttgtaacagtttattatgttaatttttcccaaatttttattataaaaatattcagaataaaacataacaaaagatgggtttatcagtcatccactacctacattcaatagagtggattttaccaccatccgaaagtaaatgacagactcatgagaatttacacctacacacttcagcatctaacccctaacaataagggaaattccatgtaatctcaatatatcaaacctttctttaaaaacttactaaaatgacctgttatccagttcacgttcaagtttccttgattatctccaaaatgccctttaaaactttagagacagaatgcaattaatacatttagttgctatgttactttaatctccttcaaacttaaagtcctccagtttttctcggtggctttttgaacaaagcaattgtcccaaatgttccacattctggaaggttttttccccctcttgagatgtttaattggctctttgacccctgtactttcataaacagtaaattgagacacgaattattgcagttacaccttatcaaggtgtttctatatttacgatggatcacaagcaaaggcacgaaacaggtaaacttcttttagtgctgctaaattagatcattgaactagcaagggggccagtccctccactgcagacacatttgtcagaacggcacctggcaagtttgtgctaattattgtgtattctctggttattgaaattgcttattaagcagaatataaaagtcgggttatcttggcactaaaactacaattttaattacggagggtaatcctaacagtaaggagaaaaacacactaccataaccacattttgagagcttttaagtgacaatgtagccgttgatgtcctcagccagcccaccagatttctaatctctgaacacacgattaacttaccacctgtattccatgttgtatgtcagccttggcgtaaatttatactttacagcattatacacctaacagcttttgggcacctacagcaataaaacacacaatattgctgagtgcgttagttaagtttccacaatgtcaaacgtgagcccttcggaagaaaacgtacgcggccctgaaaagggccattaacgatattgcaaggaaaggcctggcctcacttaaccgccaaagccttacagggttcttccctggcgtttgagcacgtagaccacggccatggcggtgaccgtcttgcgcttggcgtgctccgtgttggtcacggcgtaccagatcacattttccaggaacaccttgaacacccggcgggtctcctcataaatgaggcccaagatgcgcttgacaccgccatgccgggccaagcgccggatagtgcacttggtaatgccctgaatattatcgctcagtaccttgcgatggcacttggcaccgcctttcccaaggccttttccggccttgccccgaacagacatgataaacaagtcagaactatctctaaacaaaacgattactcgctttccgcagccttttatataacggtagagtagacctttttgaaaactgaaagaccaggaaaggcgggaaaacgtattcagtccccgctcatctacttctagtaataacaagacataagaaattctcttgtagtagggagatttgctggcatttagagaataaggatctctaaacgaaagtgtcaaacatgtacctagaggaaagtatctcgatttttgatgtctgtatgtgtttaaagatttactcctggccgggcgcggtggctcacgcctgtaatcccagcacttttggaggccgaggcgggcggatcacgagctcaggagatcgagaccatcctggctaacacggtgaaaccctgtctctaataaaaatacaaaaaattagcagggcgaggtggcgggcgcctgtagtcccagctatgcaggaggctgaggcagaagaatggcatgaaccccgtggggtggagcctgcagtgagccgagatcacgtcactgcactctagcctgggcaagggcgaagcccgtctcaaaaaagaaaaaaaaaagatttactccttccctgtatattagagcatttaccatgctgaagttgaaacaagcccaaattccaagacataaaagaattcctaatcatattgccaagccgcccagctaaagagaagtagcctggtttttggtttcgaatctgtgagtgactgctctctcaccgatattagacatgttaatctgagtttcaatggccctatctgtaaaaagggtaaatacttgttaataattgagttactttaagcaaaacactggcatatagttagtaaatgatttttttttaaaatacggagtttcgctcttgttgcccaggctggagtgcaatggcgcaatctctgcccactgcaacctccaccttctgggttcaagctattctcctacctcggcctcccaagtagctggaattacaggtatgtgccaccactcccggctcatttttgtattttagtagagaccagatttcacgttggccaggctggtctccaactcctgccctcaggtgatccgcccgccttggcctcccaaagtgctgggattacaggcgtgagccacctcaccggccagttggtaaacgaattcttattgccacagcctttttttacagacaaaataataatgcagaggtaaagcacaccgaaggattttaaaacattgcctttgcaacaccaatacattcagtgtgctttcacttatattaagcactatacaattaagcaatgaagaattgcccagaaaaaagataatgtaaattgccagaggctccatgccctgttctcatgtggaggacagaaggtacagggggtgactgtcttctggggttgatacaacaggaaactcagggaaagctgtcataaatgttaataggagaaaaggggaatttgctcacaagccaaaataaagacataagcaccactaaatttttacattacaaaatacttgctgagctagttaaacgagagcatttaagtggaaataaatgatgtctctaaaatagaatgttcaaaataacaatggattttttattgtgcagttacgatgcaccaaacaaacagtcctaaagatcatgggtttttgaagcagggtcagcaatatctaaaaaatcatgtaactgcataaatgaattatggcctaatgagcaggtcaccacaacaaaaagccaagagtgcaaacaactatttgtggggaaaacaaacaaacaaacttgataaaccatggaattccaagcaataaaagcagcaatcccatcacagcctatttctacattattttgaaataattagattttttttttttttttttttttttttttttgaggcggggtctcactctgtagcccaggctggagtgcagtggcacgatcccggctcactgcaacctccacctcccaggttcaagtgattcttctgcctcagc

SEQ ID NO: 585286 - DNA, 4001 bp, Homo sapiens
tccattgattttctcgatttcaaagttataaccctacaatttgcttgctgaccacaaagaggaaaaatctgattttacaatggaactatcatcctaaagcagcaattgtcctattatcttcaacgtagataaaccagacatatgtctctgtataaactgacaagcatattaacctgatttcaactaagtatataaaagtcacttctgctcaggacagagtatagaagccaagtaaaatgatgccgtaagaaaagccaatccaggccgggcgcggtggctcacgcctgtaatcccaacactttgggaagccgaggcgggcggatcacgagctcaagagatggagaccattctggccaacatggtgaaaccccacctatacttaaaaataccaaaattagctgggcgtggtggcgcgagcctgtagtcacttgggaggctaaggcagtagaatcgcttgaactcgggaggcagaagttccagtgagccgagatcacgccacttcactccagcatggcgaaggtgagactccgcctcaaaaaaggaaaaaaaaagccaatccaaatctcctacaagtttggtctctagcaaatcattgtcctgatgcctgaatgtgtactttttcaaaaggcgatcattgctggttaagaatttaagttttcgtggccgggcgcagtgcctcatgcctgtaatcccaacacttttgggaggtcgaggcgggtggatcacgagatcaggagttcgagaccagcctggccaacatggtgaaaccccatctctactaaaaacacaaaaattaggcgggcggctgtaataccagctattcaggaggctgaggcaggagaatcgcttgaaactgtaaggcggaggttgcggtgagccgaaatcgcgccactgcactccagcctggatgaaagagcaaaactccgtctcaacaacaacaaaataagttatggtgatgtttctatattgctcactaagcggtaccctaccttttaatattttcgtaatattcaaaaacacattttaagtctattggaaacaatacttgcaagctctcaagtgaacatttatattgttaccccacactgccttttgtagacgagttttgtcaccaagtcaaaagcagcagcgcgcacgccgcctggacttgggtctgcgatcctactcacgcagatgtgttgcgctcacggattcgccttggtttaaggcccgccgtctgggtgcgagctttctttgtttttagcccttcccgccattttggaaagggtaacttgcagtctctccgcgaagtttccaacttctgtagtctttgagaaccttacgaacgcttcaagcttaaactgaaggaggaaggcccacgggaattataaactgtcacaatccagcttactcactgatatctagtgttaaaatgccacaagaaagctaaacatattcaacataccaacttccctcaagcagaaaacagtggctttaagtactttatgcccaaatcctaaacatgcgagattaagcacgagtaattaaacgttacctgcaaatctacacatgtgcacagtaactacttctcagcaaaaatctggaacaaagcaggataacaagatgtctgctcttttatgaaaaaagtgggcggccctgaaaagggcctttggttgaaaatgaaaataagagtgcagcaagcaggagccttagccaccgaagccgtaaagagtgcgtccctgtcgcttcagcgcgtagaccacatccattgctgtcacggtcttgcgtttggcgtgctctgtgtaagtgacagcgtcacgaatcacgttctccaggaacaccttcagaacaccacgagtctcctcatagataaggccagaaattcgcttgacaccgccgcgacgagcaaggcgccggatagctggcttagtgatgccctggatgttatcgcgcaaaaccttgcgatgacgcttagctcctcccttacccaaaccttttccacctttaccacggccagacatgactaagcaacttctaaaaccaacttaagaaacctaaacgccaaggcaaagcaacgcccttatatgccgggaattcggacctaattgaagactgaaagcgcgcataccggaactttggtcctgcttcttggccccaccccgcatagcccagccctggatgacgtcaccaacgactccagcctttggcatctgagcgccggctccgcggaggcgtctcttgcaattgctgggaaataggaatgagagttttaaggctgttttaacaaccaaatcagattaaataaattaacatgtttaaattgttatcaattgttccttcagttgctttaggacgattggagaggagcctcggtccacaagaccggaagcctgaggagtgcagctttgtccccaaggtcacagtgactggctttctgctgccggctgtaaagcacatgcggaccgaaaccccccttcggaagtgtttgaaaactgcaagatttcaccctctccatcaccaagccaagggaaacataaccaaaagggttttcttcccgatggcgaaggcatgataggttagtgattcgtggtagaattattgccctccgcgcggaggcctgattctattcccagtttgttctcttctttccctgcttattaaaatttgtaattgccatttaaatatctaactgcccctcacaactgcacccagtgtgtaggtttcggggtgggggtttttttttttcctttttttaattttattgagacagggtctcgctatgttgcctgcctgggtcttccaaagtgcagtgactacaggcgtgagctaccgcgcctagcccaccagtgtattgatatttatttttctatccctagttttgttttctgtttgattctggtgattcctttttccaaagtgagttggcaacctgtggtagccaaagaagtaggcaactgctcgtaggttttttcttaaattacgaggtagtctgaacgcatctcctgtaagtagttaagagtactgtgagaccgtgtgcctggcagaacagcagagtggcgcagcggaagcgtgctgggcccataacccagaggtcgatggatcgaaaccatcctctgctaggtcctttttttttctccccccccgtctattttcctgaggatcccttttttttaagttacagttttttaggttaaacaatgacgaaagaaaacaaaatgaacccgagtatttctttaattccagaattacaagcatttccgggaaataatgtgaaactacaatctctgcatgtacaattttgattttcatggacacccaagtgtcattaatcaatatgtcatctgtaaacaaagcaaatttctcttgtttagaggctataccactgttgcagccagttatgacagttgtaagttaacctgccaagcaaggagaatgcttacataaactgagtgccaagggtggggtggggtgggagcccaggaatggagttttatatcttttgatacataattcagaaagcactatttgccaagtagttaaggcaatcgactaggaattcctaaatccccacacagattcttttcacctacaaggatcttaatctcggaaaatgagttgcattttgaggtgggtgtggagtcttcatagcactgattgaactctgacctgagaaaaacatttttgcggaccctactggtaaatgtgtctctactctctaccatcctttaatatctcaaatagaactattcgctgtgcttattttttaaacatatgtgtggactgctttatgcttctctctctcagaaaggattcctattcagatatttatgtgtcacatactgtattaggaactaagaaaaaaaaaaaaccttaagtagtctacagtctagatatgcttttgttgtttttgttttttgttttttgtttgtttatttgtttttgagatgaagtctcactcttgttgcccaggctggagtgcagtggcacgatcttggctcattgcaacctccacctcctgggct

SEQ ID NO: 585287 - DNA, 4001 bp, Homo sapiens
aacaattttcaacaaactttcagtgtatcttaggcattactttcctctttcaccctttcttttgtcccttttgtaatactttgaaaattttaggtattgttaatcattgcttatttagaaagtaagatcaatcttttatcaggtcttcccttagctcgctcttgatgctactcttacagcgatttcagaaaagccttactatccaattcaagccaaatcaggacataagccgcctaaatgttttttgttttttttttttcccccagattgatgcctgtagctcctggggaaagtggaagtcagataactcctttatgaaaaggcagcattcaaaaactataaaaaatataaatccaacattattaaaattttgcacatccaaagatatcacgaacagttaaaaacaaacccacaaggtgacagaatatatttgtcacatactgacaaaaagttaaaactcaaatatataaagaatatttacaaatcaaatctcataaaataaaaactgtagagaatctgaatagaccattccgaggaaagcgggaaaatctccaaatagccaaaaatctcatttagaaaaactccgatttcacattaggaaatgctgataaacaataactctcaagcactgctggtggaatatgggagtataaatttaaaatactaccctggaaagcaaattgttcatttttattcatgttgaatatgcacatttaccaaataattccacttccatgtaaccagaaaatgcacagctgtatacagtgctgttttgtaatgaggaaaaaaaatcaacagagaaatgaataaagtatttactgacacattagaaaactagattaatggtaaaaataacctagaactgcacatttcaacacggatatatttcaagagcaaatgtaaaaattcatgacgattaaaatagattaggggtatgtgcatctaaagttaaaacgcgtgggaacagtaaacaaatttagaatatcagtttatcctagaatattagttaattctagataggaaaaagggagggctgtgctactgagaaagggacataaggattttagatgcacttgaataagtggtgtggtcaccagcgcattttgtatacttgatatattccagtatttaaaaggcaaacatataaaggaatattattactaagactcttaagactgccctactgttctacagtagtaaaagcatggtctgtccccctcccccccatgcagagctctgtgcccgccaagtcctcttaaaccagccaccacgaagttttcctggaggttctagcatttagtggagcccatcaaactcattatctcctgagacgtatttgaaggtccagagggaagttaattatctagcccgcccctatttggaccgcagaccccttggctttctaaactaatccgagcggtaaaccggctgcaggcaatttccaggcagccgccagaagttactggccagcagaggctcttctggccttggaaaaatctcggcccaaggtcacctgtagtcatcagcccattttcggcgtcgagttaatcttgtaaaataggatgacagaactcactgacaatggccctattaagagactcagtttgcagtcatttcaactcttttgttgaaagcttaggggccctaaaaagggcctttttagagaatgactgggcttcaaaatgccatttagccgccgaagccatagagggtgcggccctggcgcttgagcgcgtagaccacgtccatggcggtgaccgtcttgcgcttggcgtgctccgtgtaggtcacggcgtcccggatcacgttctccaggaacaccttcaacactccgcgggtctcctcatagatgaggccagaaatgcgcttcacgccgccgcggcgagcaaggcgccgaatggctggcttggtgataccctggatgttgtcgcgcagcaccttgcggtggcgcttggcaccccctttccccaggcccttacctcctttgccgcgtcctgacattatcaagtggtcagagaacaaaggtctgctgcctgtgatggcagctttcttttatgggtaacctctgcggaccagactgaaaaccggaagagctttggcgggaagtccctctgcattgggggaggggacctaaaagggaaacaggcctgctgtgctctactccctcttgttctccttcagtcctttttaatcctcaagacctaggctgtttttccttttttcatttaacatgattcctgcctcataacaaaaatgttaacattatagaagatacataaagcaaaaagaatgttatctctgcatatatgcatgttttcctttaacattatttgtatggaactatgctattttgtggcatttttctccttaatatacaatggaaatatactccatatgctaaattcctagcaatagaacaagatagactcatagaatttaaagatcgttcaggtatattgctaagttcttttctacttattttcatttctagtgtttggggtggagaattatccccccaaatatcgagcttggtaatggtgggtgtttttgaaaattgagggttctcagaaacaagtctaagaatcaaggtccctctaactttgtcctgtttctcttccccaaatacagggagggactttctctggaatttcctgatatgaccaagaaagcttcttatcaaaagaagcacaattgccttcggttacctcattatctactgcagaaaagaagacgagaatgcaaccatacctagatggacttttccacaagctaaagctggcctcttgatctcattcagattccaaagagaatcatttacaagttaatttctgtctccttggtccattccttctctctaataatcatttactgttcctcaaagaattgtctacattacccatctcctcttttgcctctgagaaagagtatataagcttctgtaccccactggggggttggggtaatattctgtggtcctcagccctgtaccttaataaatttgtatgccttttctcttattaatcttgtcagttgattttcagtgaactttcagaggccaaaagggaggttttctcttggcccctgcaccagtagcagttcctgatatgcctacaaccttaactaatgctgggtagaaccatttaaagtaatctaactttactaataaggacttgatttcttgtatatagaaataacttttcaaaaagttaatcagttggttagtcagcacaatacattaactatttcccccactgatttgaggaacttattatcatatactgaatatatgagccaccgcacccggcccatttggtgattttcttgctactctttattttaatgagtaccttacagcagtgcttgaagtattttcaaagtattccacttaaatgtcataaagtaaatgaagataaacttttcattaaaatactttagaaatttttgcatttatgttgcaataaaagaaaacttgccatacacctttggaaaacaaaaaaaaattgatatgactggctgtaacttgctgtagctgaattcagtatatgttgtaaagagggtaaggtagcataggttaattgaatacgttaatctaagggtaaatacaaattaaaaatgagaggcttaattatctgttgaaaacaaaagacttccctttcctttcccatcactttcaaaatgtctttctctgtccttttaaaatgtatgtaaatccttttaatggctaaataggccttataactcagaatattttctcaatgcctggagagccatccctttgaaatgttaatcattaaaaaagatagtggtctgtctcccagtttccagcgagaaaatgggctgaactttagctgtcacctgacttcgaattgcaaaacctatccaatgtagccatacataataagcaagatttctttctgcttttgcaacctcttcataaggtttcctgtgataagcaactctccctggtttaatgcttattcaataataaaattatttccttt

SEQ ID NO: 585288 - DNA, 4001 bp, Homo sapiens
cctgtccgtccctgggcaatggaatgtctcggtataaaacccgattgtacgttccatctactgagatggggaaaaaccgcctatctcacctatcaccgcctatcaccactccccaatctcaagtacccagggacacaaacgctgcggaaggccgcagggtcctctgcctaggaaaaccagagacctttgttcacttgtttatctgctgaccttccctccactattgtcctatgaccctgccaaatccccctctgtgagaaacacccaagaatgatcaataaaataaataaataaataaataaataattgtttttcatgtaaaatacaatttttttcccttaacaaaaattcaaattaaaaaaaaagtatgattacaattcctttgtggtaattacttggactacagagttttgtacttttgcttcaactgaatcaatgcgactattattgtccttccagatcttttgatgtcaccaatgacacatccatcattttcatcatcataacaataagtgactgaacctcaccaaaaagaaaacaaaaaatagcttttactcactagattccatttatgaatttaaactcaaatcaagtgtccaatgccagatgaatggataaggaaaatggggcatatatacaatgaaatactactcagccttaaaataaatcttgtcatttcttatagatgaaactggagaccattatgcaaagtaaaacaaactaggcacagaaaaacaaaaactgcgtgatctcacttacatgaggaatctaaaaatgttgaactgagtaaaattgtcattgccagagaacaaggatggaggtaacaatgggactcgggaggtataaatactggagatctactttaaagcatggtgataatagttaatgtacttgatactggaaaattgctgataggccttaaatgttctcaccacagaaagtgaggtggatgttaagctcgatgtaatcattacacaatgaatatatgtcagatcagattgtacatgtaagttgtcataccttaatgagggtggaggaaagtaaaaaattatcttaaaattctttaagaggtcgcactttgagaggccaaggcgggcggatcgcgaggtcaggagatcgagaccatcctggccaacatagtgaaaccccatctctactaatacaaaaattagctgggtgtagtggcgcaaaactgtaatcccagctactcggcaggctgaggcaggagaatcgcttgaacccaggaggcggaagttgcagtgagccgagatcgcgccgctgcactccaactcgcagacaaagacgaaacaaaaaaaacccacaaatacttgtggatttggaggcttttcaaaaacgatttccgattaccactgtcaagctcactacgggggttacataaacgtttctggtactgcacattctgtgtacgagtattttctccattacgtaaacaagcttacgaattttgagcaagtttagacattacatctcgtaattagtcctgcctacagtgaccccgggtgaatggccacacgtgtgccgctgtgttcaaaaaactgttccccccagaactgactcagaaccaagcaaaattccgtacctaccaaaaccactcctcagtgttaccactcttcagctgagaaagtagggtggccctgaaaagggccttttattgatagaaagggacgctcaaccaccgaaaccgtagagggtgcggccctggcgcttgagcgcgtagaccacatccatggcggtgaccgtcttgcgcttggcgtgctctgtataggtcacggcgtcccggatcacgttctccaggaacaccttcagcaccccgcgagtctcctcgtagatgaggccggagatgcgcttcacgccgccgcggcgagcaaggcgccggatggccggcttggtgatgccctggatattgtcgcgcagtactttacggtggcgcttagcgccgcctttgccaagacccttcccgcctttgccgcggccagacatgacgagcaagaggagtctcacccaacgctttgtgaggcctctggcctgaggcagcgcctttatacgacagttggcggaccgaactgagaacctgaaagaagtcggcgggaagtcccgccccggtgggggaggggaaatctaaagggccaaaccgaaataggggggaaaaaaaagcgagcttcttgtttccgtgttctgaattttgtaatgtgcaaagtattctgttaccacgttatgaggctttaaaaaattgcttttgaacgcagaagatatacatcaatactgtggggaatacaaaaaagtgaccgggctcggtggctgacgtctgtgatcccaccattttaggaggccgagatgggagtgtacctgggcgtcaggagtttgagatctgcgtgagcaaaatagcgagaccccatctctaccaagacaacaattaaattaaattaaaacattagtccagcatgatagcgcttacactttaggagacactcttttttttaaatatattaaaaaaaaaaaccagtacagtaacaacagcctgttatcccatcttcccatcacacaaagagctctactgctagctaataagataatttggtgagcagataaatgcacattttttcccacaaaatgtatgcagtatatggcattttacaacttcgcgttgttttaatcaatttcccttatttaaaaagtttacaaaagtgattttaatgtctttattatttcttctcctgaattctgcctgctacagtgttaaccaattccctaggaatttattaatcaaccagattttttaaataattcatcttttccctgcggattaagtaccacctttaacattatacatactcggaactattaccaaaattctattctgtctataatttaatcaaggtggtttgccaaagggaatctatgttcacggttaaaagcttagaaaattcacattaggaaaaattttaaaagcagtaatttatatctgcttaatattccatcataagaattttctaggtccactttcacagtatttctagtacttagcaataatgtgctaattttcttttcctaatttaaaggagaactgtacaaaatttacttcctgaggaaaatgtagaattgaagcgctttgtcacaaaggatgcagattttaaggtattttgataactgttactacattttcctcaaaagttttattccattcacttttgccagcagtaactgctgtgtatgtttaccagcattgagtattatggtttttaaattctatgttacattcagaatttacttttagttttgttgattgagtcttgagttaatgaactagttacccagcaagatttattgatttgtttataagtaataaattgtcatctttaatataagcttgtttaggccgggcgcgctggctcatgcctgtaatcccagcacttagggaggctgaggcaggcaggtcacttaaagtcaggacttcgagaccaacctggccaacatggtgaaaccccgtctttactaaaaatacaaaaattaactgggcgtggtgtcacatacctgtaatattagctactcaggagggtgaggcaggagaatctcttgaacctgggaagcggcgcttacattgagccgaaatcacaccacagcactccaggctagacaactgagtgagactccatctcaaaaaaaaagaaaagaaaagaaaagaaaaaaacaataagaaacctaaaaattttattttttcgtgtaaaaactggccacaaagaaattatttgacttaccttgtttgactgtaagtcgtaggacctccgttccagagagggccctgccccatatacaaaagaaatactacacagagcgcccaagaagaatctagacaggcctggctgggtttccccactcagtctcttagcattagatcatacacattatgtccagtcatatttctacatagctgtccatactttgttgaacctaagcataaaaatggacaatttcccctgtat

SEQ ID NO: 585289 - DNA, 4001 bp, Homo sapiens
gagggcagaggtgtgatctcggcttactggaacctctgtgtcccaggtttaagcgattctcagcctcagcctctcaagtaactgggattacaggtgtgtgccaccacgcccggctaattttttgtattcctagtagagacggggtttcaacacataggccagaatggtctccaactcctggcctaaagctgtctgccagccttggcctcccaaagtgctgggattacaggcatgagctactgcatcgggcccagagagcaaccttttctaacagccacattttagtactctagattcagccaggagttgtgtaattaaacctttgtctattatgaaatcataggaaatacctgtgtcaagtgcattttttcacacaatttttgcaaatggagacatcttcattattcctatagtatcatatgtttttaaagtttgtactcacactttgggtgataaatgaaggacaagatccttccctatccttgtgaggatgactacagcatgactggatgggcttgctatgatttttatctttccctgtgttctcactaccgttttattaatctcagttctttttcacagggtagcacagaatttaactagcagaaagagatccagccatgtagaccagagatttgtctaagtgacggcatgtaagaatcaggaaggaaagttttttgtttaaataccaacaggttccttccttaaagcaattattatttttcaaatctaacccacaaggtgatagtatccttaaaccaattaaatcagaatctcgggttggataacctcaaatatgacttattagcacttcccattaatcactggtccttcaggcctttaagtttacttactaggaatctcacttttaataccatcttatcaacttcagttgtaaataagagaacactcaaaggctgaggaattctcagcggtaaagctctgcccacgttaagtaacaaaggataagttagtctttgttgtgatcactttgttgtactgataagctacgtatttctactcaaggattcaaattctcacctttctcaagaattgggccaaaaccgataaactaaacttatttacggtccactgattaaaggttgttgcataataagttcttgctatgttcagcagttggattcacagcgccagaaacctataactgcttgactttcctccccactacactgcgaaaattgccccttaaatgtaactaaccctaaaacctcaacagtatcgtggccaggcgtggtggctcactactgtaataccaacattaggcataggcgaggggattgaggccaggatatcgaaactagcctgggaaacacacggagacccggtctttggaaaaataattagccttgcgtggtggtgggcgcgaggttccggctaatcgggaggctacagtgagccatgatgacactgcactacagtctgcgcgacggcccatgtcagtaagctctggagcacctgaaacaagttgtgttgggtattttatttactggagagcgattagtgactgatgcctacttacagcgactagagacgcatgctccgatagcagcacaaactcagcaggcgcgaacaaatggtaaagagaaactgggcaaacaagcatcacggctcctcagctgagaaagtgggggccctaaaaagggccttttgttgatagaaagggacgctcaaccaccgaaaccgtagagggtgcggccctggcgcttgagcgcgtagaccacatccatggcggtgaccgtcttgcgcttggcgtgctctgtataggtcacggcgtcccggatcacgttctccaggaacaccttcagcaccccgcgagtctcctcgtagatgaggccggagatgcgcttcacgccgccgcggcgagcaaggcgccggatggccggcttggtgatgccctggatattgtcgcgcagtactttacggtggcgcttagcgccgcctttgccaagacccttcccgcctttgccgcggccagacatgacgagcaagaggagtctcacccaacgctttgtgaggactctggcctgaggcagcgcctttatacgacagttggcggaccgaactgagaacctgaaagaagtcggcgggaagtcccgccccggtgggggaggggaaatctaaagggccaaaccgaaatagggggaaaaaaaaagcgagcttcttgtttccgtgttctgaattttgtaacgtgcatagtattttgttaccacgttatgaggctttaaaaaattgcttttgaacgcagaagatatacatcaatactgtgggaaatacaagaaaggacaagaaattaagaaactacaatgttatcccatcacacaggctagttaatcatgtattttgcagagcagttgcacatatttttccaagaaaatgtatacagtgttgtatatggagttttgtaacctccttatattgattataatttaaccaatttctattaaagagataaaagtgatgttttggtgtctatgtttcttaggaattatcaatagttataatcagttccccagcaattttttaatcggctgtattttaaaaataatgttttccacattcaacataaatgtactttttctctatacttgggaccaatattgaaatttatgattttattacaccaaaatttaaattttattacattaatatttaaaattgtattagaggtctcatgatttggtactacgggtctccgcattatttcctttccaaatttcctaatctgtttcaccaaggtttctggacaactttagagaccttttgtgaagtttgaataaaatctcttcgagattttgataattgcattagctttaggacttaattggaatagaattaaaatccttaaaacaagctcttataactagaaaattggtgtttgtaggttttgtgtgtggggtttttttttttttttggaaggagtctcgctctgtcgtcaggccggagggcagtggtgcaatctcggctcactgcaacctccacctcccgggttcaagcgattctcatgcctcaacctccggattagcgcggactacaggcatgcgccaccacgcccagctaattttttgtatttttagtaaagaacaagtttcaccatgttggacaggatgctcttgatctcttgacatcgtgatccgcccgcctcagcctcccaaagtgctgggattacaggcgtgagccgcttcgcttggacgcttgtaggtttttaaaaagacacttttatatgacccaactaaagatttgttatcaaccattatggagcaactttgattccgtatatttgattttctttcttattaataaatacagggttatactctgaatttttttttttttttttttttttgtggagacggagtctcgccctttcgctcaggctggagtgcaatggcccaatcttggctcactgcaacctccacctcccgggttcaagcgattctcccacctcagcctcccctgagtagctgggattacaggcactcaccaccacgcccggctaatttttttgtatctttagtagagacggggtttcaccatgttggccaggctagtctccaactcccgacctcgtgatccatatgcctcggcctcccaatgtgctgggattacaggcttgagccactgcgctcggccactctgaaattattttaacatcaatgaaaattataaaactcctataactattctaatataatctcttagtattcaattctttgtttagaaagtagttaagagttgaaactctggaaatagaaaactttggttttagattaaatgtttacctttcagactcgagctgacttgttaccgatcagacacgaggtgacttgtttattctttttaaatctttgctcatctacaaagttagaataggatagtgacggtactgttggggtgcagaatgattccccaaaatgtggttcttgggcatgctgagcgcttttgaacattgaaaggcctcagaaataagcttcagaatcaaa

SEQ ID NO: 585290 - DNA, 4001 bp, Homo sapiens
caccagagcctgtggacactcattgtgctacttgttcccttcagtaggggcaggtagatacgcaggagacacattcctcaaggataaaaacaggaatacttttcaaaactaaacttcatctgtaaaattgaccccatgacatgtcttttttgagtgataatccttatcagtaggaacaggttctgtatgtgaaattgatttagcataccaacagcctgtgacctgactcctgcattatagtgtgttgggccactaccacgttttgtccacagcttgtatttaacatggagctaagacacgtctcaaaagctacagcttccttttggtgacaattgaggggctctgaaaagagccttttggggttggacagacttcttgggctgataggaatatttatgccctctcccctcggatgcggcgcgcaagctggatgtctttaggcataatagtgacgcgtttggcgtgaatggcgcacaggttggtatcctcaaatagccccaccaggtaggcctcgcaagcctcctgcagcgccatcaccgccgagctctggaagcgcagatcggtcttaaagtcctgtgcgatctcccgtaccaagcgctgaaaaggtagcttccggattagcagctcggtcgacttctggtagcggcggatctcgcgcagggccacggtgccggggcggtagcggtggggcttcttgacgccaccggtggccggagcgctcttgcgagccgccttggtggccagctgcttgcgcggcgctttgccgccggtggacttgcgagctgtttgctttgttcgtgccatggctaagtagacgtacctactcaacacaaatgagagaaaaaaactgatcatcccggtatttatagctgccctcgcgttctgattggacagtagactgtgccatgccacgtctcacacacggaattggctcccagtttaatctgctagtgaaagggagacattccgcctctgttttgggtcaagaaacgtaaaatggttttgctagctaaagaaaaacaaaaacggaaacaaaaaaaaatcccccaaaagtctaggatttttcatgcatcaaaatcctgtttaaatataagcttgataaatctaaacttgccttgcactattttaattacgaggtgtcattactgatttgacaaaaagttaaagaacgtaaaggaaaagtgaaactagagtaaatttgtaaatggaggcattgaaggggatatgaaattcgagcgttgtggtatgccagtatttctcaaatttaaacgtacttaatgttttagaagttggccgactttttctgtaaagggcgatattaaaacattttgggcgttgcggaccacagtgtcatagttacacagccctcgcattggtagcggtaaagtaatcgatacaagataaatgagaccggctgtttcattatgacttttgcaaaaaccagagaggcgttatagatttggccgtgtatcagagaagccggcacttttaaccactaagtaatgctgaaaggggcaccgaacctcaaacttcagcgactgcttatgtggaatcgctaatttgccaaaactgccatacgtttaagtgttcttaagaaattaactatctttagtctacagctctttcacagacttcatgggtggccctgagaagggcctttgaggaaccgtgtaagtaagtaaaacactcagccgccaaagccatacagggtgcggccctggcgcttgagcgcgtaaaccacgtccatggctgtgactgtcttgcgtttggcgtgctccgtgtaggtaactgcatcgcggattacattctccaaaaacactttaagaactccgcgtgtctcctcgtatataaggcctgagatgcgcttaacgcctccacgccgtgccaggcgtcggatggcgggcttggtgatgccctgaatgttgtcgcgcagaactttgcggtggcgcttagcgcctcctttgcccagacccttcccgcctttgccgcgcccagacatgtcttgtactaaacaaaatgcaacacggcaagcctcgcagcagtactttatatagtaataaatcggacctgattgggaactctccacaccagctgcatccggtcggccgattcacagaccttgcgccctgcccacgacttcaggaaaaaatggaaaagggggtacttaaactccagtttctaaaaatgatgcccagttaaaaattactcagctcatcttgcccttctacagtgttttaggctgaccaccgctgcattccattgtctgggtctttgcagcctgtttttcctgtcacctcttagcatcgattgttctagtgctttgtggctgctggaatcaaatggcgccatctctagaggggtaatcacagtcgtttcgggcatttgtgaaatagcgtgtagaaactgcttccgtacaaactcgaagtgatcagcctatggagtggctgactgcaaaagacgacgcctgatgatagctccaaggtgggattcctcacctttctcaaatttggttctctattcttttccttatattttactctttctgtagctgtcctttctgttcctttctctccctcgccaaccacatttttggggcaagaactttctatttttttttcctcattccacctagaaacacttcaggaagctgtttgagaaagaaaggtggcttttaccctgtatttccttagaattgtgaaggtgccgcttgagctccctcatgttcctcttttctgttgaactaggaaatcagctgtgcccagaaaccctgtcttttacatttacaaataaagtgcaggaggaaaagaccgaggatgactttattccaagaaaaagagtttcaaatggccggacgcggtggctcacgcctgtaatcccagccagaagggaggccgatgcatgtggatcacaaggtcaggagttcgagaccagcctggctaagatggcgaaaccccttctctactaaaaataaagaaaattggcctggcgtggtggagggcgcccataatcccagctactcaggaggttgaggcaagaaaatcgcttgaacgcagaaggcggaggttgcagtgagccaagatcgagcccctgcactccatgcactccagcctgggcaacaaagtaagagtccgtctcaaaaaaaagtttcaaataaatgttgtgtgaccttcctgacctaggctggctctgccttgccctgccttccagctatcagatttcgtttctcagtaatgtttaccttttatatttcaaatgtgtatgattatttacctctttagcaaatatctaattttattctaaaaatcagtctctgcaagtacattatgaactactctatgattactgtatgtgcaaaacattacatactcatgttgtaatagttaatcagtttctcactgagctaggctggcctctttttccttttttttttttttttttttttttttttgacagagttttggtcttgtcaccccaggctggagtgcaatggtgagttctctgctcactgcaatctccccctcacgggttcaagcgattctccgcctcccggattcaagcgattcttcagccttagcctcctaagtagctgggattaaaggcacccgccactacgctcggctaatttttgtatttttagtagagacggggttttgccgttttggccaggctggtctcgaactcctgacctcacgtgatccgcccacttcggcctcccaaagtgctgggattacaggcgcgagccactgctcccggccttattttttgtatttgtagtagagacggggtttcagcgtgttagcctggatggtccctatctcctgacctggtgatccacccgcctcggccacccaaagtggtgggattacaagcgtgagccatcgcgcccggcgattaacctcttttttgttattagttcaggctgtgacccttatggtctcacaacttctgtaccctacagcattgacatctgtgtttttcagaggtgtaaatttttttttttt

SEQ ID NO: 585291 - DNA, 4001 bp, Homo sapiens
caagagaacacttatgagcacctactatgtgcctgtgtactttctacacattccctaatttaatctgttaactaagaaggtagctatcatttattcattttacagattaaaaaaaaattggataagtaacttgtccaagataaacaactaaagaatgtggtactgcatgactcagttatatccagtgcttattttgtggagctgataacatctactttcaggatttctttcaagaggcgcagcaagtcatgacgacttatcttggtgtcaaaccggagtgggttcaaagccaggctttaccccttactgtgtggccttgttcaggttacttaacctctctgaagatcagatttcccaactgtaaaattaggaaatattatccacatcagaaggttgttataaggactaaactaaacattgtagacgctttgcctgtcacacaaaaacgctgaactattaattctccttaagaaagcctatatgggaaggaatgtgtctaacatcccagtataaggttttagaaatttatggtttcattacagcaaagaaacagaaggtaaagaaggccacgattaacttcagtattttatccctgatctggctgtatgtcagctcagcacaaaattatttgcaatttttaactacatggtaaaataatacaaaaaaaaatgatggtctaagtatttcatctagcattgtgctaagtgatctataaaagatagggtttctcagctccttgctctaaagaaacatccactatctaattcaggaaggttctgattcaataaagaattgagacacagctgaaccaaataaattgcatgaatgcttaactacgttcgttgttaaacttaaagcttttaaatggtaacgatatttggaagtttttaaagcgtgaactctgactgtaatccaatcatgtgatcccatgggatccggagcataaatgtaaaatatgcacattccctgtccgtaaaggctttctgctaccccgttcattgcctacccactgtccctagctgtccatcccatatttaaatccttgtggggggaagtgggtatttccaaagacagcagcattgtagcgactaggacgagtgataaaccgttcctttacgggaaagaaataaatactacatggagcaaaaacatgacacgatcaaaaagcgtaaagacagttgcaaggagaaaaaacatgaatgaatgtggagggcggagcctgggaaaacccctctgcaacgctgcactgaacaaagcgcttcgcatgccaggaggagggggggaatggaagtgccagctcaggaaggagcctggagtggatgcagagagctgaggaggaggaggacgagatgaggcgagcgcggcagccctgagactcctcctcgccgcctgctccgccgccgccccctcccctctccagccagcaactccttcccgagcccgaccccaaggcgagcccgagccgacccgcaccccaacccaccgcccccttcccaactgcagctggcgcgcactcccaacccggaaagaaactacccaggtggccgggagtaaacaggcacttagagcaaagaacgaaagggaaagaaacccacaaagccgggaggttgggatgccgaggcctggtctctttcaccccccaccctcttgcaaaatgcgtctgcggctggaaggcggctggggaggctgggtccctctgtacctgctcggctcgcgcgcggcgagggcgcccagaagtgccaagggtctcccgcacgcagccatcccctctgcaaggtcggcggttgcacacacacgcacacacacacacacacgcgcgcccgcacgccccccgcccgccgaagggatgtgctcctgcccccccccccctccgccccgccgccctccccagctgcagcgcccccgccgcggagcccgcgccgaacctgctgccaggacgcccggcggagccgctgccgctgcagccggccctggagctgcgctgctgatggcggcggccgcggctcgggatctccgcgacccccgcgcggcggcggcggcggcgcctgggatccctccttcacttgacaaccccaaacacaaacataacctcctccggcggccgccgctccccggtcccccgctccgtccgccaccctgccgccgcccagcagccgccacgctgaaggccggcgactggcgctcacaccacccagcactgaaatattaaacaggggagcgggccggggggcgggggggggagcgcggggcgcgcgggcgggggccgcagccgccgggcggaggaggcggcgaagctcgccggcgcccggagccacggcatgatcgcggccgccagggagccgggcagccgggctggggggcgcgcgccgcggcggggcgggcggacagaccctggggccgcggggcccggggcgggaaggacgggcgcgggctttacctctcccccggggcagagtagggcacgtttagcgtctttggggccggcgggaggaacgcgggccgggcggcgcgggggaggcagggcgaaggtcggaggctttcccgcgggtgggcggggcggcaggggatccccgggggcgggaggaggggaggccgcgggcggcgacgcgtgggcgggggagggggcgtccccgcgggggctggggttgaggccggggcgaggggcgcgggacgcccaggcgccggggcccagctgggccggcgcggccgccagctctgaccgggtgtagggactggatgggcgcccggcccggcacgaacccggagccagtgccccgggtctccccggcggggcgggccccagaccgcgccggccccgccacctacccgccgcttcgcccctccccgccccgcccggccgagccgccgcagggacgggagggggacgcgggaggaggtggcagcgcagcccgggggggaggggcggggttagggacgcggggggcgggagccctgggtcgcgacgcctggggaaccagcacacggcgggggcggaggggcgggcccggccagtcacgcggccccgggaaggcctggcggggtcgctcagttgggggcggttggtccgggaagagggacgggacgggcggggccgtagtttctctttaccgtctctttactttctacagcaggatgtgggccggccgctgacgtcatggggtctcccggccccgcccctcgcccgggcagaatgggggagggggaggcggggggggggggggaccccaagggggtttcctcagcaacgcgtagaaggaaggggaaagtcattgtgaaacttaaaactcattaactttgaaaaacaacttttaaaaaaacggagggggcagggtgttggtttggagagtggaaggggacatgttaaccctgaactgaaaccactttttggtggcggatgttctattaaaagagcgaggaaagccaaggttattccagaggccgctccaaagccccgctggtgcttcccagtgccgaagctgcgagcgcaattaacccctgcctgccagcctgacagcttatagggccaacccgggaggggacttcggggacagaaaaggggggtgcggggctggtcgtcggaccgggctccagggaagaggggagagcgtgaaaggggaagagggagtaattagcatgaaccaaggtgtgaccccggctgctagaaagcagtagagaaagcaaggagtggaaatccatggcaaagcagtgaagaggggctggaccagggtaacgaaggttttcagggttagacctaaagaacgttcgcagtttggggcacagaaattccacaggtccacctcaagaagcaaaagtggctggtttaacgggccacctcaaacttgagaggaataaggtgaaacaaaattgatgcaaaaaaaaaaaaatccctgatgaaactaaactggtttccccttttaaggaataaaaatgctaaacgaccatacaaccactaagacagctggccatctgtgcaaacttgaattgttttgttcccttgggct

SEQ ID NO: 585292 - DNA, 4001 bp, Homo sapiens
aaaaatcaaacccaatctactcattccacagtctacttcgttaaaattctgcttctggcactcttataaggtgaaaaagcaatgagacatttgctacatatgtagcaaacatatgggatctatatgtgcaaatatttaaaataacttggtttgctcaagggcaaatatcaccaaatattactatatcactggaggaaacgtttctaataaagttaaatggcctttttctaggaggacagatcattgcaaatttaattaaaatggatcttattaatatttcaagtaatgtctgggcttgattatgcactacaaaagaaacaactgtattgaggagaaaaatcaatagcccttgactagggctctgggtatgctagaaaaacacagatctcttgtgaattattgaggtccagctttagggttgggggcgagtaccaatattcatttggaggtaaattgagttatttttaaaatggcagaaaaggaaggagaaaaatcagctcaaattttccattataatgaaagtacaggaaacaagcctttctatattcattttaggcctaaataactctgcagagaataagggttttgcaatgtcagttgcacacacaacttcctgtgtgaatgctaagccattacaggtgtcctaaggcctccagtgaaacctattatcaagagattcctctggtctcctcgaagtcatccccagcgccccccatccgccgcccacacattattgcttctctcctccaagtgtcttgattaaggaccctctctcttctccgcactcccgaggttaaagtgcccccgttcccttggtgtagctagttacaagctttcccgttagggaagactagtgcctgcagtcctttttagttagatgcttttaagtcagagatgagaggagccacttgaagaaaccctccttcccttcttcctttcccccactgggaaccaagtccctgaaggacaacacccagggacgcttcctgaccttctatcccctcacccaatttgggcttggagggttggggtcgcattttctcatgtcctctgctgcactggatgtgttatgtaagagggacagaacgcgggaggcacatgcgtataaagcgcaccgatctgtgataacagctggggtagcagagcggatctggagtccaccccccccccccaccaaatacgacagaccccacacatgcacatcagcaccccctcccccacacacccacacacacacacacacacgcacacacccagagcaatgttttcctgtctcacccctaccagtaccagaggcacagaatggaaaggcggggggtgggggtgaaaggaggtgaaagaggaggaggagcagcagcagcacatctgctttgatagcagccggcagtgccgccgcggcagagagcccctcgttaacccccttcctgtggctgcaccacgtcatggaacattcccggaacgggccaacgttccacccacttcagggaacagacataaaggcgcagacccagttccccacagtgcacagcccaaacacacatgtcccttcccgatcccccgccagacggacagacaaacacgcatgcaaaccgcccccacccgtctccacgcgcccgggtccagccggcagcggccagagccgctctgcagccggtgcacccgcaaggcgagggcgcctccgcctgaaccttccatcgagacagtcccctccttcctcgcttccttccttcgctccttccttccttccttccttgcccgggaggtaaagggagtcactgaaatgcccagagccagcgccttcgctgcgctcgctcggccgcaggccggcggcccgggcctcgcgccgccagcccgcccggccgcctgcgccgcgcgccgcggccccctcccccgctacctgacaacgggccgccgccggccgccgcagccgcagcggtggccgggccgtgcgcgccggtgcacgtcgctcattagtaagcaggcacattcctgcctccagcgctcccgcgcggccccctccccccaggacattacgcaaagcagcctcccctcatctgcatagatccgcggccagggtattccccgcatttccccacgcgcccgacacccctcccgcggtctcccccatccccgccccctccgaccctcaccctcgggccaccgggaaggggctgggggcacacgccggggagcgggggacggagttcggcggcggcgattccaatataaagtgaaacaagctcccagcgccgaaggaggcaggaaaaacccagcgtccaggccacttaccgagccgaggagggacctagattcccgccgctccgctctcgcggtggccggtccgccctccgcgcaccccgaggctgcacccagcaccccagacgcgagacgtggaggaacgctgtgaacgagccgggagaccctccaagttgctctgggctccgtggagcgtcaaggtccaagacacaacttggcaaagacttgtgccacagtcaccgaagatgtttgtgcggagaccctcctgcggggaacgacggcgctcggcggcgccccgctctcctcctctccaccccctcacctccagcccgcctcccgccggccgcccgcctccgggccgcgagcccctcgggcggctgtcagctcccggccgccgccgggtgacaggggcgggaggagggcgcgacgcggcggcccgagccccagcgggcgagggggatcctcgcagccgcggcggccgctcacctggaaagtcaccgctgaggaggaggagaaggaggacggggaggaggagggagaggaggagggggaggaaacccccctggtgcccttgttctcgctgccgcggcggccgctcctcgccaaggctgagcgtgtctggtggggggtgtctggtagcatttccttaaggacagagggagggcgggcgcggagggagggaaaagatcccgaccgccagcccaggctcctcttgcctttatttatttttctgacactgtacggagatgggcccggggcaggggccgccgggctcaggcgggagccgcgaggcccgggccgcagctgtctgcgtgcgggagccgcagcggccgcctcccctcccgggctgtggacgcaccgggttattcctggcagcgcctccccgaacagaagttactaggaggagtgcgcggcgagggcggacggggggagaggcggagggagggagggaggaagagggagagactcagccaacgacgtcatcggatcccccagcgcgtcccagggagggaggctgaaccagaaaaaccagtctggagccagtgagcgagagagggatgtgcggcgcgcggggcgacgggggagggaggcggtcgggagggcagggccgggccccacggctgccgctgcgggcggggagatcgcggccgcgcactcgctcggtcggagcggggaactccccggagagctggtctctacttgtcatgcaaaaaaacttgggcatctctaggagcctgagaatttcctttaaggatgtggaaacgtcctccgtccccaccccttccccatttcccagagaatcgttgtctgccttcctgacgaacggaattgtataattagtagtgcccttagatttggaaccagtactccggatccctggcctctcctcgccccctgcctctactcacaattatgttatcggtcaagaaaagcaaaatcagactgtggctcccggctgggtttctggagctttgtagggttttactagcactttccgtgcccctgcgggcgcgcgaactattcacgtgctcgaaacgcccggattaccttccctgaggtcactcaccagggtgcccccggcacccccagttcggggaccgcggcccgccctcgccaggggattcaaataggtgtgggcagcggcgcgaagagcagctgccggtttcctggtgggccgcgctggaacctcggggcgagctgccaccttcagcctgtgcgcttccctctccacggaagggaccgga

SEQ ID NO: 585293 - DNA, 4001 bp, Homo sapiens
tgaccctgctaaaggtctccagagaggctcctgctttccctaagagacatgacacccccatctccctccttaccccatctcagggtgaggggcttgggcagaccctcatgctgcacatggcaggtgtatctctgctcctctccagaaggcaccaccacagccgcccacttctggaaggttccatcccctgcaggcctggtctccacgagctccgtgtcctgggtctggtcctccccatcccgctgccaggtcagtgtgatctccgcagggtagaagcccagggcccagcacctcagggtggcctcatggtcagagatggggtggtgggtcatatgtgtcttgggggggtctgacgggaagagtcagaaaattcaggcattttgcatctgtcatgggacactccaccagcacgcatgtggccatcttgagaatggacaggacacccgggatggggaagagagcacagaacccagacaccagcctggacacaggcacctgggataatcttctattccctgagaagggaacagcgacttctggtcctgacctgagtggaggctgagggactcagaagtgctggactcagacccccacacacattgagtgtgaagcagagaacaaggcctgagaggaaaagtcacgggcccaaggctgctgccggtgtcaaagggaaccactcatcagtattcgagggatcgtcttcccgtcactccttcagagattttatcccttaattgtgtcagagagcagggcggaacctcagagtcactctctggtacaggatctggaacccaggaggattcctctccctcaggaccagagggagggtgatattctagtgttggtcccaattgtctcccctccttgtgggaggccagcccgggagatctacaggcgatcagggaggcgccccgtggcccctggtacccgtgcgctgcagcgtctccttcccgttctccaggtatctgcggagccactccacgcacgtgccatccaggtaggctctcaactgctccgcctcatgggccgcctcccacttgcgcttggtgatctgagccgccatgtccgccgcggtccaagagcgcaggtcctcgttcagggcgatgtaatccttgccgtcgtaggcgtcctgccggtacccgcggaggaagcgcccgtccgaccccacgtcgcagccatacattatctggatggtgtgagaacctggccccgaccccgcggtcagcccagtcccccgagccccgcccagccccgaccaacccggggggatttttggcctaaactgaaaatgaaaccgggtaaaggcgcctgggcctctcccggggcaagggtctcggggtcccgcggcttcggggtggatctcggacccggagactgtgggcgacctggcccgtccgtgggggatgaggggtcctgacctgcgcccccggccggggtcactcaccggcctcgctctggttgtagtagccgcgcagggtccccaggtccactcggtcagtctgtgactgggccttcacattccgtgtctcctggtcccaatactccggcccctcctgctctatccacggcgcccgcggctccatcctctggctcgcggcgtcgctgtcgaaccgcacgaactgcgtgtcgtccacgtagcccacggcgatgaagcggggctccccgcggccgggccgggacacggatgtgaagaaatacctcatggagtgggagcctgggggcgagcagtggctgagacctgcccgaccctcgtcccggcgcggctcccccggtcctgcgcccccgccaggagggccccttgcttctccccgcagaggcggtttccctcccgaccccgcactcacccgcccaggtctgggtcagggccagggcccccgagagtagcaggaggagggttcggggcgccatgacggccatcctcggcgtctggggagaatctgagtcccggtgggtgcgtgcgggctttagaacagcgaccgcgacgacactgattggcttctctggaaacccgacacccaatgggagtgagaactgggtccgcgtcgtgagtatccaggatgaaggaccctacgtaggttgggagagggagaaaagaaactgcggagttggggaatccccaaggctgggactccccaatccatacaccgccttcggggcctgagactctgagagccacgcctggggccctgggacttcgccctgacccctctgctcctgtgcgaagcgctctgtctcaatgtctccctgagtcttggcccaggagctgtctgagaaacaagggagaaaccctcggcatgggccccgtccctctcctttcacttttcatcccattatctctgtccctgaactggactccctgactcccactccttacctgtccacctggactcttctagaagaaaaatcaccccatggagtttggtgccagagagtaagcttgatctgggaatggaggtgtagatttttgttgttgttgtttttgtttttaatccggaaaagttgtgcctgagtgcatgagacagaatagagaccaatttgctctttgtttattaactacagtgggtagcagaatcttggtaacccctgaatgatcaggaatctaataggtaaaaaatgtgactttggccccttaatgtataaatgtgtccaaaagcattacaacaggactcacaaagctactaagttgcactttcccagacaatgtatctgtgactcctgcttgtcttactttaaatttgccatcattccttagctctgagtttctgtgtgagtccacgacatctcctcaatacaaagtagccactgtgttcctatatgttgcaaccagaagccattacaggctttattcacctcaaagttgcaactgttcaaggcagtcacaatgcccctcactagtgctcatgcactgcctgtttttaggaagtatccacttctaagtgttgtgtatattttataggaacacttagtaatttttaaacctgattaacataaaaaatagtttttaggcagacccacatgaggtattaaaagacaactgccaaggacaccctcctaggctctgtagattgatgtattaaaatccataaaacaatgtctttaaacctaagaattctgctgctttcaaattctttcctctgctccttttcctcacctcctgcttctccagcccttccctccatccttctcatccttcaggccctcctctccccttagttcccaccacactgtcactcatgaattgtgacactagcactgtcccatgacctgctacgtaactgttcttttcacagtggccctgctcctgtgagtcggagtgtgtcatttctccacttaaaacactccagtgtctccacctcggtcttgtgaagcttctggagtgtcaggcacttgagcatatgaggggatacctcgttcattgtagggactaagttaatttttgttgacttaatgaatgaaatatgagtgtattaaattgcatcacagataattataaactgtaaaacactgaaaaagttcagaaagattttattttatgcaactagtgtgtatatcaattcatcaattcattcgcacactaccatgcctggcaaaacaacacacatttatctgcttatagttccttggtcagaaatctgggcaagatgtggatagaatctccattctgggcttccaaaagctgtgttttcattttgaatcctccttcgggtttatacagaggtggcagaatgcagtttcttgcagttgtaagactgaggtccctgttcctggctagctgtcaatgtagagaactgggaggggctcaattcccggtgctcaccagcgttctttcctacacagccccttaatttttctttttttttttttttttgagacggagtctggctctgtagcccaggctggggtacagtggcccaatgatctctgctcactacaagctccgcctcctgggttcacaccattctcctgtctcagtcccaagtagctgggactacaggcgccca

SEQ ID NO: 585294 - DNA, 4001 bp, Homo sapiens
ggaagacggctctgggaaaggaggggaagatgaggggccctgaccctgctgaagggctcctgctttccctgagaagagatatgacccctcatccccctccttaccccatctcagggtgaggggcttcggcagcccctcatgctgtacatggcatgtgtatctctgctcttctccagaaggcaccaccacagctgcccacttctggaaggttctatctcctgctggtctggtctccacaagctcagtgtcctgagtttggtcctcgccatcccgctgccaggtcagtgtgatctccgcagggtagaaacccagggcccagcacctcagggtggcctcatggtcagagatggggtggtgggtcacgtgtgtctttggggggtctgatgggaagagtcagaaaattcaggcgctttgcatctttcatgggacaccctaggaccacccatgtgaccagcctgagaatggacaggacacctggggtggggaaggggcacagaacccagacaccagcctggacgcaggcacctgggataatctcctattcattggaaagttcgagtctctgagcggggaacagggacttctgctcctgatctgagtggaggtaaagtgactcagaagtgctggaatcagagccccaaacacactgagtgtgaggcagagaacaaggcctgagaggaaaagtcacggttcccaaggctgctgcaggggtcaaaggggacccctgatcagtattctagggactgtcttcccctccatttcctcagagacgtcattccttaattgtctagagagaagagggggccctcagaggaaactcaggaaaactcatgccattctccattcaacggagggcgacattctagcgctgatcccattttcctcctcttctcgtgggaggccatccccggcgacctataggagatggggaaggctccccactgcccctggtaccagcgcgctccagcttgtccttcccgttctccaggtatctgcggagccactccacgcactcgccctccaggtaggctctccgctgctccgcctcacgggccgcctcccacttgcgctgggtgatctgagccgccgtgtccgcggcggtccaggagcgcaggtcctcgttcagggcgatgtaatccttgccgtcgtaggcgtactggtcatgcccgcggaggaggcgcccgtccggccccacgtcgcagccgtacatgctctggagggtgtgagaccctggccccggccccgcggtcagcccagtcccccgagccccgccccgccccgaccaacccgcggggattttggcctcaactgaaaatgaaaccgggtaaacgcgcctggggctctcgccggtcgagggtctgggcgggtcccgcggcctcagggaggcggatctcggacccggagactcggggcgacccgggccgtacgtgggggatggggagtcgtgacctgcgccccgggccggggtcactcaccggcctcgctctggttgtagtagccgcgcaggttccgcaggctctctcggtcagtctgtgcctgggccttgtagatctgtgtgttccggtcccaatactccggcccctcctgctctatccacggcgcccgcggctcctctctcggactcgcggcgtcgctgtcgaacctcacgaactgggtgtcgtccacgtagcccactgagatgaagcggggctccccgcggccgggccgggacacggaggtgtagaaatacctcatggagtgggagcctgggggtgaggaggggctgagacccgcccgaccctcctcccggcgcggctcctcaggtcctgcgcccccgcctgcggtcccctcgctcctcccggcagaggccatttccctcccgacccgcactcaccggcccaggtctcggtcagggccagggccgccgagagcagcaggaggacggttcggggcgccatgaccagcatctcggcgtctgaggagactctgagtccgggtgggtgcgtggggactttagaactgggaccgcggcgacgctgattggcttctctagatatccaatacccaatgggagtgggaagtggggacgcgtcacgagtatcctggaagaaggacccgacacaagttgggagaagaagtgaaactcaggggagtggggaatccccaacgctgcgcctccccattgcagacgcggccctcggagcctgagaccctgagagccccgtccgggacctgggacttcgtcctgatccctcttctcctacaccaagcctctttgtcacactgtctgcctgagtcctggacaaggatctgtctgtggaaaccagggagagacccccaggctgcgcccagccccttccccttcacttctcgtcctggaatccctgtccctgaactggactccctgcctcccactccttacctctcctcttggactcttgtgtagggaaactgagcacggggaacttgatgccagagagtgagctcgccctgggaatggaggtgtagagacaggggttttctctttaaacctggtgaagttttctctgaaggcaccgcatagggattctcatagagaccagtttcctttttgtttgttaatacagtaggtagcacaatattggtaatccctgaatgattagaattccaatttgtaaaagacctgtgtcaaaacagcattacaattaaactctcaaagctcctaagttttactttcccagactgtggatctgtaactctgggttgttgcatttaaaattatcttcattccccaccctgagtttccctgtgtgagtccagaacatctcctgaatataaagaagcagggtttgttactgtctattgcaaccgggagcctgtagtcatcacctcaaagttgcgagtgctccatgcagtcccaatgctcttcaccgacgctgaagcactgcctgttttcctgaactctgcacatccaagcagtgtgcgtattttatctgaacacttggtatttttgtaactctttttttttttaatcataaggagccaattagtttttaggaagtccaacaaaatgtattaaataccgaatgcaaagaaccctctgccaggctcttccactgctttagaattctttctcctgctccttttcctcacctcctgcctctccagcccttctgtctgcccctctcatccctcacacccccgctccccttagtccccgccaccctgtcactcctgaattgtggcactaacactgtccctcacctcctgcccatatctgttctccccacagtgctcagcagtcctgctaatgtgactcaggtcatgtcatttcttcacttgcaatggttgggttttggtctaccattttgctatacgttttcaatttgtctcatatctttttgtttctgttcctcctttactactttcttatgtgtcaaataaacattttttagtttatggttttaattctcctagtggcttttggctatatttctttacacaatagcaaagaatggaaacccgattccttgacttttcacagtgaagttcaggttatattaagctgcatccagcaaaataaaggacacttctaacagtgtagtttcttgtaacctaccattgtgctattattgttgtatatattacatcaacctatattatagactcagtgatacagtgcaatactttttgttttaaacaagtagccatatgtcttcaggaaattaagaaaatgagtgtgaatgtgacatgtgtatgtgcatcatttctgttgttaattgttcctttctgtatatctgggtcaccatctagtatcattttccttcaccctgaagcacttcctttaaaattaaatgtagtacaggacccctaggaaattaattttatggctttgattatctaaaaatgtctttatttttgcctcccctcccccccccctttttttttttttttgcttattagggcatttatgtgtaataaaattcaccagttttagctgcgcttttttggcgaatattggtaattatttatagtcatgtaac

SEQ ID NO: 585295 - DNA, 4001 bp, Homo sapiens
acccggctgaagggctccagaaggacttctgctttctctgataagagatgtgaccccccattcccctccttaccccagctcagggtgaggggctcttgcagcccctcgtgctgcatatggcacgtgtatctctgctcttgtccagaaggcaccaccacagctgcccacttctggaaggttccatctcctgctggcctggtctccacaagctcggtgtcctgggtctggtcctccccatcccgctgccaggtcagtgtgatctccgcagggtagaagcccagggcccagcacctcagggtggcctcatggtcagagagggggtggtgggtcacgtgtgtctttgggggttctgacgggaagagtcagaaaattcagacactttgcatctctcttgggacactccagcagcgcccatgtgaccatcctgagaatggacaggacacctggggtggggaaggcggcagagaacccagacgccagcctggacacaggcacctgggataatctcctattcattggaaagttctagtctctgagggaggaacagcgacttctggtcctgacctgagtggaggctgcaggactcagaaaagctggaatcaaaccttcagacacattgagtgtgaggcagagaacaaggcctgagagaaaggtcagcagcctgaccacagctgctgcagtggtcaaagtggtcaaaggagacccctgatcagtattccagggactgtcttcccctccatttcctcagagacttcatcccttaattgtcctagagagcagagggggccctcagaggaaactcaggaaaactcatgccattctccattcaagggagggcgatattccagtgctgatcccattttcctcccctcctcgtgggaggccatcccgggagatctataggagatggggaaggctccccactgcccctggtacctgcgcgctgcagcgtctccttcccgttctccaggtatctgcggagccactccacgcacgtgccctccaggtaggctctcagctgctccgccgcacgggccgcctccaacttgcgctgggtgatctgagccgcggtgtccgcggcggtccaggagcgcaggtcctcgttcagggcgatgtaatccttgccgtcgtaggcggactggtcatacccgcggaggaggcgcccgtcgggccccaggtcgcagccagacatcctctggagggtgtgagaccctggccccgcccccgcggtcagcccagtcccccgagccccgccccgccccgaccaacccgcggggattttggcctaaaccgaaaatgaaaccgggtaaaggcgactggggctctctccggtcgagggtctgggcgggttccgcagatccaccttggggtggatctcagacggggagactctgggcgacccgggccgtccgtgggggatggggaggggtcgtgacctgcgccccgggccggggtcactcaccgtcctcgctctggttgtagtagccgcgcaggttccgcaggctcactcggtcagcctgtgcctggcgcttgtacttctgtgtctcccggtcccaatactccggcccctcctgctccacccacggcgcccgcggctcccctctcggactcgcggcgtcgctgtcgaaccgcacgaactgcgtgtcgtccacgtagcccactgagatgaagcggggctctccgcggccgggccgggacacggcggtgtcgaaatacctcatggagtgggagcctgggggcgaggaggggctgagacccgcccgacccacctccctgcgcggctccccgggtcctgcgccctcgccgggagggcccctcgctcctctccgcagaggccgcttccctcccaaccccgcactcacaggcccaggtctcggtcagggccaggcctcccgagagcagcaggaggagggctcggggcgccatgacccgcatctcggcctctggggagaatgtgagtccgggtgggtgactggggactttagaaccgggactgcggagacgctgattggcttctctagaacccgacacccaatgggagtgggaattggggacgcgtcatgagtattcaggaagaaggacccgacgcaggttgggagaagtgaaactcaggggagtggagaatccccaacgcggcgcctccccaatgcagacacggcccttggagcctgagaccctgagagccccgcccgggacctgggacttcgtcctgatccctcttctcctacaccaagcatctttgtcacactgtgtgcctgagtcctggacaaggatctgtctgtggaaaccagggagagaccccaaggctgcgcccagccccttccccttcacttctcctcctggaatccccgtccctgaactggactccctgcctcccaccctttgccttaccttacctcacctcaggtaatattaaactacatccagcaaaataaaggaaacttacctctccccttggactcttgtacagggaaactcaccatggggaacttgatgccagacagtgagctcgccctgggaatggacgtgtagagtcaggagttttctctttaaacctggtgaagttttgtctgaaagcaccaggtagagattctcatagagaccagtttcctttttgtttattgatacagtaggtagcacaatattggtaatccctgaatgattagaattccaatctgtgaaagacctgtgtcaaaactgcattacaattaaattctcaaagctcctgttttactttcgcagactatggttctgtgactctgggttgttgcatttaaagttatcctcattctctagccagagtttccctgtgtgagtccagaacatctcctgaatacaaagaagcagggtttgttactgtctattgcaaccgggagcctgtagtcatcacctcaaagttgcgagggctccatgcagtcccaatgctcttcaccagcgctccagcactgcccgttttcgtgaactatgcacatctaagcagtgtgcatattttatttggacacttgatatttttgtaacccctttttaaaaaaaaatcataaggagcccattagttttaaggcagtcacacaaaatgtattaaataccgaatgcaaagaaccccctgccaggctcttctactgctttagaattctttcctctgctccttttcctcacctcctgcttctccagcccttctctctgcccctctcatccctcacaccctctttcccctttagtccccgccaccctgtcactcctgaattgtggcactaacactgtccctcacctcctgcccatgtctgttctccccacagtgctcagcagtcctgctaatgtgactcaggtcgtgtcatttcttcacttataatggttgggttttggtctaccattttgctatacgttttcaatttgtctcatatctttttgtttctgttcctcctttgctactttcttatgtgtcaagtaaacatttttcagcttatggttttaattctcctagtggcttttagctatatttctttacattaattttttattgttgtaagaattgaaacccaattccttgacttttcacagtgaaattcaggtaatattaagctgcatccagcaaaataaaggacacttcaaatggtgtagtttcacttaaactatcattatgctattattattgtatatgttacatcaatatacgttataaactcaacgatacagtgtaatactttttgttttagacaagcagtcacatatcttcaggaaattaagaaaatgggtgtgtatgtgatatgtgtatgtgcatcatttctgttgttaattgttcctttctgtatatctgggtcaccatctagtatcatttcccttcagcctgaagaacgtcctttaaaattacatgtagtacaggacccctaggaaatgaattttatgggtttgatgatctaacaatgcttttatttttgccttctttcctccccccccgcctttttttttttttttttttttttttttttttttttttttgctta

SEQ ID NO: 585296 - DNA, 4001 bp, Homo sapiens
ctgggtgacagagtgagactctgtctcaaaacaaaacaacaaaaacaagcaaggcctgcttaaggagcgtgggctgaggtgagaccctttcctgtgtctgttatttagactccccctcccaaagggggtgaagaacaaattatggcatctctccaagcttcccctgcctataaaaaggccagttggcaaaagtaaagagttctactttctaaagtgacagattcaggccaggcatggtggctcatgcctgtaatcccagcactttgggaggctgaggcaggcagattgcttgagcccaggagttcaagaccaacctgggcaacacagcgagaccctgtctctacaaaaaatacaaaaacttagccaggtgtggtggcaaacacctgtggtctcagctactctggaggctgaggcaggaggattgcttgtgcctaggaagttggggctgcagtgagccatgattgtgccactggactccagcccaggtgacagaatgagcccgtctcaaaaaatatatatataaaggccgggcgcggtggctcaagcttgtaatcccagcactttgggaggccaaggcgggtggatcacctgaggtcaggagtttgagaccagcctggcaaacatgatgaaaccccatctctactaaaaatacaaaaatcagctgggtgtggtggcatgcgcctgtaatcccagctacttgggaggctgaggcaggagagtctcttgaaccccagaggcaggggttgcagggagccgagatcacgtcactgcactctaccctgggtgacagagcgagatgccgtgtcaaaaaaaataaattaaatcaaataaaaaatttaaaaatgtatatatataaaataaagtgacagattcagagtcactgttcattgtgtgtttgggggctgcacaaagacacctagccaaagaagcaagtgaaagcctgcattctgctcaccatgccatacatcctggcatagggctgtatcctcccaaaggggattcctttgtctaattcataccaggccactgtattgactagagaaggccatggatgggtttctcactcttagaagggaaagaggaggaatggctacagcctccccaagccatagatgggactgcctcccactatccccagacacaaatggtaaattggaaaacctgtatccagacatttcttcagccacttcattggcaccaagcgtctctcaaaatgtcttctgttccttaacctaccaggcctcccaaagacagcaatgggagaagtgaccccataactgcataaaataatccctcttctttgaagctcttggcaggaatcgctcagccagcaggaaacctttaacccaatacccagaaaaacagacatttggaggaagagggatcttccagattattcttccattctgccccatcctctacagagaaggaaactaagacacttttcaagaatcacaagataagttaatgatagaaagcagagtagaatcttgagtggaggagtgaaaataacattcactttgttcaaatcccagctctaccactttccaatggtgtgaacttgcacaaataactctgagtctcattttcttcatttgtaaaatggagagaacaatctccgcttcaagagattgtcttaaatggaacatgcaaagcatcactgatatcgtttaccaaccacacatagcagctgtctttccccactcccctgttgtttccactgcctcataagacttcccaccactcacaaagcacagcgcttttcctcacaaagctgagtgggctccctaggttcaggatggaagtaaataggagtaccatcttaccttcagggacggcccaggagtggggtagcagccacagaagtggtaacatctgtagcagcgcagctccttggttctgttcatgacccataccttcttgccacacagtaggtaggagctaccaacccagccaacccagcttccccaactccctccccgagagggtggccttagatcatgttttgccagatcatttccaataggtgcccttgtcattttgtctaaaccaatcagagaagcgtagggtttaacatcatcagtcactggggagacgcctggggccagtaacctcctgaagacttggctgtttgaccagggcagagtatggcatgtaactgggctgggaagcccagtggaggaatgttgcttcctggtggagttccctctttggtttcaagctgtcagcctcagtctgtaagcgaccagctggctcttcagagcagtgccacctcctggcagaatgctgcaatggggaaccgcatcttccccaagtaaacccccagggctcttcggaccctgccttctcctccctcctggctcttcctctttctcaaaaaaacttattctccttcaggcattagctctaattcatttggcagacatatattgaaaatacaagaaattctgggtgttgggcccagggctagaaatacaaagatgaataggcatagtctgccttcaaagagcttagagtctagtgctgggggagggggccaagggataattacacaacaatgtaatgtattcaaataagaatgtgccaagtgttttggaagtcgcagtaattttatgaggatgcggaataggaggaacataatcaggcaggctcctaagacttgaaggaaaaacaatttggccagcagaacatgaaggaagagaaaaacacgccagggcaaagggtaggcagaagtacaaagatcacaggcatccagaggtcctctttggagaccctgtgtactagttgatatgaatgttgtgaaggtcgcttgggtgttcctgtataataggaggtaatggggggtagaaggatgttgtgataagctacaaattctggcaagggccagatcacgtgggccctgctacgccacaaggaggagcttgcttttacttagcagatgatagagatattaaaactggggaatgacaatcattttagcattttggaaaaaatgttctgattgatatttcaaacaatgaactggagcttttaaagaattgaggcaaaactgctgggcaagagtctatagcataccaagatgaacagttgcacatatacacaccactcctgtagcaatacagcaataatttaaatgacagataataagagcctgaattaagtcataataagaggaggcggaggagatagaatatcaagataattaggaagtagaatctaaagggtttggctactgattagctgtgggagtgggaaggtggaggagtcaaagatatctcagatttccagcatgggtggctgggtgggtggtcagggatggactgaattgaagcagaaaagaatgccatgggagcaggtttacagagagaaagagcttgattttgtacatgttgaatttgaaatgccagtggaacagccagctgaaactgcatgggagcgcagtgaggcgtgtgggtatggaccccaggtatggtctgaagaccctgatttgagagtcatcagcacaaatgtcgaagcagaggccatgaataagatcacccaagtaaactgtgcagaaggagtgggaagtgaaacaaggacaaaagcatgcatgggctcaaaccccaaacctcataccagttatccaggatccagtcaggagcatttaactactttatgtgcttcagactgaaagaatttaatatagagaattggttacaaaggtgttaaaagggcaagaagtacaaaaaaaaaaaaaaaaggagagtcctagaaatgtacattttaaaaaaagattgctatctggaaatcagaagctgccatcatccctgagctggaatctgtaaatctactcattgccttgtgagagacactgtcatagtcagttccaatctactagaaaggtgccacctccttcaaggctagaatccttgagaaggtacttctgctcaggaggctggagtcctgagtctcccattcttcctgctgctacagctacagccaatagctaccagctattgcca

SEQ ID NO: 585297 - DNA, 4001 bp, Homo sapiens
acatacagacgtatatttaggagctctgcacagagctttgtctttgaccctggttcctgacatagagtgcctaatcgcttagaatttcctagataacaggagtgtcttttgttctaatgaggtactcttggtgggctcctgcaggaggggctggtcaccagaaagaccaagtcatgattagaagtctggaacttttagtcccatcccccatactccctgaaggggaaggggctggagattgagttaataatcagtcatgcctacatgatgaagcctccataaaaatcccggaactatggagttcagagaacttctcagttggtaaacacatccacatgccaggaggtgaagtaccccaattctgtggggacagagctcctgtgattgggacccttccagatctggtatctcttcatctggatgttcctttgtatgctttaaaatatcctttgttaaaggatgcaaaattatgatctagtgttctataccactgtgggatgactgtcattaacaataatactttatatcatttcaaatcgctagaagaaggatatggaatgtttccaacacaaagaaatgataaatgagatgatgatctgatctgatcactgtacattacatgtactaaaacatcattatccaccccatgaatatttataattattattatcaattaaaatatcctttgtaaaaaatctacaataataagtaaacttttcctgagttccataagccactttagcaaattaccaaccccaaggagggggtcatgggaacctctgatttgtaggcaagttggacagaagatgtgggtaatttgggaacctactacttgtgattggtgtctgaaatggaggcagtcttatgggactgagtctttaacctttggtgtctatgttaactctagttaatgtcacaatggaattgaattataggatatccagctaatataggagaattggttggtatgagtaaaaaaaaaaaaaaaacctcacacagttggtcaaagaagtgttgagtgtgagcatatagaagaaaaaaagttgatttttcctatattcagctcagaacctaagccttggtgacatccagctagtctggcacagatttcctgctcagggaacatctactgaccaagctcatacactgaagtttctgaaagtctgatttgagggagtcagtagaagtagtagataagtttttagatccagtctcctctttatgcaagactaagcacagggataggagtagccccccgagattatttgcatgtttaaacatgacaatttgcccagaacacagaccttcagtaaggcaaattattgagagagaaaaagggtcaagagaaagagtcagccttgtattgtgctggaaatattaaatattcacttcgcacatatttatgaagcacttgctgcatgcaaggcactgtgctaggagctgaggaggcagcaataaataagatgaacattgtccttgcctatattccagcagggaatatacactgcacagataattatacagattaattacattaaaattgctacaaagtacaaagtgctataggaatgtataccagggagacaaactatctggggtgtcaaatgcaattacaaaacggaacacccttaccctgaaacaggagcaggggaagggagagtccccagaagaagtgtccttacctgctcctgtgcagcccaggctgagccccagcagcagcggcaggaatgtgatcatgctctgctctgtaaagatgccgggagttcagtcccctggaccagctcttccagggtccgtgggtcctcgcctgtcccagaagccccagcctgggtagatgatctccagacactgagcagaatactatattgcccgggtcccttgaccccccaaatgagtgatgtggggatacccagcccctagatattaaatctgttccttccagctcacgggagtccagtgtcccaaacagggacagattggctaggtaggcagggacaaatgtagagacaaatcactgagtgcctcagcctagcatcatcagttactaggtaaacgtcatcctgccttagtcttagacaacaggtctccttgtctctcttaattctttttctgcagaacaaccagtagatttccgtagattactggagagaataatcgcaatattcccaggatgtatgcagcctgggctgcccactggtttaactttttcttctcaatgctctcccaaaagaccaggaccagataacctctcctattccttacagggaggttacccaagaagataattacaaaaacccttgtctgtcctgagatgagaggacccagagcccttctggggcaggtggcagaggcagggctgctgagaaggaagaaggcacagacagagtacagaattgtctggtctcaaagcaagactgcagaataagggaagcagcgccaccatggagatcaggaataggggcctggaaaatccctccatgggcctccattgttgcttctgttctagccagtcaagcttcatttcctcctcagttataatagctgctttccggagctagtaaaccatatcctcctacactctgagcaatctcacggggtagaccgcaggttaacacctctcagactccttgaaaaatagctggtgacgggtcagtgcccagagctcacctgcctttcgccaaactctaaacacccctgtgtgtttcccctactataccctgttccctgggggcaggtccctgcattatgaagccactaggaaaatgagataaagctttcctacttttcttcccctgaaaagacagattttgttttttattttttgagaataccaagtaagattttattttttatttattttaaattattttaacctttgttttaggttcaagggtacacatgcaggtttgttatataggtaaattgtgtgtcatcgggatttggcgtaaaaatttatttcatcacccaggtaataagtatagtatctgataggtagtgttttgatcctctccctcctcccatcctccaccctcaagtagggcccagtgtctattattcccttttttgtgtccatgtgtactcaatgtttagctcccacttataaaagtgagaacatgcagtatttcattttctgctcctgtgttagtttgcctaggataacagcccccagctccatccatgatgctgcaaaagacgtgatctcgtccttttttgtctgtggagtattccatggtgtatatgtaccacattttctttatacagtctactgttggtgggcatttaggctgattccatgtctttgctattatgaatactgctgcagtgagcattcatgtgcatgtgtccttatggtagaacaatgtatactcctttgggtatatgcctaataatgggattcctgggacgaatggtagctctgttttaaggttcttgagaaattgccaaactgctttcctcaatggctgaactaatttatgttcccaccagcagtgtataagccttccgttttctctgcaacctctccaacatttgttattttttgactttttaataatagccattctgactggtgtgagacggtatctcattatgattttgatttgcatttttctaatcattagtaatgttgaacattttttcatatgcttcttggtcacgtgtgtgtcttgaaaaggcagattttatgtatttgcgtatttatttttttcacaggttttttttttgaaagtctcactctgtcgcctaggctggagtacagtgggataatctcggctcactgcaatcttcgcctcctgggttcaaatgactctcatgcctcagccacttgagtagctggggttacagtcatgtgccaccactcctggttagtttttgtcttttttttttttttggtagagacagggtttcatcatgttggccaggctgttcttgaactcctgacctcaagtgatccacccacctcagcctcctaaagtgctaggattacaggcatgagccatcgt

SEQ ID NO: 585298 - DNA, 4001 bp, Homo sapiens
gtccacaggctcatccctcaccccagggccttactaggactgggattaagggacgttccccctttgtagccatctgtgggcaggggatgctctggggtatccactggggcaggagaggaggaaaacagagggagaggagactggggagggagtggggacgccaggagctcctatatttgactggtccctgggcgggagtccgggtgagaggtgtcattcctcaaggagaggggtgccaaaggggtctgggaagacctggagcctcctgggaaagaaaggaacagggcatgacaggcgcgggcgctgagagcgcgccccagagtgatgggagcctaggaactgggaggaagtttctctggaccttcccgcctgactgggtgggcagagggagggccggtaccgttgatggctctgctgcggttggagcgctccaccaggatgtccagatgggctttgattgcggcgatgccggccagcccgccctgcgggtcaaagcgggcaaagtcaccaaactcaggcagacgccacacggcctcgcttttcttcaggtccacagagaacagctgttcctcatcaaattcatgggtgaactggcccgaggcgccgtaagactggtagaaggcgggtccgtaggagcccatgtggtcagctgtgtttggcgagttcagggtcaaggagagagaaaaaaatgtgtctgtctcatccacaatatgtgattgttgagtccctgagcctgggccccgtcctgggttctgtgtggggacagagtcctgttctgacactgggctggccctgggagagagaaagggagagagaacaggaagaaagaggctcatcccagcacactgcagtcggcacagagacagtgcagtctggcatatcaggatgggaagaggagggactgcctaaaatcatgcttggggttccagaatttaaatcttggctgtggtcatctgccctggctgtgttgtcaggccctgtgttgtgagctggtgggactgtgggggtgggatgaggaggaatgattaaggacaggagagtatggagctttgcacagagatgcagtgcaggtgggtgtgaggggaaacaggccacggctggcaggggtaagaattaaggttagtgacccagagaccaaggggatagggagaggcaactcaaggcattacaaagagcactggacgaggagtcagaagtcaaggttcatgtcccaattcctccatctcagagcattatgactgagtgtggctcttccataactgttgtctagttttctggaagttagggattaagttttaattcttgtagaactctatgaagttgtttgagcaacagttattgaggaactagcatgcacccagcacaatggggggccagggaaataaaagaaaaaaaagatgaaccatctgtagacccgcaccccagctcatgtctcccgaagaacaaagacaggtaaatagttaactaccggcatgggcataaatactgcaacagaactggacttgatcgggcacattcccggccaggggtggtagagaaatcagggtgcttgctggcatctgttgggtggaggtttgggtctcaggaaggaggaaggaatgaggagaaatctgaacgtcagcaaaggctgactggggcacctgcgcagctgaccgagctgcatcttcatttaggtccagagtggatgtgacagagatgagggggattgggtgtctcttggtgaaggaagttgcccataaaccagagagcgagaggaacaagcatcctccatgccacctcctcatgtaacccaactccgtaaatctctgctccccgccgcaccctcctcgccctcgcactcacccttggtggcccctgcctcctgcgggctcaggagggtcatcagggtgtggaaccccaggaccagccctgctctgagggccattacactctggtgctttaatcaaatcagtctcagtccgtgtggtgaggacaggaacaaggcggaggtaaagaagaagaaaacagattcgaggatgggggcgacccctgctgtcttcagccaatcacagaaattctctgagtgaatgtatctgttgctgggtaaagagggaaagagccggggtgagaaggtggaaggattcactgggcccccaggagaggccagaggaagttttggaggatgggaggggcttggaccaactattaccacgtcctccaagaagggaccccctgaagagagagaaaaggccgtcagagcaccgcgcagctgagctccaacaaatcctctctctatgtccatctgcgatgcagggaatcctactttcccaagaagtttccgtggacaaattttgagttagaaagtaaaataaactttaccaataatctttaaaaggaaaacattggctacacaatggaataaaaacctcttaaaactttaaatcactttcaaaaatgttattttatttttcttttattattatttaatttcattgtgtaagaaaaaatgtgtaattgttggagttgtttggtctaaagcaaagtgtaaagagctcccgtggactccccgaggagggcagaggtgctggtcctctctgttggtccctccaggacccgggcacctcctccaggctgacacaggctggaggacggcatcacccttgcctttggcttctggttgggctcggctaataagaggcactgggagaatttagtccagtatatatatttaaaaaacaaaacaaaacaaaacaacaacaacgtaaagctaacgtctgtgtaaagagaaatctaaccaaattaggccatgtgtcaaagaccatgaaatcgatgattttcaacttggagggagctaggaaatcatgcgggtctctggttccaaatgagaatcacctggggggttcgttataatacgtgttcctgagtttcctctttacttaatgggttagattagcctttccaaggcagggccagggaacctgtgttttcagcatgctccccaggtggttctcgggtagtctgtggactggtaaaacctgctccaatgctctttcctcaatgaataagggatgcctattttaagtggggcagacacagcttctgacttcaaattaatcaaatgacagctagtaattgatttgcatggcccggtttatggggagccctaatcttagttttttcgtttctagtccacagtgtctacgtaatgcctagcacatcataggcgcctaggagacacctgcgcatgaatgaacagtgtcttcactgctttggtcctgccctggttaggacccttgccaccttcacctccccccaagtgaggtgggagctggagccatgagatgaaagacgggaaagccatgaaaaactcatgataaagaatgttgcttctttggttaataacagtcgagtatcgggtgttttttttatttgaaaacatacatagattttttaaagtatgttttttgttattaacttataatttaattacatgataatcctctatggcttggagtgtggtgaacttctgtaaatatttcacatgggctctaataaatgtgatgcagaattttatacatgtacatgtttattggatcaagcatgtggattttgtcattctaatttattacggttttctttatctttggactggcctatacataactaagagtggtgcatttatttatttattttttagagacagggccttgctctgttgctcaggctggagggcagtgaagtaatcatggctcgctgcagcctcaaacagctgggcttaagcgatcctcctgcctcagcctcccagagtagctgggactataggcatgccccacaattcctggcctatgaatggtatatttaaatctctaactgtgactgtaggtttttcaacttgtttctaatttttaaatcaacttttgccctctctgcatttaggttattaaggtgtttactcttgggaattattacagtcttggtgaactgagccttttcccaatttgtcctgagaatctttctgtcct

SEQ ID NO: 585299 - DNA, 4001 bp, Homo sapiens
ctccccacagtgaagggtgcgcccagcctgtagttgtgtctacagaccccatccacggcctgtctgctcctctccaagagatccagccggctgttccactgctcagcatctggctgccccagcttggtcaatgccacaaacatccccacatcactgtcgaaacgtacatactcctccaagttaaagatgaatctgaccacaaactgcaccttttctgtcccgttggtgaagtaacagtcagcctttgcctgaatcacaaaatcttctggaaaaccaaaaccaaaaccatgaaccagccccctcctctgggaaaacccatgcctggtaaattacgtcagaccacatggatctaagaggaggcctttgacctcagtatgctcaaaaagcacagtgtcaagtgagaaaagaaacagaatgggattcaacagagaatgacatttattaaattttaaaaacacataaagagcaataatgctacatatttctaaaagccactctcatacttagagacttaccagacacgtttagaatggattctctagggaggggagagaatgagaacggaggcaagagaagagacgagagagtcttgcactactgccaataattacaatgtgctgtgaactcattgggtaaaattaaaccaatcctatgcacttaagaacaacaactacaataaaaaggaaattcaaatggagttaataatgtaggtaagtcaggaaggacgtcctgaagacattgcatctaagtcaagacttgaaagataattgctattaatgttgggttgtaatttactttcctttctaagttcagaagcctcctccaactctgaactgagccataagaatgaccttcctgggtgaaccccacttatccctcactcagtagctaatttcagatgaagttccagcctgtaatttctcagcatgtatactcttctctatttcctctagtagtctaaaccaggggggaaatctgaatttttcatcatcatttaacatctgtgctgatttttttttcagttgtattgtttaatggacattataaactcagggcggtttctattctctgagaataatgatctctcctggccaggtttgttcctcttttgtatttaatgaaactaacatgcaaaggggattctgttcttagcacattacatcctgtttctgctcattaatatgtgctttcatctcacattgcttcatggctgcatattctgtcacctgtgctagaaaaataacagtgacaagtaacttgtacctggtagccggaggacaaggacaatgtattctattcaacttctcttacttctcaaaactgtttagtacaattctgacaatataatagtggcttaataaatgacagaaggagcaacctttgtttccagtttcatttgtccacatataccccaactgagatttgtttccgtgtcctgaccaaaaaatcacagattgcctctgtgacccagcctactgcaggttgtttctcccagcaggctcgaacccaagccaaggccttcaacacgcccaggcactgactgaggttgatacacacaataaggatcctaaacaagacacaatgtttccctcttcctgcctccctaccccttgaataggtggctctggtatatgaagtccatcccatgtaaagaggcaaggcgtacctttctgccaaagggaagaacactgttctttgaaaccaaaagccacttccagtctggtctgtggcctggacttacaaagaaaggcatcactcccccatgccaattcttgcatacacactggaaaaaaacaattgctctgttcttacctggagagtctgtgccttgagtcatggaggaatccagtcgggtcagattcactagcagagccaccacccaggggacccacccagaacccattctggagaaaggaaaaaaatgagatagtaaaatcgtcagcctcttcagaatgagctcataaaattcagtcagaaagtacccattaagagtataaatcgctgtttttctggcttccccaggattggaaactcctcagattgacaaccaatcaagatagaagagttttgcatcatcaggtactgggtaggatactttcacaaagttgtgtcatacaactcaaccattgtttgcctgcagaatcactgacagtaatttaggtatactaaaaatgggctgggagaagaagtaaaaatatatgtttgacatattatggggccctagaagaactaggcagactgtttattatgtattcttctattccctggcctgttctgaccaataggtctcccttcttattgggtgttgacattgccgacaggcagtgtgtaaattaagaaggaattaagagtatgtaaattaagcattctgaagcatatgcctcaagaagatttagtaaagggattatcagagaagaaatagaagacatagagaacatttggagagtacgatttcctataagccaaaatgaccacaaaaaaagaaaagaaaagaaaacatggaaagagaattctcaaagaataaaattttgcaaaaaggctcaccaggatacaatctaagagagcattattgtgttttatggttagtagggcaccaataaccttcaagaggacagcagagtgttaaaggtagaagccatatttcaaaagaatgaattggaaacaagaaaacaaaggccgcagattaaaacagtctttcaagaattttgaaagtgaaaacaaaggaaaaaatgggatacactttagaaaaaaacaacactaagaaaaaatacttttcttgggttttttaaattgacacgtaataattgtacatatttatggggtacagcatgatgttccaacacacctatacattgtgtattgatcaaatcagggtaattagtatgtgatatatatacatgatggaatactattccgccataaaaaagcatgaaatcctgtcattttcaacaacatgggtgaacctggagggctctatgttaagtgaaataagccaagaacagaaggactatattacgtgatttcactcatatgtggaatctaaaaaagttgacctcatcgaagtaaagagtacgttaggagttaccagaggctggggagtcaggggtagaaatgggtagaggttggtaacaagtacaaagttacagttagacagaaggaatgagttctggtgttttgggaaaagaaacttttaagacaggagagacttcaacaaggttgcaagtgaagtgcaaggtatctgtagaaaggagaaactgaagagaaaaaagagaagaaaggggacattttctccaaaatgctgtggtctgaatgtcactcaaaattcaagtgttgcaatttaatcaccaatgtgatagtatcaaaaggtgggccctttaggaggtgattaagtcatgaatgcagaggcctcctgaatgggattagagactttaaaaagggctagagagagcagggatgatggctcatgcctgtaatcccagcactttgggaggctgaggaggaagattgcttgaggctaggagttagagacctgcctggaaaacatagtgagacccccatgtccaaataaaatttaaaaaattaaagaaataaacatggtggcatgcacctgtggtcttagttactttggaggctgaggtgggaagactacttgagcccagaagttcaaagttgcagtgaaccatgaatgcaccactgtactccagcatgggtaacagaacgaggccctgtctcaatcaatcaatcagtcaatcaataaaaatagaagggctggaggcaatagcttggcacttttgcccttctgccttcctccttgtgaggactgttacactggaatgatttgactcaagtgtttagttaagtattctttcagtaaaacctagacagtaaaacactatctttaagcaaataaaaccaaaagtgcaaattgtaattcaccatctatgttattattatttaaagggcaatgtttactcatcatttcacatcatctttcagcatga

SEQ ID NO: 585300 - DNA, 4001 bp, Homo sapiens
caaaattcttattcttgaatgaaaaacgttctcttactggtgattgaggaggagaaacaaagactaacaaatgaaaatgggagaatccacactcagagtggggcaattgaacaggcaggggcggatggatggcagaggaggaggaatctggactcaaggagctggggggctctgggcctggaattttagggtctggggcccaaggcaccaggagaagaggcaggtcaggatatctgagtcaagacctgggatcttgccttagcaatgacactggagactaaaggtggactccatggtgcccttgagcccagccctaccccatctccactatcctctgccaccagctgtgcaacttctgctaggggtgaggttaataaactggagaagttaatttgtggagcatgaaacagatgagcagaacaatcacagcaccttaatttccccagtgtgcccaagaacagagcaggcctgaagatactcaaacagaaacaaacatgtgccgtgtcactgataattctgtgtagacacacacctgccagacactgctcatggcactccctaggaagaacagcatgtgggaaaggctgccaaaattgttcatgtaaaaattacatcaatgctgtcttcctcggtgctgcctatgcagctggcagccatctcttcctccacatcatggcctccctcagactcctcatgaaggataagatcctcaaaaagaggaccaacaagttcatgaggcaccaatcagactgaaatgtcaaaattaagcataactggcggaaacccagaggtcttaacagtagggttcgtagaaggtccaagggccagatcttgatgcccaacattgcttatgggagcaacaacaacaacaaaaaaaacatgctgcccagtggcttccagaagtttctggtccacagcctcaaggagctgaaagtgctgctgatgtgcaacaaatcttactgtgctgagatcgctcacaaaatttcctccagaactgcaaagtcatcatggaaagagtcacccagccggccatcagagtcaccaaccccagtaccagggtgcacagctaagaaaatgagtagaaagttcatgtccacgttttgtgtgtaaataaaaccataaaaactgccaaaaaaaattacatcaatgcctctaaacccaaaggactctacccccacaggtccctggttgttgtggtgattttcattgtgtaaaatactttccacatcttttgacaccaagtctttctgcagccatgtttgaaaattaactttcaggctacagagtctttcttataccaaagttgaagaaagttttaagaaatatatttctacatctcctacatgcaaaacaacaggagcaagttgaggaattctcaagaaactggtcgagaagagagagcgcttagctatggaaaagagaaagaaggaagggagggcttcctggaggaggtggcatttgaaccaggactgacatcaggatggaaatgtcagtcagggagttaagtagggggagcagctccgccctccacgtccccagctcctcccgcccctgttttttctcccagtgaccccacgtgaaacgtctccgcctcctccagccaccagcagaagggactgccttcccctcagtgctcgcccctccctagtgatcactcagtgcccctgagctcattcttttcagtaaattctctctctgcgtggtgagaaaacaggcctggagaggctctgcgacccgcttaggaccacagaactcggtactaggaaaactcctattttaaaatccagccctgggtgggaagatttgggaagaatcgttaatattgagagagagagggagaaagaggattagatgagagtggcgcctccgctcatgtccgccccctccccgcagagaattaccttttccagggacggcaggaatgctacgcgtttaatgggacacagcgcttcctggagagatacatctacaaccgggaggagttcgcgcgcttcgacagcgacgtgggggagttccgggcggtgacggagctggggcggcctgctgcggagtactggaacagccagaaggacatcctggaggagaagcgggcagtgccggacaggatgtgcagacacaactacgagctgggcgggcccatgaccctgcagcgccgaggtgagtgagggctttgggccggcggtcccagggcagccccgcgggcccgtgcccagggcgcaggagcagccgggttggcctaagggaccttagtgccgggcggaaaggggactttgggttggggattcatggggggagcccatctggagcttgtcaggggagcgagcgcggggacctggactgggctgagcatggagtgaggaggacgagagcagagagacccccgggacttcatcaggcctggcagctgactgcatgtggggtgaaaaaaggaagccacaggacagcgcacaagggtatggtgtggagatggaggtggagatggcacagcaggccacacagagaagaaacctacagggaggtagctgggtttgaggtgcttgaggggcagatgggtggtctgatgggcaggtagacagaagggtctgcagccggggaggagactgagatacatgagaccatccagggagaggggacccagggggaagagcaaaggaccggatcctgggaactggacagttgtgatttggccaagacagaaaagcctgtgaaagagaccaaaaaaacccaagtgcagtgtgaggagaggcccgcagagaagagtcttggaagctgaggggaggtgacctcagcagcacagtggacagcggtgccagtgacttgggaaggtcagaaaacagaagatggaaagtgggtttggaaaccagggagacctggggagagcaggttggccgcagcggcaggagctggaatgggagggggtgcatgaggctgagtgtggcgcatcctcctcggggctgagatggattttacttgtcttgggttccccacggctgtcacagggcagtgtctcagttcattcgtctttttccttcaggaagtctgggtgtaaagggatggagagaggtgaggtgtgtgcagtaagaggatttctcaaggatgggacaggaaggccttggagctttggcttcctcctgtgaacttgtggggtggggagcctggtgcaccaacctgagggacttgagggagtagtatcaggatgtgggattgagccctggaccttttttctagaaagaggaaaaaaatgaagggaggaggaggaggaagctggggagatcacacctttgattttcttgttcctggaaagtgaaaggaagttcacctgctatgagtgagaaggtggacacactgggtggggatgaggtgagtgacatgagcttaggaaagttgctgaggtaattggttgagagaggtgttcaaataaaaataacgcaattggcaaaaactgttactaagactttgtagaggcaccaatcagtgacatggcagcattttctttcacagtaatcaactgccagattgcagacagccctgatgccagcctaaggagtgtgggtttctcctccaggcccgcaggtccccaacctcactcctctgaagactcttctggagatcctctgtgatgcacagatctccagactcagtgcccccagactcagattccctgggtggggaggtctggggatctctgcttgtaatcagctccctagaggttcccatgtagccagataagtattgtcagaacactgaagatttttgaaaaatgaaaaagagaaggttggagatgtgtcttcagaagactactaagggtgctggctagaggagggaccagaggcagggagatgaggtaggaaactgctattatttgtcagggaaattgcaatcaaggcatgagttagaacagggaaaacacagaggcaagggagaggtggaagggggaggaaagaagtagtgacaattccagggtggatgtccacccaaatctagaagtaattgagcaaatg

SEQ ID NO: 585301 - DNA, 4001 bp, Homo sapiens
caggttcagaaggataagtgcagatacgtaggtatacacaagatgcgaccaaacagcacatcagggaaggcttcctggggaacagatggcttcaatgtaggcattcagaaaacagggcaaaagccacttctctcagggaagacagcctgaccgggagaagatactgagtttactgtggggctattgcacttagaagacctgaaagtcatctaaggagaaataatacatagatatttgtggattatgggtggtctcaggagaggaatttaggccatagaactgagagtcattagtggcaggtgcaggttaaataagattttccaggaagagtgccaaaaatcagaattgccgagatctcagggtataatgagagaacatgatagttaagaggtggtttaaaagatgataaggaggatccaggtaaacaggagaaaaataaggacagggtagttcatcagaaagaagtggattatagtgcaaatgttattagtaactcaagtcagaggcactgagaagaacccactgaatttgaccttctgtagaggttcctgatggccaagatgagaggatcctcagggatgtaccagagacaagtcagaagcttagctccacgtgtgaggacacaaagaaagtgtctctgggacaggatgcagactgaaggcaaggttgttttttatcagttggtttgcacttatgtttttaaggtaaatgacatgtttaaatgttaagagactgggcagggaagccctgaagagacagctgagctcattaggaatttctaccaagaatactaaaaagtatttgcatctatgaagagaagcctattgtggtgtttattataacataacattagaaataactcaggtgaccgcgaacagggcaatagatacttctggttctacccagcctgacctcctctttattctacacatcttaaataaaactgtctgaagccagtgtgcatcttgtacgttatggattctaaccttccccatcactagattttggaatgacagcatcatgcacaggcttgatgtcattctccctgatttcagctacaggaaaaaggagcattcactacggtccatctctggctgagtccttgcagctatcaaaagtctaggcctcccttgcagtcctgaatctctcagaacccgaatcacaaggctatcaagaccatgcaaccctgctgtcttgagagaggaaagcttgtgaccacccacaaagacccaggaagagccctagggtcctagaagagagggaggatacagaaacactctttgcacttcgtctcctaatgcagagtccatagctcggagttcctgtaaagcagccacaaaagatagaggctggggatcccagagagataggagggccctgatagtaggtcactgtgtgcaggaatctggggaaggcagtgtatgaccctcagagctgggtctggacttcaaacttggctcgttgatctgctgtgtaaccttggaaaacttattcatctttttgagcttcagttttttcaaaataatttctaaataaaaggaataatttctaaatgaatggaatattatcttcattgaagattcctgtgagatgtaaatggggaaagaaactatgcaggagtctcataaattctggctgttattgctgttattattatgagggccagagggaacatagactatgaggaccagatagatcaatgagcccctaaaatctgtgatccctgaagcagcaattgatgtgaaccaccccatcactcaccccgacgctcctgcgtcctcctgagcactcacccttgatggccccagctcctcggagactcagcaggaaagccaaggagagggctctcaagatcacagctctgatatggaacattctgtcttcagggcgcatgttgtggggtctataattgatgactgtgagcacaggaacagtgatgaggaactgaggccgagtggaggcagatgagactgaaactgtgggcctctagcactggaaatgggtggagaggaatcagcatggctgggattcacctatcagagaaatcatagagctgacattctctgttgctgggtaaagaggacgctggaaggtgctggggaagagatgggagaattttaggtaccagcgtggtcaagagagctccagttcacagttcattttcagagttagagaaagagatgtaaaaagataagttacaccttcttctgacggcaaatgttttccattatgttccttctcccgagccccacccccatcccagacagtcagatgatctttgatgttttttggtcactatattttaaatcatgttttatgttatgttgtcaatattttacaaaaatattctgctgataattaagaatgaatgtgctatctaataaaatatataattaatctttctttcaggtccacctccctgagatacctcctttttatttaatcatttctgcagaagtgttataatttctatttagaggttttaattaacttgaatgaagttgatctttaattgtttatctattcctggttacctttgttagtgaaatttctagataatttttatttttcagatttcttagtatttgatttttcctggtatttaaacagtgtaataacatttttatctttaaattactagtcttgttatttcattttcatataagaatacccaggacagcattacctgtggtaacaatgtgcgcccatattttgatcttgtttttaagaagggtttctctaatgtttttctgttacaggtaatgttaattttttattttatattctctttaccatatttaagaaatacttttctagtctcattttaaatatttcaattttgagctatttatttgatactcatagagaaggtcacaaaacatttactatttaatgtaatgatgaagtacatatattacgttaatattttatcttatttgtggtagccttaccttgcataaataataattactaacagattaggacatgagagattctgttattagtgctttgcatgcattacctcatttaaacctcatattaaacctgagggaggtattattaatgtctactgtaaaaataaattacctgagacatcgaggaagtatttgtctaattatctatggcaggtaaatgacaaggagaaaagtcccacccaggcagttactaaaaaaactgagtttttctccacaatcctctcctggccccttaatcctactagacaccttctactacataattattttcttctcttgcattttacatgctagccttctatttacattttaatattgatttaaagaaatgatgccaatttgattttttttgaaattagaattggtggtccaacaggatcacatttataagtgtctaaagtaagaagtaatgttctttgaaagtttgtaaaaatattcactctaaacaaaatagaatcagatgctttgaaggaggtggggtctttgatgattttttttcactttcttccttatttaccagtcaatttatattctctatggactttatttttccaaagcaatttcagacctattgatctcatttgatcttaagagctttgctataaggcaggttatatcatccccatattgaagacaaggaatcgaagtccaagagaggcagtgtcgttaaagctgcatatttacatggtagggtaggtggtgtgtccacgctcccagtgtaaggtccctagactgagccctcctgaccctgatgacagtcctgtggaagaacctggtaactcctgcacatcgcaggactcacagacctctgggagaaagtaaatatgaatgggtgctaatcttaaacacacccttggacaaaggcaagacagacagactcagacctcatttgagttctgagatgggtactctaatccctctaagtcatgccactgaatgaccttttacacactaagatagcactttttccacaacagaccatgtcctgtgggtgtgtgaggtgtggcagaattggggaaatgataa

SEQ ID NO: 585302 - DNA, 4001 bp, Homo sapiens
gactacaagttcaagttctcctccccttcctggacaatgaacccaaggtaatagataagaggttttagggcttgaggggctgtattcaggagattccaaccttgctaccctgaaagatgaggaggtgacatgatgtcagtaccttctaggtgtgtcctaggaggggtgtggagaggtctaggaggaagggtgtaagcaggaaaagtggaagtcagtggaaaactaaggtacctactttgcagtccttcctctcagagtgttggtgtaaatttggactagaaatgtcctgagagtacaatggttgaactagtttacagtcccaccaacagagtaaaagtgttcctatttctccacatcctctccagcacctgttgtttcctgactttttaatgatcgccattttaactggtgtgagatggtatctcaagacagtgtggcaattcctcaaagatctagaactagaaataccatttgacccagccatcccattactggatatatacccaaaggattataaatcatgctgctataaagacacatgcacacatatgtttattgcggcactattcacaatagcaaagacttggaaccaacccaactgtccatcagtgatagactggattaagaaaatgcacacatatacaccatggaatactgtgcagccataaaaaaggatgagttcatgtcctttgtagggacatggaggaagctggaaatcatcattcacagcaaactattgcaaggacaaaaaaccaaagaccacatgttctcactcataggtgggaactgaacaatgagaacacatggacacaggaaggggaacatcatacaccggggcctgttgtggggtggggggaggggggagggatagcattaggaaatatacctaatgtaaatgacgagttaatgggtgcagcacaccaacatggcacatgtatacatatgtaacaaacctgcacgttgtgcacatgtaccctagaacttaaagtatatatatatataaaaagaaatatcctgagagtatcctgagagaaaaacaatggatcatagatgccataatattacaccagccacagggaggcagcaggaagaagagatttttcacttggttactgcttccttggctgtctgataacctacactcaatccctgtcatgcacccacacaacctcatctcattcttcctacaagtcgcaacccactctagtaccctaaccaagttctggggaggctgggagaagtacctttaatgagaatgccttcaggggctaaaacctatccccctccctcccttctctccttaattgtccaagggatgtgggctcctgctccaccctggggaataagaggcattcttcgtgagcactgaatcctcagtgatcctcagagcctggacactccagcttagggctctctgcctgagtcccctccaggctggatgcagacatgaacacgcccaggagcctgcacttgccaacttctctctctgcaaaccttgtctgtccaaggttatccaggacctcttggtcccattttccccaaagacactgaccactgggcacctctctctgtttactgtacccatgtccttggagagagaataggccagtagggtagcaagctatcctataggggatgaacctctttctctagctgggaagagaggacactgccttagggcaggagcccccgcagcctgtctcagaatttgatcccttaaagataacgtcccctaggaattgttccctgagccagaccctccaagaatggcagttcggctcttacctggagtggccctgccctggaccacagatgtgagcagcaccatcagtaacgccgtcagagccactgtccggggggccgcagaaacctgcagaaccatcatggagctggaaaaggatggcaaaatgaaaagagctgcagtcaggaaaagaaggactcgctaaagggagctcctgtttgaaatattagagaccatgaacccaagtagtcttctgtgaccctgggattggacagagtctgagaaaagaaccaatggacactgagctttgtatgagtcattgctcactaggcagaaagttagtatgaaaggtctgaaaatataaagcctgtgatgcacttaagatgacggaggaaagacagtgatactcattttaaccagtcagataagtcatgatgtttggggagattatgcgttttctttgctctgaaggtgatctcaaatattctgctggcccatctacagggattatcatttccccaattctgccacacctcacacacccacaggacatggtctgttgtggaaaaagtgctatcttagtgtgtaaaaggtcattcagtggcatgacttagagggattagagtacccatctcagaactcaaatgaggtctgagtctgtctgtcttgcctttgtccaagggtgtgtttaagattagcacccattcatatttactttctcccagaggtctgtgagtcctgcgatgtgcaggagttaccaggttcttccacaggactgtcatcagggtcaggagggctcagtctagggaccttacactgggagcgtggacacaccacctaccctaccatgtaaatatgcagctttaacgacactgcctctcttggacttcgattccttgtcttcaatatggggatgatataacctgccttatagcaaagctcttaagatcaaatgagatcaataggtctgaaattgctttggaaaaataaagtccatagagaatataaattgactggtaaataaggaagaaagtgaaaaaaaatcatcaaagaccccacctccttcaaagcatctgattctattttgtttagagtgaatatttttacaaactttcaaagaacattacttcttactttagacacttataaatgtgatcctgttggaccaccaattctaatttcaaaaaaaatcaaattggcatcatttctttaaatcaatattaaaatgtaaatagaaggctagcatgtaaaatgcaagagaagaaaataattatgtagtagaaggtgtctagtaggattaaggggccaggagaggattgtggagaaaaactcagtttttttagtaactgcctgggtgggacttttctccttgtcatttacctgccatagataattagacaaatacttcctcgatgtctcaggtaatttatttttacagtagacattaataatacctccctcaggtttaatatgaggtttaaatgaggtaatgcatgcaaagcactaataacagaatctctcatgtcctaatctgttagtaattattatttatgcaaggtaaggctaccacaaataagataaaatattaacgtaatatatgtacttcatcattacattaaatagtaaatgttttgtgaccttctctatgagtatcaaataaatagctcaaaattgaaatatttaaaatgagactagaaaagtatttcttaaatatggtaaagagaatataaaataaaaaattaacattacctgtaacagaaaaacattagagaaacccttcttaaaaacaagatcaaaatatgggcgcacattgttaccacaggtaatgctgtcctgggtattcttatatgaaaatgaaataacaagactagtaatttaaagataaaaatgttattacactgtttaaataccaggaaaaatcaaatactaagaaatctgaaaaataaaaattatctagaaatttcactaacaaaggtaaccaggaatagataaacaattaaagatcaacttcattcaagttaattaaaacctctaaatagaaattataacacttctgcagaaatgattaaataaaaaggaggtatctcagggaggtggacctgaaagaaagattaattatatattttattagatagcacattcattcttaattatcagcagaatatttttgtaaaatattgacaacataacataaaacatgatttaaaatatagtgaccaaaaaacatcaaagatcatctgactgtctgggatgggggtgg

SEQ ID NO: 585303 - DNA, 4001 bp, Homo sapiens
gtgagccccgagcattcttgcttgtatgggcctcttcctccacaaaaatatggaaaattatattttatgactgaattggtataaagacaatataatctaggctgaattaaaagttaaaacattttcttaggctctaatattccattatttttctaattttaaaaggagttaaaaccttctcatgtggctttacagtatggagggtcccctgcactgcccacattgtgcctaatgaatgagccaagcctgaccagggcactctggtgtgaggttgaagaaaggaaatttggaacaaagacgccaagcgctctggagaagcaggtgaaacttccactgccgaacaaaatcataatgggagcagccacggttaataaagttgtgaaagtttaaagtaccttccagttcacttccccttttaactatctgacttttcaacttttgttttacaaacccactgtccatctctataaaggagcagggagtcagagatggatcctgaaagggaagagggagaaagggatgcatgaagagaggtggaaagagatggacgacaaaggcagaggagagtaagagaccaaataattaatctgtgcttcctttcttccttccttcctctttctttctgtctttctttttcccttccttcctcccttcccttttcttttcttttccttccttccttccttctccttccttccttccttcctcgctttctttcctctttctttttgagacagcgcctctctctgttgccctggctggagtgtagtggtgccaccatggctcactgcagcttccgcctcatggactcaagtggtcctcccacggcagccttctgagtagctggcaccacaggcacacaccaccatgcctggctaatttttatttttctttttttgtagagatgaggtcttgctatgttgcccaggctggtctcaagctcccaggctcaaatgatcctcctgcctcggcctcccaaagtgctgggattacaggcatgagccaccttgtctggcccacttttctttttataggactttattagatgaggtgaagaacaggtaatttgggttgataatttgagaataaaatgatttattttaccaattttttctacttctcaattttaaaataaaatgatcccttattttgctaaagaaaagaaatgtgaagctatatctgtaatagaaatatgtaaaaaaaattgacattcatgttttcactatttacaaagcttagccacatgcccattttatttgattacttgtgaggtgacacatatgaggcagctgagagtaagtgaggaccatgtggtaaaatgattgttgaaggcattcagcctgctggactcctttacccactccccacctgtgccagttcccatgtggaaatgtgagtaagtctgagagaaagaaacgggcaacattttaaatatctatagagtacataattgatggaatgaccccaagatctaccaccggagacatccgaaaagcttcaaaagttgttcagggaaatttgagaatgacacttcataaatttttaataataaaaaattatccactgatggaaacctcactaatttttgaggcaatcatgatggaacgacatagagacctccaggccgtagtcactgaatataatataaacagaatagcgtccttagtgaacacaacagcatagataacaaaaagagtaggttggggctctggtttcctgaaggaggaacagctataatttttaattgtcttaatactgaaagggcccttaggaaatctctacagtttctctgcaaatcgctttatctcttttccttcaatttactgtttttcagctccagagaacatccctcactcatgcactcacccacaatgtcttcacctccacaggggctcatcacggtggtcagagcgagggcccccagcagcagagctttgtttaggatcatcctcttcccaaggcagcctcagcagttggtgttctgagctgtagagtaattgtgaggacctcaagacaaggaaatctgaagacacccaaaccaaaccctgccaagtcaggttttggccaattagaaaaatcccctatggtgacatctcagttactagttgaagagtttgtattaagagccctggaaggagacggggcaatccccttgtgatgcagcctctactcagagtggacttgaggaattgttctatgaataaagggaggacattaaattggaatcttctctggtgtgtgcatgtctgccagtcgcaagagggatgggtgtttttcttttttttcctttttcttttctttttctttttttttgagacgtagtctcactctgtcacccaggctgaggtacaatggcaaggtctcggctcactgcaacctttgcctcccggattcaagcgattctcctccctcaccctcccaagtagctgggactgcaggcacctgccaccacgcccagctaatttttgtatttttagtagagacggggtttcactatgttggccacgctggtcttgaactcctgacctcatgatctgcccgtctcagcctcccaaagtactcagattacaggcatgagccaccgcgcctggccaggggtgggcatttctgagcagcctcgtggatagatgaggtcatcagttatacggcatccttcaggatgttctggcttacaacctccaggaatttttccctgagttgatttccctccctggcagtccccatcccctgccctttctctggcttctgtatgtgggttagctgtttttcttttagcttccacagtgcgtatggaattctccaaatgttaagctgaccccacctacctagggatctctgctggtggtagcccaagcaatacctttgccttttctacttgtataaatccagctgggtaagttcttctcaagtgctcaaaagctccaggtggttttggccagggcaataaaaaggggttataatgtcagatggggctgtctatagtaactatatgagactttatacagtttttctttgcattgagtaatccttatgttctgtgttttggtgcttcttgagtacgtttaaaggaaatttagggacattgattacatttaaaatttggctggctcaattactctaagaattttttttttaattaagaatatgaagtcaaaagttgagggtagaataagaattgcactgccttagaaaaatggttttcttttcttaaactatcagatcttttaaaacttgttatcctaccccattaaaattccaaatatttgcaagggactagagattgagctaaagttagtccttagagggaaacttattatgttttttcagatgcatctattttctgtatgtgatagaaaccgtaagttaatggagcttctatttagaatcactctgtccttgataaatggccttctgagattctcagcactatgttttacctcctactggcagagactgtaaaaaaaaaaagtaaaacaaaaaaaaaaatgtcctgacacctgagagctgtctggatgtaattaacaaaggcttggggttgctagcagctagcctggcactcccaggtggttttggttctcctgttggagataaaggatttcatagaacatcagaatcagacaggtactctgtgagcacagtggattgagacagaacacctgaatgctcagtcatcatgtctgaacccagacaaaacataaatattgtccaaaccacaaaaatgaccaggcacatctctctcttgggagtgattactgcttctttaccaaccacgtctgtagcctcaggatagtcttctgtccctctaggtaggatttatgaagctacccaatcataacattgccaccccaaccctccactttctgtcagaatccaattaaaagcaaaatccctctttcttaaatcctccccaaaatcacctaaaacaagcacaaaccttacaactgattaatggtcaattttatgtgtcagctagactgtgatccccagttattcagtcaaac

SEQ ID NO: 585304 - DNA, 4001 bp, Homo sapiens
aatttttgacaattacatagattttggggaagactgacaggcacccaggtagcagaaccacgcaaagcccaggatcagggatgcccagggctgaattctgacttgtgagccccgagcactgttgcttttgtgggcgccttcctccataaaaatacggaaaattacagcttctgattgtattggtataaagacaaatacaatccaggctacattaaaagttaaggccgggcgcggtggatcacgcctgtaatcccagcactttgggaggttgagacgggcggatcatgaggtcaggagatcgagaccatcctggctaacacggtgaaaccccgtctctactaaaaatacaaaaaattagccgtgcacagtggcgggcgcctgtagtcccagctactcgggaggctgaggcaggagaatggcgtgaacctgggaggcggagcttgcagtgagccgagatcgtgccactgcactccagcctgggcgacagagcgagactccgtcaaaaaaaaaaaaaaaagttaaaacattttcatagactgtaaaacttcatttttcttctaattttaaaaggagttaaaacgttctcttgtagctttacagtttggagggtccccttcactgcccacactgttcctaatggataagtcgagcctgaccggggcactctggtgtgaggttgaagaaaggaaatttgaaacaaaaaagccaagtgctctggagaagcaggtgaaacttccactgccaaacaaaatcagaatgggagcagccatggttaataaggttgtgaaagtttagagtagcttccagttcacttccccttttaactatttgactttccaacttttgttttacaaacccactgcccatgtctgtaaaggagcagggagtcagagatggatcctgaaagggaagagggagaaagggatgcatgaagagaggtgggaagagatggacgacaaaggcagaggggactaagggaccaaataattatctgtgcctgcccatttttctctttataagacttcattagataaggtgaagaactagtaatttgggttgacaatttgagaataaaataatttaatttaccaagcattttatcataaagttctcagttttaaaatatattccttactttgctaaagaaaaaatacgaagttatacctgtaataggaataagttaaaaaaagttgacattcatgtttttactattcataaagcatatctacatgcccattttatttgatcataagcgaggtgacatatatgaggtagcagagagtaagtaccacatttaccacgtggtaaaatgattgttgaaggcattcagcctgctgggctctttcacctactccccacctgtgccaattcccatgtggaaatgtaagtctgagagaaagaaaagaacctctttctttatatctatagagtgtacatacttcatggaactatctaccccaacatatgctataggaggcatatgaaaagcttcaaaagttgttcagagaaatttgggagtaacagttcagaaatttttaataacaaaaaaatactccattcatggaaacatccctagtctttgaggcaatcatgatggaatgccacacagacctccaggctatagtctctggatataatataaacagaacaacgtccttggtaaactccaatagcacaggtagcaaagagagtcggttggagctctggtttcctaaaggaggaactgccataattttaaaatttcttaatattgaaaagacccttgggaaatttctactatttcttagcaaattacactctctcttttcctttaatttactgtttttcagctccagagaacattcctcactcatgtactcacccacaatgtcttcacctccacaggggctcatcacggcagtcagggcgagggcccccagcagcagagctttgtttaggatcatcttcttcccaaggcagcctcagcagttgctgctctgagctgtagagcaattgtgaggacctcgagacaagcaaatctgaagacacccaaaccaaaccctgccaggtcaggttttggccaatcagaaaaatcccctatggtgacatattgtttgccagttgcagagtttatattaagagccctggaagaagacagggacatcctctggttctgacacatcctccacacagcatggtcttgaggaaattttctataaataaagggaagatactaaatctgaatcttctgtcatgtgtgcatgtctgctagtgtcaagaggggcgggaatttctgagcagccgcttggataggtaaggtcatcaataatatggcatccttcagggttttctgggttacattctccaggaattcttccctgaagtgattttcctccctggcagtccccattccctcccctttctctggcttctgtatgtgggttagctatttttctttttgcttccatagtgtatatggtattccccaaattttgacttgaccccaccttcctagggatctctgctggtggtagccaagcaatacctttgccttttctacttgtataaatccagttgggtaagttctcaaaagctccaggtgtttttgaccagggcaattaaaggggttagactgtcatgcggtgctgcctacagtaaccgatcttttacacagttttttgttttgcttctagtaatctttatgctctgtgtttcggagctgcttgaatatatttaaaggaaatttagggacattgattacattaaaaaagctttggctggctcaattactctaataatttattttattttattttatttatttatttattttaagacggagtctcactctttggcccaggccggactgcagtggtgctatctcggctcactgcaagctctgcctcctgggttcacgccattctcctgccccagcctcccgagtagctgggactacaggcgcccgccaccgcgcccagctaattttttgtatttttagtagagatggggtttcaccgtgtgagccaggatggtctcgatctcctgacctcgtgatctgcctgcctcagcctcccaaagtcctgagattacagatgtgagccaccgcgcccggccagtaattttttttttttaatttaagaatgtcaagtcaaatattgagagtagaataaggagaattgctttaacttagaaaataggtttacttttcttaaactactggatcttttcatatttgttatccaaccacattaagatttcagatattgcaagggactagggaatgagctaaaatgtagtaatcacagggaaacttaccttttttcagatgaatctattttctgtatgttatagaaacaacaagttagtaatggaggtttcatttagaatcactctgtccttgttgaatggccttctgagattctcagcatgttgtcttgcctcccaatggcagagactaaaaaaaggtaaaataaaaagtgtcctgatacctgggggctgcctggatgcaattaacaaggccttggggttgctaggagctagcctggtgtgcacagctggttttgattctcctgttgaagataatcaatttcatagaacatcagaatcagacaggtactctgtgagtgcgatggattgagacagaaaataaggccactcagtcatcacgtctgcacccagacaaaacatgaatattgtccaaactacaaaaataaccaggcacatctctcgaaagagtgattgctgcttctttaccaatcacagccgtagcctcaggatagtcttccgtccctctaggtagtatttatgaagctacccaatcatagcattgccatccccactccctgctttctgtcagaatccagttaaaaatgaagtccctctttcttaactcctcctcaaaattacctaacacaagcacaaatcttacaattgattaatggtcaattttatgtgttgactggactgtggtccccagttattcacacactaataatctaggtgttgctgtgaagatattttgt

SEQ ID NO: 585305 - DNA, 4001 bp, Homo sapiens
aatgaactgggctcagatttcagagacctcgcccccatcgcccctcccggcacagaaactcggggtctcggccaagggtgggcctcacggaggggcgacgacgctcacctctcctctgcaagatcccgcggaacgccacctcgtagttgtgtctgcacaccgtgtccaactccgcccgggtcccctccaggacttccttctggctgttccagtactcggcatcaggccgcccctgcggcgtcaccgcgcggtacacccccacgtcgctgtcgaagcgcgcgtactcctctcggttatagatgtatctggtcacaagacgcacgcgctccgtcccgttggtgaagtagcacatgcccttaaactggaacacgaaatcctctgcggggaatcaccggccggtcagtcaggccccagcccggccgcccccgcagccgccgccctgacccggcctggagctgtggaaccgcccgcgcgacctccagttcccgcccgcccgtgcctggcgctccagacctgggatcctcccggcggctctgcccagctctgcccgccttctttgcgggcttctggaatctgccttcctacatccaggaaagggaggaaagccctgtccctgcctgagcctgtgaacccagcgaagaggcagtcgggctgattttacatgcacctctgcacttagagggatcagggcgttctcgcatgaaatcccatttttcatgaagctcctggatacctcagagataaagttatccacataaatctgagagttcaacggaatgacgagataggtccaggaattaagcctggcctcgttctgacacgcgtattctcttggtccctgggtaaaataccttccttcccatgcctagatttaccctcccaagtcccgttgaggttcactcccttctatgttggaaaggacctacacctctgagtcctagatagagacatttattcatggaaagagcacaagcttttgaatttgataaactagattccaattaaactgtggcagtcaccagtttgggcaggttatgtaacagaatatccatatcacaagtataattgtgtaaaagaaaatcatgatatctacacacaggatgttagaaggagtgagagagaagttatataaagtattgttctgtctgaagtgagtggtttcacaatatgtgttatttcccttctttacatcctccttcctactaaattcagtccaccattaactcgggtctctgaatcccactcaagtcaccatttgcccataaatcagtgaaacccgaagactccctctctgtggtcagccagtcagcttccctcagcaccaagattttgcctccacaaatgctccactcggtcaggaatagagacaaattttcctcaaatacagagactacagacaccattgctgcctcacattttccaatgcaggatctcataatcctaagtccaggcagtcttggggcacgcctaaatgacaaatcctgctgtgtctttggagaaattcatatcttcaaaaataaccccatgctcactttgtcctatcgctggtagtaaatgtacactttatctcctctttctctcctctctcctcctcttccaggcttaagcctgtaggatggggattggattgtcctcatctcatcactaaaagataaatgggaatgcaacatagctttctttcccaagagagaggaaatgttgatgaaagattgtgtccaagatcatagagatcaccatcccccataccccagcccaaggagagcctgttcccagagtggcggctctggagagcagctgccctgcacttaccgggagagtctctgccctcagccagtagggagctcagcatcgccagcatcaaggtgacagttgctacccgaaggtctccggggatccgcaaagccttcttccaagacataactgagacgaagggaaaagcagtggtagtcaacacagctcggacctgatggatctgatgtacctggcagaaagaataaaaacctgtggatgtttccgtgagtggcaggattggatggtccctcggaaaagaaccaatcagcactggagctgaaggacctcatctgtctctgggcagacattttttttgtgaaggttctcaatccagtgcctggcactgtgacgtcttcaaattgtactggatgaacatctgaggtgaaaatttcctctcgattatagaagagctgaagaacgaatgcctcggggattttgagaggcaaaagaaaaaaatgcgattcaacagtaaacatctctgtaatattgttaaaaaccagttgttattatacttgggatttttaataaagcaaattaggtggggatcatatttcaggggagagaaaattgctgtcacagaaatttttactgctgttgtcttagacacgctgaagagccttaagtcctggggagaagagcaaagttcttagaaggaaataatggtaagttgcagttccaccactaatgtgctttagaagagtcaacaaattactgaatttatttttgccccaggcttctctttataaaatgtgggtcatgtttcatgcattttacatctagatcttcacatgtacaaatttaagattaatttgtcttgtttaatattacaaaagtctcctcaactgttatgtgtaactatcaggttaatatgtggaacaagaaaacaagccaaaaaaaaaaaattgatacccacccctgctggtaaatgattcttcattatgcaagaacatattgtatttatgctcttctagtgaaagtatttgaaaagttaattaagttgacatttcttttttaagttcttcagctgtttaaatcctccctgaaccatgaaatgatgcatctgatatcagcaaaggcacaatacacagaattttacagtattcggatgcagtcatgtttcgttttgaagagagagcacaaaacctgtggagaagcatttcctgggtcctgaatagtactaatgatggagaaagtgtttagagtcacagagtgtactgtgccagccctaaacattaaatcccaaatggcagaggtatcaatgtgtttttttttcaattctatttttttaacagttcctcatggacatatctacatcaatgtgtttttataaataaacataacttatcaggctcctcttgacagtgactaggggcaatactaatggttataaagcaattagaacaacgcctggcaaacattacttctgacctcaaccaagacaataaatatctccacttctcttcttctctccctttctctctttcttttcccaaaatgttaggttctgcttttaaagtagagaatacaatctaaaatcagaatataagtttatcagataaaaagaagcagggaagaggcaacagcaagacgtttgcaatagtggcacatgaaagcgttgagccactccaatattctgtattattcagtgcataattctagagcacctgagactgggaaagttgccactgggcgtccagcagcagtggtgtactcaggatcagggtaaacccagtctaaggagggtctccactgctgtgatggacgcataaaggaggaaccaaatgcacacctggaatggagttggggcaaggaagaataggcagagagacctgaaggtgccctcaatgtccttcctcagcccctacatcagtgcgcctcaaaatagaggtctctaatccatcctctccttcctgtctaagggaaaaacttcccgcaggtttattctgaggcaaaggctgcgtcatacctggggattccccagtctcacaggcctctttgcacagacttttcagctagcaacaagtgtcactttagagcctttttctgattggctaaaacctcactggaaaggttttgctttgggcttctgccagttgtgtctgcctggcccagccttctctacagttgactaccctggccctatccctgctgcattattcagggcattcaggcagaaaaaggccagagaagaaagaaactaggtcaagcat

SEQ ID NO: 585306 - DNA, 4001 bp, Homo sapiens
tggatcagggctcggtccttgaggccgcgccgtcctcgcccctctgtgcgcaagagactcgggccccggccaagggtgagccccgcggaaggacgacgacgctcaccttgccgctgcaaggtcgtgcgcagctccgcctcgtagttgtgtctgcacaccttgtccaccgcggcccgctcctgctccaagaagtccttatagttgttccagtcctcgatgctccgccccagctcggtcaccgcctggaactccccaacgtcgctgtcgaagcgcccgtactcctcgcggttatagatgtatctggccacaccgcgcacgcgctctgtcccgttggtgaagtagcacatgcccttaaactggaccaagaaatcctctgcggagaatcacggcgggtcagtcaggccccagcacggccctagccccagcccccagccggaccgcacccttcagccgctgccctgacccggccagcagctgcgaaacccgtccacgcgaaattgagttcttggctgggcccgtgcctcgtgctccggacctgggatcctcgaggcatctctgccccagccctgcccgccctctctgagggcctcgggaatctgccttcctttagggaggtaagagggaaagcccagtccctgcctgagcctgtgaaccaagtgaagagggcagtcggaccgattcaacattgacctctgctcttagatcagggcgttctcgtatgaaatcccattttccatggagctcttgggaatctcggagacagagttatccacataaatttgagagttcaagggaataacgagaaaggttcaggaattaagcttgttctcatcctgatgtaagtattctcttggtccctgggcaagagaccaagtaaacccatgcctggatttactctctttctgctatacccgcccaagtgccctgtgaggttcactcacttctgtgttagaaaggacctacacctccggagtcctagaaggaaacatttattcatggaaagagcccaagcttttgaattctatagggtccaattaaactgagtcaatcaccagcttgggcaggttacttaacagaatatccatatcacaagtataattacataaaaggaaaatcatgatacctacacataggatgttaggaggagtgagagaggatttatagaaagtactgtcctgtgtctgaatggagtggtttctcaatatgtattatttcccttctttacttcctccttcctatcatactaaattcagtccaccatcaactcaggtccctgaatcccactcaagtcaccttttgcccataaatcagtgaaacccaaagtaagactccctgtctgtggtcatccagtcaccttccctcagtactaagagtttgcctccacaaactctccactcgagtcagtagtatagactcctttacctccaatacagagactacagacaccattgctgccttacattttcccagtgcagaaaaatcctactgtgtctttggggaaatgcatatctttggggaaatgcataaccgtggagtgccatggtcattttgtcctgtcacaggtagtgaatgcacactttgtctcctctttcctctctcctccttcaggcttaaacctgtgggattggggttggattatcctcacctcacccattataaggtggaaataaaaatgcaacatagctctatttcccaaaaagaataaatggtgataaaagactgtgttctgagatcatggagatcaccatcccccatactccaacccaaggagagcctgttcccacagtggtggctctcgagagcagctgccctgcacttactgggaaagtctctggcctcagccactggggtgctcagcatcaccagcatcacggtcacagctgctgcccaaaagcctccagggatctgcagagccatcttccaagacgtaagtgagaccaaggaaaaagcagtggtagtcaacacagctcaaacctaatggatcttatgtacctgccggaaagaataaaaacctctggatgtttccatgtgtggtaggattggggagtccctaggaaaggaaccaatcagcactggagctgaaggacctcatctgcctctgggcagacgtttttctgtgaagattctcactccaatgcctggcactgtttcttcttcaaattgcactagatgaacatttgaggtgaagatttctgaatagctgaagattgaatggcttaggggttttaagaagcaaaagacaaatgtgattcaagagtagacatcttacaacctattgttcttacacttgggatttttagtagggcaaattaagtgaggatcatatttcagggaacagaaaattgtcacagaaatgttcacttctattagacactctgaagagccttaagttttggtgagaagagcaaagttcttagaaggaaatgatggtgagttgcagttctaccactaatgtgctttatgagagtcaacaaattactgaactccttttcacccccaggcttctctttgcaaaatgtggatcatgttttatgcattttacatctagatcttcacatataaaaatttaacattaatatgactagtttaatattacaaaagcctcctccactgttatgtgtaactatcaggctaataggaggaacaagaaaaaaaaaagttgacacccagccctactggcaagtgattctttattatgcaagaaggtattgcattcatgctcttcgagtgaaagtatttgttgacttttctcttgtaagttcttcagctgcttaaatcctccctgaaccatgaaacaggtgcatctgatatgagcaaaggcacaatacacaaattttacagtattcagacacagtcacatttagttttgaagatagagagcaaaagctgtgaagaagaatttcctgggggctgaatcgtattaatgatggagcaaatgtttagagttacaggtcatattgggccagccctaaacatcaaatccaaaatggcagaggtaccaatgtgtttttataaataaatttcttacttatcaggcttacgttgcccatggctagggatagtactaatggttataaagcaattaaaacaatgcctgacaaacattactggtaatcctaaccaagacaataaatatctccacctctcttcttgtctcccttcctcccactcttccctgtatattagtaaagtagaagatagagagcatctaaaagcagaatatgtttaccaggtaaaaagaaacagggaagagacggtagcaagaggtttgcaatagtggcacatgaaagcattgagccactctaatattctgtattattctgtgcatagatttagatcacctgagactgggaacgttgttactgggcttctagcagcagtggtgtactcaggatcagggtaacccccagtctaaggagggtctccactggtgcgatggaagcataaaggaggaacatcaaactcagacctagaacggaactgggggcaagaaagaataggcagagagggacctgaagatgccctcaatgtcctctcagtccccacctcagcgtccctcagaatagaggcctctggcccaccccttcttcctgttcaaagggagaagcttccctcaggtttattctggggctgtgaggcaaagtctacgtcaaacctagggactccccagtctcatgggcctcttcaaacagacttttttcttttcttttcctttttttttattttccttttttcttttcttttcttttttagggacagggtctggctctatcacctaggctggagtacactggcatgatcatggcacactgcagcctcaacctcttaggctcaagtgatcctcctgtctgagcctcccaagtagctgggagtacaggcacacaccgccattctgtctaattttttaaaaattttttatagaaataggattttgctatgttgcccaggttggtttcaatgtcctggcctcaagcaatcctcccacctcggcctcccaaagc

SEQ ID NO: 585307 - DNA, 4001 bp, Homo sapiens
taagattaaatgagataaggtgagtaatttcttaatatatcaacaagactgtaacaagcactgtttacattttagagtcagaagcttctctttatttaagggccaaatctatggaaaatatacctggggactgaagtactccaaaaattaagactgagaccttgtagcgtcatagtccccctgcttcccagcatccaaacccacacggtggttacctctatgagaaggttctcgtctggattgaccttggcaattccaccttttatcttaatgctccttaaattgggactgttattatggaagatgttctgttatgattgacattgagaataaccaacaccaagggaataatgaacatgaaaagagaaagctacactgggagagtatgctgcctctgtggagtgtatcgatgagtgggagattttttttttccttagtcttcaaagataaggtgagatattttgttttgttttggtttggttgtttgagacggagtcttgctctatcgccaggctggagtgcagtggcaccatctcagctcactgcaacctccgcctcccgagttcaagcaatcctcctgcctcagcctcccgagtagctgggactacaggcgtgtgccaccatacccagctaattttttgtatttttagtagagacggggtttcaccatgttgcccaggacggtctcgatctcttgacctcatgatccgcccgcctcggcctcccaaagtgctgggattacaggcgtgagccaccgtgcccagccaagatgagagattttaatgtttgactgtgtattgataaacctaggaatttatttaccgtttgcatctatgcaaacacacacaaatatactagctgcctcttcacaaaccaagggaagatcctctgtctttctaggtaagtatccctatgtatggctcttttggggcaatagaaatctacaattgccactatgggtatgggagctgggttattactttgcttatttcaagtctacctgacaccttctgtgggggtcacgctgggtgaagaatacttttctacagtacatctttacaacagcaccaatgttgctctggagatgagagagaataatatcagattccccatttccttacttatttttctactctcttggaaatattactaagttaacatgatataagatctgctgtaccatggagatgggaaggcagggaatggctatcactgtcccatgaggcaactcatatcagcatgccttccctccccttttcctggggtaaattgttgctttttgatgacttttccttctagtaatcttcaacacaatatatgtgctcaatatataccgacaggatttacactccaaaaaataactactgtatcatgtattcagataagaacagggctaataactttttttttttcatttaattctagcaaaactatgtgtggtttttagtttttaattttactaattttccagaaagaataattaaagcccagaaatataacttgttaatgcttgccagaaaatattcttcctcccccacccccacccccacccccagtttggcttgtagcaggaccttgctattcatcaatacacaactcagttttgaccctctaaaccaaatttgacttacttcagtttgtggtgagggaagaactccaccaaaccacaatttgttatactttctgtcgagaccacataatacctgtcacactattctttcactccacacattatcttccaaatgtccataggtcttttctccaatgcttcgtagtctatcgtcccagatttcattccctcagcacctacctttgatagcccatgattcctgagcgctcatcagcacagctatgatgaaaaatcctagcacagggactccacttatggccattttcttcttgggcgctctgttgggagtcagtagagctcgggagtgaggcagaacagacaagaataaaagaaaagagaatgtggggtgtaatagagtctgaccattaaaatgcaaatcaattactctttggccaatcagaaaaatattttgagatgacgcatctgttgctaggggaagggttcttgcaaagggtccaggacacaagatactccgttcattggataaagaagtaaagttcttaaacaaacaggacaacaacaacaacaaatcaagtatttaagactgttagtcaatcacggacagactctttaaccccaatctgacttctagacagggatatacctgaagcacattagtgagaatagaatcaatggaaacacctaaagtgagagctaaatacagatcatatgtctgtgcaatgacagttggagagtttgcgtaagggacaataaattacccaaatagaaggtaaattgtcaggccatggagattgtctgaattttggcagtactgaggacatagcttcactaaagaagctctttcatgcttcttggagtcctagacttcaagatgatcaactcaggccaagagcttgggatggctggcattgtatctcatttagagaaaatgagaggagaaactctgaggttcaacactctcaacactggagaaggatgaaaggctgtatcttgaaacacaggtagtagttagtggaaatagtgggctgtaaaggagctaccttcttctcatctctaccatcttatatatgacaagagattggagttgactaatggacacacctcatttgaggattcaggtcaatgaatatgagagagtatagtgggcaaagcctattctttttttttttttttttttttttagacggagtcttgctctgtcgcccaagctggagttggtggcgtgatctcagctcattgtaatctccgcctcccgggttcaagcgattctcctgcctcagcctcctgagtagctgggattacaggcgcccaccaccatgcccggataatttttgtatttttagtagagacggggtttcaccatgttggtcaggctggtctcagactcctgacctcgtgatttgcccgccttggcctcgcaaagtgctgggattacaggcatgagccaccacacccagctggcaaagcctattctattgggaacgttagagataataacccacagaacggctttaatattccttccctcatgtcataagattatgaaagtttttcttttgtcatatgattattaaagatctgctctaaagaatatattttgatgttcaacatagacagtcctgaaaattaggagacttcgactctcttgtttctgaagatacagtgttatgaaaaggagaatgttaatttctttccacagaaaggactggaatacaaatacttccatgaagagtgacctggcagtgagggagcccatcggatggtgaatccattgtttttttttgttgttgttttgttttcgagacggaagtcttgctctgtcgcccaggctggagtgcagtggcacgatctcggctcactgaaagctctgcctcctgggttcacgccattctcctgcctcagcctcccgagtagctaggactacaggcgcccgccaccatgcccggccaatttttttttttttttttttttttttttttttgtattttcagtagagacggggttgcaccatgttaaccaggatggttttgatctcctgacctcgtgatctgcctgcttctgcctcccaaagtgctgggattacaggcatgagccaccgtgcctggctggtgagtccattgttcaacatcagtcatgacatgtctgcttagggtggattttccatactgttgtgctggggtcttgtcctgccatgcagccgttctcacaagttatgaacacaaatattccatacattactgattatctgatcgcatcaaagggctttgaacacactgtggcattaactcctagatcgctagaaagagacctacagcatggtctctcctgcaatttttcaggaatacctttcctgaaagttaaagagtcaggagaatgggccagatgagagcctatggtatcagtctgtgct

SEQ ID NO: 585308 - DNA, 4001 bp, Homo sapiens
cttccatgagagtagggacgctctctaacttaatcaaatagaatgatttgaacctagaatggagcccagtaaagagtagctgctgagaaaaataagtgtggtttacatgaataaaccagggtatgggaactgatcactgtagggatcctggaaagcaagaaggggctcaagctccagcactctttcattttaatgtcacactagaccccttctcctcccagtgataaatacaggcaaacttcttttttctcctccttctagttggaagaagaattcacagataaagaaacagtgatttaagaaaaaggaaatttttttattaagagtcatctcttttgcctgggcacagtgtctcacatctataatcctagcatgttgggaggccaaggcaggaggattgcttgagtccagcagttcaagaccagcctgggcaacatggcaaaatctcatgtctaccaaaattacaaaaattagctgggcgtggttgcctgcctgtattcccagctactctggagcctgaggagggaggatcacttgagcataagtggcagaggttgcagtgagcctcgatcacaccactgagctatagactgggtgacagagccaggccctacctcaaaaagagaaaaaaagtctctttcaatgaatctcatagtgctaaggttctgtgcaagctttagagatttctggaaatgatgacaacatagctggggaaaaatagaaactggaggaagaggtaagcagacatggctagttaaggaaagctgagggcatgatgggtgaacctaggaaatttaggacaagaccccagtaagacaatgagttcccaagacttgcccattgactttcagccctatgagacgtgaacaatgttcacatcatctcggtaaccccacacagagtatatagtttgaacattattaaatttctgatagttgattatttttgacttaaaaaatagaatttcatataatttatacattagttaaatctcttctgtcatgtctagttagagcacataggagatgcaagagaaacaagtacagaaaggttaaaaaagattcataatgaacacgaacctgggctagtttttcagaggatgccttaagttctttaggcaccaaagaatacctcataaatgctctgtatctgtaaggtgactccaagtattaacaatctcagcttcagttccagggacttttccccacaagaaaggaagagcactaagtataacttctgtcagagaacctacatacactacagggatacaggccttataaacattggagttcagcaagaaaagaaaggagataatggggaggccactgggtccatcctcacatatgaggactatggccaacaccaaaggtcctgtggggaacctaacactggatcgtctaggagagaccctttgaattcccttgactcccacaaaattttcagtaagaacctccttttgtctgacataagtcaacataataaagggaagtgctgtatggggaatttattttagaatccttatttctaaatcctctaaagaccctgaggacatgtgatgcaaaggttttattggtggagatttgaaaagaaatgatttgtgcaaaggccccttacacaagtctcatgaagagggcaagtacccaagctccttttatggaggaaataatttgggatccaatgataaagatgggcaatctctgaagaaaacgtcacaatttcttaagggacatggcctgggcacaatgttaacaaaactccctattttccccaccccatagtagctcagcacccgcaatgtgcacttacgtcgggtgtccccagacaaagccagtggggagctcagcaccatcagtgtcactgtcagcgctgtcatgcaggagcctccagggagcttcagacacaccatgctggagaacaggacaggaccaggggccagagaagcaggcaagtctcactcagggagaactatgaacccctccacccacattccaagttatagggaggaagttactgatttccttgctcctgggttgggtaatctcgtgttggagaaccaatcagcatctgagttcaatagcatcatcagttgctggtcagagatgctgtatgaaggtcctcttctgaaacagaatttccttctttaaaggattgttttaatttagcacttggaaggtttgaaccagttgcatgtaaaacaccttaattggggagctattgtagccagctctgtgctggtcagtgatgtgttcacaagtttgagccttgtaagagcattcatttcccacttgacaagacaactatttgcaggagtgagtgtgagtgtgtttaggagtaaaggagatggagggaacatggccgcaaatcaggagacctttaatctggtccttattgcaccatatcttaatgttgtagatttgggaaaattacgtcatgtctcacagttgaaatgaaggcaccatgatctttcaggtctttcaacactagaaaatgtgattctgtggatgcctcaaggagcagcagctccgggtatctgatgatatgacagaatgacagctgttgaccggagagcttaatctgtacctatttacaggtagagatgtctgtaataagttaaaggaaattgaaagttagttaataatttaatctgagtaaaaagagttttttcaagtgtgtctcctgatgctgcccccaagtttagtgtcatctccagaacacacacaggcaaggggcttgcaggggccacctatgtgcaatggagagtccgaagttgcttttgtatagcacttaccctatcaatgtgttaaggtcaactgtgtaatcaaagtatgcagggggctgagatgatcgatcaaggactcaaagtcagctgttgacagaacaactctgttttaccataattaatattttatgtcgagtgttcaatccctcattcttggctcccattatgatttcctcctttgtttaaggctatggccctttagtattccacttctcttgttttatcgtaagggaagatattagaagactttgctggccgggcgcggtggctcccgcctgtaatctcagcactttaggaggccaaggtgggcggatcacttgaggtcaggagtaccagaccagcctggccgacacggtgaaatcccatctctactaaaaaaatacaaaaatcagctgggcttggtggtgcatgcctgtaatcccagctactcgtgaggctgaggcatgagaattgcttgaacctgggaggtggaggttgcagtgagtcaggagcacaccactgcactccagtctagtcgacagagtgagactcagtttcaaaaacaaacaaaaaggctttgctaactagtacgttacagaatgttcaggaaacagaaccctagggaaaatctatgaattacatcagttgatgtaatcatctaattttaaacatataattctacatttagataattattatgctttacatttatataaatgtagcatctaagattcagaatggacttcaaagtataactatgcaaataaagttctgcattaattcacaccctaccacagttctgacaggcactccttccttatgtgccttagtgtttctaggaatgagatactcaccatgctgcaataaaaatgactaaaatttcttgagcaatttttgagcattttgctttgtactcagaattgtatgaagagctttccatacatcatatttttattcaattctcacattagctgagtgagggaaatacccttttcatccttacaagtggagagaataaaatgatggagtttaaacaacttttgcaaggatgcaaggctagtaaacagtaactcggcctcccaaagtgctgggattataggtgtgagccaccacgtctggccagcaaaatcttcttatatcttcccttacgataaaacaagagaagtggattagtaaagggccatagcctcaaacaaatgaggaaatcataattggagccaggaatgagggattgaacactctt

SEQ ID NO: 585309 - DNA, 4001 bp, Homo sapiens
cacaaacctgatgtcttttcttcagtgcactatgactctctgaaattttcttctttgttaaatgcttattgggttagtgtctgtctcctccactcttgtgtaaccttgagagtcgggaccctctctatcttactcaaatagaatgatttgaacctagaagggagcccagtacagagtagctgctgataaaaataactgtggtttatattaataaaccatggttctgggaactgatcactgcaaggatcctggaaagcaagaaggggctcgagctccagcactctttcaatttgatgtcacactagaatccttctcctcccggtgagaaatacaggcaaatttcttctttctcctccttctaattggaagaagaattcacagataaagaaacagtgatttaagaaaaaagaaatttttcattgagattcattgcctgggcaatgaattcaccgtgcctgggtgcggtggcttacacctacaatcctagcatgctgggaggccaaggcaggaggattgtttgagtccaggagtttaagaccaccctgggcaacatggcagaaatctcatctccaacaaaattagttgggcttgtagtctccgctgctctggaggctgaggaggaaggatagcttgagtcttggaggcagaggttgcagtgagcctagatcggaccactgcattacagcctgggtgacagagccaggccctatctcaaaaagaaaaaaattatctctttcaatggatctcatagtgctaaggatctgtgcaagctttagggatttctggatatgatgacaacatagctggggaaaaatagagagaaactggaggaagaggtaagcagacatggctaattaaggaaagctgagggcatgacgggtgaacctatgaaatttaggacaagaccccagtaagacaatgagttcccaggacttgatcattaactttcagccctatgagatgtgaacaatgtccacattctctctgtaaccccacacagagtatatagttttaaccttatcaaatttctgatatttgactatttttgacttacaaaaatagaatttcatataatttgtcctatgttagttgaatctcttcctgtcatgtctagttagagcatgtaggagatataggagcaaatagtatagaaaggttaaaaaagatttgtaataaactctaacctgggccaggtttttagaggatgccttaagtcctttaggcaccaaagaatacctcatagatgccctttaactgtagggtgactccacatactaaagatctcagcttcagctccaaggatttttccccataagaaaaagcactaagcataacttctgtcagagaccttgcatacattacagggtaaacattggagttcagaaagaaaagaaaggaggtaatggggaggccactgggtccattctcacatatgaggaagaggagccaatatcacaggttctgtcaagggcataacacaggattgtctaggagagaccctttgaattcccttgactcccacaaaattttcagaaaaaaactcgttttgtctgacataggtcaacataataaagggaagtgctgtatggggaatttattttagcatccttatttctaaatcctctaaagaccctgaggacatgtgatgaaaaggtttcattggtggagatttgagaagaaatgacctgtatggaggccccttacacagtctcatggagagggcaagtagtcaagctccttttgtggaggaaataatttgggatcccatgataaagatgggcaatctctgaagaaaatgtcacaatttcttaaggcacctggcctgggcacaatgttaacaaaactccctattttccccaccccatagtagctcagcacccacaatgtgcacttacgtcgggtgtccccagccaaagccagtggggagctcagcaccatcagtgtcactgtcagctttgccatgtaggaacctccagggagcttcagacacaccatgctggagaacaggacaggaccaggggccagaggagcaggcaagtctcactcagggagaactatgatccccctccacccacattccaaattatggggaggaagttactgatttccttcctcctggtttgggtactctcgtgttggagaaccaatcagcatctgagttcaatagtatcatcagttgctggtcagagatgctgtatgaaggtcctcttctgaaacagaatttccttatttaaaggattgttttaaattagtacttgaaagatttgatccagttgcacgtaaaacactttaactgggtccctatcgtgagccagctctgtgctggtcagtgatgtgttcacaagtttgagccttgtaagagcattcatttcccacttgacaagacaattgtttgcagaagtgagtgtgtgagtgtgtttaggagtaaaggagatggagggaacatggttgtaaattggagacctttaatctggtccttattgcaccgtatcttaatgttgtagatttgggaaaattatttcatgtctcacagttgaaatgaaggcactgcaatctttcaggtctttcaatactggacaatgctgtgattctgtggacgcctgaaggagcagcagccccgggtatctgataatatgacagaatgacagctattgactagagagcttaatccgtacctatttacaggtagggatgtctttaataagttaaaggaaattgaaagtttgttaataatttaatctgagtaaaaatatctttttcaagtgtgtctcctgatgctgtccccaagttcagtggcacctccagaacacacacaggcaaggggcttgcaggggccacctatgtgcaatggagggtctgaaggtgcctttgtatggcatttaccctaacaatgtgataaggtcaactgtgcagtccaagtattcgtgggtctgagagatcgatcgaagactgtgaaagtcagctgttcacagagcaactatcttttctttttttttgaggcggagtcttgctctgttacccaggctagagtgcagtggtgcgatcttggctcactgcaacctccgcctcctcagttcaaatgattctcctgcctcagcctcctgagtaactctgacgacagacatgtgccaccacgctcggctaattctttgtatttttagtggagatggggtttcaccgtgttagccaggatggtctcgatctcctaacctcgtgttctgcctgccttggcctccccaactgctggggctacaggcatgagccatcgtgcctggccacaattctgttttaaaataattaataccctccccctccccctccccctctccctctccctctttgcacggtctccctctgatgccgagccaaggctggactgtactgcagccatctcggctcactgcaacctccctgcctgattctcctgcctcagcctgccgagtgcctgggattgcaggcgcgcaccgccacacctgactggttttcgcattttttggtggagacggggttttgccgtgttggccgggctggactccagctcctgaccgccagtgatctgccagcctcggcctcccgaggtgccgggattgcagacggagtctcgctcactcagtgctcaatgttgcccaggctggagtgcagtggtgtgatctcagctcgctacaacctccacctcccagccgcctgccttggcctcccaaagtgccgagattgcagcctctgcccggccgccaccccatctaggaagtgaggagcatctctgcctggccacccatcgtctgggatgtgaggagcccctctgcccggccgcccagtctgggaagtgaggagagcctcttcccggccgtcatcccgtctaagaagtgaggagcgtctctgccctgctgcccatcgtctgagatgtggggagcacctctgccccgccgccccgtctgagatgtgaagagcgcctctgcccggccgtgaccccgtctgggaactgaggagtgtctctgccccgc

SEQ ID NO: 585310 - DNA, 4001 bp, Homo sapiens
tcagggtgacgggctcgggtagcccctcatgctgcacatggcacgtgtatctctgctcctctccagaaggcaccaccacagctgcccacttctggaaggttccatcccctgcaggcctggtctccacgagctccgtgtcctgggtatggccctccccatcctgctgccaggtcagtgtgatctccgcagggtagaagcccagggcccagcacctcagggtggcctcatggtcagagatggggtggtgagtcacgtgtgtctttgggggctctgaggggaagagtcagaaaattcaggcactttgtatctctcatgggacactccagcagcacccatgtgaccatcctgagaaggaagaggacaattatagtaggagaagaggacaaaaccttgacaccagcctggacttagggatctgggatagcctcttattccttggaaagttctagaatcgggatgagctagcccagggtagaaggtgaaaagggatttctggtcctggcctgtgtggatgctgagtgactgagaaaagctggagtcagacctccaaaaactcttggtgtggggctgagaatcaggcacgagagaaactcccccgtgattcctaatactgggagtcaaagagaactgctcatcagttcatctgaaggatggaatctccagcgagactagattccttaattgcccctgagagaggtctggccctttaagagagtcactctgtggtataggatctcctgtacctcaggtgacagctccctctcctgatccaagggaggagtggtattctggcctccatccctgtttcttctactgtttgaggtctgtcagctgtgggcacagtcctagcccaagaaggagatgggagagtagccctgtggaccctcttacccaggtgaagcagcgtctccttccccttctccaggtatttgtggagccactccacgcatgtgtcttccaggtaggctctctggtgctccgcctcagaggcatcatttgacttttgctcggagatctgagccgccgtgtccaccgcggtccaggagcgcaggtcctcattcagggtgagataatccttgccgtcgtaggcgaactgttcatacccgcggaggaagcgcccgtcgggccccagctcgcagccatgcatccactgcagggtgtgagaccctggccccgccccttagtcagtcccgcccaccaagccccgcccccgtcgccaccaccctgtgggcattttggcctaaactgaaaaagaaccgggtaaaggcgcctgagactctccccggtctagggtctgggcgggttccgcagccttggggtgaatctgggacccgaagattcgaggggacccgcgccgtccgtgggggatggggaggggtcgtgacctgctcccctggccggggtcactcaccggcctcgctctgattgtagtagccgcgcagcgtccgcagattcactcggaaaatctgtgcggtgtccctggcgctccgtgtctcccggtcccaatactctgacccctcctgctccatccacggcgcccgcggcaccatcctcggactcgcggcgtcgttgtcgaagcgcacgaactgggtgtcgtccacgtagcccacagagatgaagcggggctccccgcggccgggccgggacacggaagtgtggaaatacttcaaggagtgggagcctgggggcgaggaggggctgagatcggcccgaccctcctcccggcgcggctccccgagtccttcgcccccgccgggccggcccctctctactcccggtagaggccgtttccatcccgaccccgcactcacccgcccaggtctgggtaagggccagggcctccgagaggagtaaaaggagggttccatctaccatgatcccagcctctgagtcctgagaacttcttgagtccggatggggactttatagtcgggagtcgtggcgacgctgattggcttctctagaaacccgacacccattgggaatgagaactgagtctgcgtcatgagtatccaggaagaaggacacatgaccaggttacgagaggaacgggaaactgcagagtttcccagcaatcagcagttcttaaacttttaggtttcggtatctctgcacactcttagaaattagtcctggctgggcgcggtggctcacgcctgtaatctcagcactttgggaggccaaggcgggctgatcacctgaggttgggagttcgagaccagcccgaccaatatggagaaaccctgtctctactaaaagtccaaaaaattagccggcgtggtggcgcatggctgtaatcctggctacttgggaggctgaggcaggagaatcacttgaacccaggaggaggaggttgcggtgagccaagatcgtgccattgccctccagcctgggcaacaagaaaaaagaaattagtgaggacccaaataaattttgtttctgtggattgtatcaatttttatcatatataaattaaaagatattaaaacaaaatattaaaaatattaattcatttaagagaatattaataacccattacatgttaatagaaacaacttttttttttttttgagtcagagtcttgctctgtccccaggctggagtgcagtggcatgatctcggctcactgcaacctccttctcccgggttcaagcgattctcctgcctcagcctccccagtaactggaactacaggcgtgtgccaccacacccagctaatttttgtgtttttagtagagacggggtttcaccatgttggccaggatggtcttgatctcttgatcggaaataacatatctttaatgaaaaaaaacttaatttttaatttttccaaaataaacaacgtataggccgggaacggtggctcacgcctgtaatcgcagcattttggtaggccgaggcaggcagatcacgaggtcaggagttcaagactaacctggccaacatgatgaaaccctgtctctactaacaatacaaaaattagccgggtgtggtggtgcgcgcctgtaattccagcaactctggaggctgagataggagaattgcttgaacccgagaggtggtggttgcagtgagccgagatcacaccactgcactccagcctgggcgacagagtgagatgtctagggggaaaaaacaagaaacaaaaaacaaaaacaaaaacaaaaaaacaggatctgcttcaagaagttgcctttgtagtcaaaccagctgagactcgttacaaccaagagagccggccaaatgacttcaaaaagacctcacgcttcattgtaatcccgtttccaggctaaattgcgctcccatccatgccatgacagttgacgatctccatgacgatgagtagaagaagtcctaaaaggaccaaaaggaaagcggtattaccagtttggagaagttcactgcctgttcccataaaacatatgaatattcctccccctcacttttaatgcccaaccccttcattagagcaatcctacattttagccccctcacccctcactagccgcctcactagtggagaagttgacttggcagagctgctctcctctttacaagtcctgtgcaggaaataaagcttgctctgcttaaggctcacttttggtttcatgtattggctctgcgactcccagtgaggaaagatcccaccttctgcagctaccaagatttttggtaacaagaagagtgattatttttcattttcataagtgttgttcttgcaaaattttgcaagcatcattcttggctcatagcatacattctcttatgtacttatttttaaatttttaacttttattttagatacagggggtggccaggcgcggtggctcacgcctgtaatcccagtcgggagttcgagaccagccttatcaatatggagaaaccccatgtctactaaaaatacaaaattagctggaggtggtggcgcatacctgtaatcccacctactcaggaggctgaggcaggagaatcgcttgaacccgggaggcagaggttgcgat

SEQ ID NO: 585311 - DNA, 4001 bp, Homo sapiens
cctcgttcccctctttacccatctccctccttaccccatctcaggatgaggggctggggcagcccctcgtgctgcacatggcatgtgtatctctgttcctctccaggaggcaccaccacagcggcccacttctggaaggttccatcccctgcaggcctggtctccacaagctctgtgtcctgggtctgttcctccccatcccgctgccaggtcagcgtgatctccgcagggtagaagcccagggcccagcacctcagggtggcctcatggtcagagatggggtggtgggcaacgtgtgcctttggaggatctgagaagagtcagaaaattcaggcactttgcactcctcatgggaaaccccagcagcacccatgtgaccaacctgagaatggacaggacacctggggtggggaagggagcacagaacccagacaccagcctggacacagacacctgggaaaatctcctattccttggaaagttagagtctctgaggggggagcagggacttctggccctgacctaagtggaggccgagggactggaatcagagcctcaaacacattgagtgtgaggcagagaacaaaacttgagagaaaagtcacggggcccaaggctgttggagggctcaaaggggaccgcggatcggtattccagggactgtcttccctccattccctcagaaatttcatcccttaattgtcccagagagcagggcggactctcacagtcactctctggtaccggatctcgaaagccaggaagattcttcctactcaggactagagggagggcgatatcctagcattgggtccactttcctcccaaccttgtgcgaggccatcccaagagatctacaggagatagggaaggcgcccatggcccctggtacctgcgcgctgtagcgtctccttcccattctccaagtatctgcggagcaactccaggcactcgccctccaggtaggtcctgaactcctctgcatattcctctgcctcatagaagcgctgggtgatctgagccacggtgtccgccgcggtccaggagcgcaggtcctcgttcagggagatgtaatccttgccgtcgtacgcgtgctggtgatacccgcggaggaggcgtccgtcgggccccatgtcgcagccattcattccctggagggtgtgagaccctagccggtccccgcagtcagccccgcccagctagccccgccccctccccgcccaacccgcggggattttggcctaaactgaaaatgaacctgggtaaaggcgcctgggactctcccgggtggagggtctgggcgggtcccgctgcctcggggtagatttcggatccggagactctgagggacccgggcggtccgtggcggatggggggtggtcgtgacctgcgcccccggccgggttcactcaccagcctcgctctggttgtagcggcggagcaggttcctcagggccactcggtcagtctgtgcgttggccttggcgtaccctgtggtccactcccaatactgcggcccctcttgctccacccacggctcccgcggctccatcctcggaatcgcggcgtcgctgtcgaaccgcaggaattgcgtgtcgtctacgtactccacggcgatgtagcggggctccccgcggccgggccgcgacacagcggtgctgaaatacctcaaggagtgggagcctgggggcgaggaggggctgagacccgccagaccctcctccggaggcggctccctgagtcctgcgcccccaccgggcgggcccctcactcctccccacagaggccgtttctctctggaccccgcactcacccgcccaagtatcggtcagggccagggcccctgagagcagcaggaggaggcttcggggcgccatgaccccaacctccgcgtctgggaaaaatatgagtcccgcggggtgcgtgggactttagaacctgggaactgcggcgacactgattggcttctctagaaacgcgacgcccaatgggagtgagaaatggggccgcgttatgagtatccaggaagaaggacctgacacgggttgggagagaaagagaaactctggggagatggggaattctcaatactgagcctcccaaccccagacaccgcctcggggcctgagcccttgagagccactcctggggccctgggactttgccctccccctccccctccccctcctgtgcagggtgtgtctcaatgtctccctgagtcttcgcccgggggctgagaaaccagggagaaaccttcggcatggacccagtccatctcccttcattattcattccgaaatcccagtcccttgattgaactttctgcctcccattccatacctggactccccggactcttttggaagaaaattcaccccaaggagcttggtgccagacaatgaacttgtcctgagaatgaaggtgtagagacagtttcttcttcttccttttcttcttcttcttcttcttcttcttcttcttcttcttcttcttcttcttcttcttcttcttcttcttcttcttcttcttcttcttcttcttcttcttcttcttcctcttcctcttcctcttcctcttcctctccttctccttctccttctccttctcctccttctttcctcctcctcctgctcctccccgcccccctcctcttcttctctggaaaagttgtacctgagcatatgaaataggacagagaccagtttctttctttcttttttttttttattagctgcagtgagtagtagaatcttggtaacccctgaattatcaggaacctttttttttttttttttttttttttttttttttttttttttgagacggagtctctctctgccgcccaggctggagtgcagtggcgcgatctcggctcactgcaagctctgcgtcccgggttcacgccattcttctgcttcagcctcccgagtagctgagactacagatgcccgccaccacgcccggctaatttttttgtagagacgggtttcaccgtgttagccaggatggtctcgatctcctgacctcgtgatcctcccgcctcggcctcccaaagtgctgcgattacaggcatgagccaccgcgcccgaccaatcaggaatcttatgtgtaaaaactgttactttggccccttgatatataaatgtgtctaaatgcattacagttgtacaactctcagagctcctaagttttgctttcccagactatgtatctgtgactcttgttgtattctaaaattaccttcattccatagccctgagtttctgtgggagtccaggacatctcctgacaatacaaagtagcacaacgtgtgattgtatattgcaaccaggagccaatacattcattcacctcaaagttgcaagtgttcaacgcagtcacaatgcccctcaccagtgctcatgcacttcctgtttttaggaagtatccgcatctaagtggtgtgcatgttttattggaacacttagtatttttttaaacctgaaaaaaagcagaaaaagcaattaatttttaggcagtcccacataaggtgttaaaggccaaatgcaaggaacaccctgctaggctctgtagatggatgtattaaaaatttataaaacaatgtgtttaaagctaagaattctgctgctttcaaattctgtccctctgctccttctcctcacctcctgcttctccagcccttccctccgtccctctcatccctcaggccctcctcttcccttagtccccaccactctgtcactcctgaatagtggctctagcactgttccattacctgccacctgagtgttctctccacagtggtcctgctactgtgagtcaaagtgtgtcgtttcttcacctaaaacactccagtggctccacttcggtcttgtgaagcttctagaatgtcaggcacttgagcatatgagggcatacctggttcagcataggcactaaattaatttttgttgtctagttgaatgaaatatgattgtataaaaatttaatcgcatcatgga

SEQ ID NO: 585312 - DNA, 4001 bp, Homo sapiens
actctctggtacaggatctggaaacccaggaggattcctctccctcaggaccagagggagggcgatattctagtgttggtcccattttcctcctctccttgtgctaggccaggctgagaggtctacaggagatcagggaggcgccccactgcccctggtacccgcgcgctgcagcatctccttcccgttctccaggtatctgtggagccactccacgcacgtgccctccaggtaggctctcctttgttcagccacattggccgcctcacacttgcgcttggagatctgagccgcagtgtccgctgcggtccaggagcgcaggtcctcgttcagggcgaggtaatccttgccatcgtaggcatactgttcatacccgcggaggaggcgtccgtcggaccccaggtcgcagccaatcatccactggagggtgtgagaacctggccccaccccctcggtcagccccgcccaccgagcctcgccctcgcccggacccacccgcggggattttggtaaaggcgccttggggttctcccaggtagagggtctgggcgggtcccgcggcctcggggtggatcccagacccggagactcgggagtacccgggccgtccgtggggcatggaggtgggggtcgtgatctgctccctgggccggagttactcactggcctcgctctggttgtagtagccgcgcagggtctgcaggttcattctgtcagtctgtgcgtgggccttggtgttccgtgtctcctcttcccaatactccggcccctcctgctccacccacggcgcccgcggctccatcctcggacacgccgagtcgctgtcgaaccgcacgaactgcgtgtcgtccacgtagcccatggcgatgaagcggggctccccgcggccgggccgggacacggcggcgctgaaatacctcatggagtgggagcctgggggcgaggaggggttgagacccgcccgaccctcctcccggcgcggctgccgagtcctgcgcccccgccgggccggcccctccctcctccgcgcaggggctgtttccctcctgaccccgcactcacccgcccaggtctcggtcagggtcagggcccccgagagcagcaggaagagggttcggggcgccatgaccaccatccttggcgtctggggagaatgagtccgggtgggtgagcgaggactttagaaccaggaccgcggcgacgctgattggcttctctaaaaacctgtcacctaatgggagtgagaactggggccgcccggtgagtatccaggaagaaggacccgacacaggttaggagaaggaggagagaatccccaacgcggggcctccccaacccatacaccgcctgtggggcctgagaccctgagagccacgcttgaggccctgggacttcgccctgaccccgctactcttgtgccaagcgttctgtctcagtgtctccctgagtcttggcccaggagctgtctgagaaaccagggagaaaccctcggcaaggtccctggccctctcccttcacttttcatcccggaatccctgtccctgaactggactccctgcctcccactccttgcctgtcctcctgtactcttctagaagaaaaatcaccccagggagcttgttgccagagagtgagctcgccctgggattgtaggtgtaaagacagggttttttttcccccttaaatctggaaaagttgtgcctgagtgcatgagatagaatagagaccagtttgctttttgtttattaactatagtgggtagcataaccttggtaacccctgaatgatcaggaatctaatcggtaaaaaatgtgactttggcctgttggtatataaatgcatctaaaagcattacaacacgactcacaaagctcttaagtttcactttcccagacagtgtatctgtgactcccgcttgttttattttaaatttaccttcattccgtagccctaagtttccgtgtgagtccaggacatctcctcaagacaaagtaccacactatgttactatatgttgcaaccaggagccagcacaaactttattcacctcacagttgtaagtgttcagtgcagtcacaatgcccctcactagtgctcacgcactgcctgtttttaggaagtatccacatgtgagtggagtgtatattttttaggaatacttagtattttttaaacctgattaacataaaaaacaattagtttctaggcagacccacataagatattaaaggccaactgcaaagaacacccagcgaagctctgtagatggatgtattaaaatctataaaacaatgtgtttaaacctaagagttctgctgctttggaattctttcctctgctccttttcctcacctcctgctcctccagcccttccctccgtccctctcatccctcaggccctcttctccccttaatccccaccaccctctcactcctgaactgtggctctagcactgttccatgacctgctacatgagtgttctctctatagtggtcctgctactatgagtcagagtgtgtcatttctccacctaaaacactccagtggctccacctcattcttgtgaagcttctagaatgtcaggcacttgagcatatgagggcatacctggttcattgtagggactaaattattttttcttggctgaatgaatgaattatgagtgtattaaattgcatcacagaaaattataaaatgtaaaacactaaaaaagttaaaaaagattttattttatgtaactagtgtgcgtatcaattcatcagttcattccaggagtcttttgagtctgtgtatgaattttataagactgggtaacaaattgtcacaaacattggctttaaacagcacccatttattgtattcattgatttatttttagagacagagtctccctctgtcatccaggatgaagtgcagtcacatgatcatggctcactgcagcctcaaattcctgggctcaagggaccctcctacctcagtcttcagagtagctaggactgcaggcaagtgccaccatgcccagctaattaaaaagaaatgtagagacgagtgtctcactatattatcctagctggtctcaaagtcctggctgcaagtgttcctcctgtgtcagctcctcaaatgttaggatacaggtgtgcactaccacgcctggccaaataacactcatttgttgtttatagtttcttaatcagaaatctgggcatgatgtggatggaatctctgttccggtcttcctaaacctgtgttttcattttgaatcctccttcaggcttatacagaggtggcagaatgcagtttctggcagttgtaagactgaggtccctgttcctcactggctgtcactgtagagaacagggagggctgcactcaatgcatggtgcccaccagcgtcctttcctacacagccccttcattttcaaagcccacagtggaggaaaccccttatgctgaatccctctcacactgtgaatctctatgctcaggaagaacccagtcctttcaaggactctccttattaggacagtccaagcaggataaactcagcctaaagtcaactaattgaggcccttaattatatctgctaaatcccttcacagcagcacctacattagagttggttgaataactgggggaaggtgaatgaccaggagctggttgttgggagccatgatagaatcagcccaggaagggctggatcttccttttgtgtttaatttggacacagttggaaattgaagttcaagtaaagtgatcattgtgaatagtaataaaatacatcctcttcagccgtggaaattctcctttccttttaaaactaagttacatgtttaatatcttatagttaatttagaccaggtgtggtggctcacgcctgcaatcctagcactgttgaaggcagaggaaggcagatttgactccagaagttcaagatcagcctgggcaacatggtgaaacccccatctctacaaaaaaattagaaaattagccaggcatgtta

SEQ ID NO: 585313 - DNA, 4001 bp, Homo sapiens
gctggggaccctttaatcccctcagccaaccccccacgaactaaatgaaggcccgaggccctttccagtgaggccaagaaacgttcgtcttttccacctgtttctgaacatcagaggcctgtcttggaggaactacatttagggcctaaccccaatccctcactttgtaataagcccgcttgggcctcaagcctgtctcctccatacactgtgcatgcaaactgtgctcctcaaatacttaaggactctgcaggaaaggccctaggaaattatcttgggggttcccttgttttcttccccgtcccccgtaaaaaagtagcccagagaagccttgagttgcctaaggtcacacagcaagttggcgagcaggaagaagtaggttcccggagaccctttcaacccgacactttgcctacccgcctagcggctagggctaaacccccgaggcatcaggctccagacccggcccgagggtgactctgcaagtgtctgcgcccggccgttgcaggccggccggcgggacccggggccagggcgcgcggggggaggggcgcaggccgctcctgcaggcgcgggaaagcagcgcaccccgaccgcatgcaccgccacgcgggtgcacccggccccacttcctgccagagggggcacccaagcccgccttggggcaggaaacctggcgcgcgcgggcgcgggggagaggaagaaagccccctccctccgtcccctccccgcaaaataaagccccagaagaaaataaaatagaaacggggagtcaaagggactagttccaacagagcccagcaaagcagcgaaaccagtttgtgggggcggagggcaggcccggcccctggggctgaagaggcgcgggccaggccagaggtggggtcggggtgaagccccaaacccaggcccgcgctccggcctcatctgcggagggggcgcgagagaaaggccgagagggcgtagggccgaatttgggggttcctccccatctccctcacttccagaacttccctgagctgcggggggcgcccgaccccccactctcctgccgcgccgcagcccgtgtctctccccgcccctcacccgggcccgggctcgggctcgggctccggctccagcgggagcggccgccgcgcgaggtgcgccgggctcctccgggctccgccgggtgcacaactcgcgctcgccgcagctgcgcgccccctcccccaccgcgcgcctttcccgggtccccgccccccgcagggcgcccgcggcgcgggggaaggggtgcgggcgtcctccccgcgccgccgggccccgccgcccgcccccgcgccgcgcggccctcccccgccgccggctcgcgccgccccggcctgggaataaagccggcggcgcgcgctgcagccccgggcggctcgcaggaggggcgacgtgcgggcgggggcgcgggcgcccccctccgccgccgccgccgcgggccccggggacgactcaccgcgagctcggccgccggcctgcggtgcgcgctccgggttgccgggagcggcggtgctgggcgctgaggaccggcctggctccgccgcggccgccgctggtagcaaatgcggatctgaaaccgggagagagcagaggcgctcagagaccgccgccgccgcgtgctcgccgcccaggcccccgcggggtatttatgtgtcacagccaggcggggggacaaaaatattccccctcccccgaaggatggcgaggggcaggaagctgggcacggcccgtgcgcggcctcaataaataaataatttaattaaattatagatataaaaaaaagaagccaccggagcggccgcgaactcacgccttcttggagccgcgccagcgccagaaatagccccggctcggagtcccaattagaggagcgcagcaccggctcaggggagcttaaaaagagcgacccaggggcaggggggacgggcccgcccgcgccagccgtgtcactcagggggcggggccatgcaaatgagcccggggatttaaaagggcggccgcccgccagccgccgccgccgctgccgcgcgggtgggtgctgacggcagggaggggcgtgtgggaggcctgggctgcgaactcgagtcgaccgcccactcctcgcagtcccggacggaggaggtgtgggaaggcacgcgcagaggagtcacgaaggagcttctggcggggggtggtgacgggtggcggtatccttcctccctggtacaggggtcccagggagagtcacctctaggggcttccagggcgtgtgggcccggccccccccccagggcgtgtgggggtggacgggggtccacgcgggcccagggggtgaagagaaacgcgctcgttagagaattccgcggcctacacgccgccccctaactaaaatagagagatggtagatttcccctgggcggacaggtgtcagcatgtgcctttcagtgtcaacccgcgtgtggctgattggtgagatacaagtcttgtgaaattcaaacgtgaaacttgtgaaatccaaagtgttttattaatggccaccagcgagccatgatcaaggtggagccttccagcgaaaccaacgattggctcgttggcaggtacacccaagggaggcttcataccttgaggtgacttagatggtgttctggagatacgcaggcccacttggggacctgggcccttccgttgggactgtaaataaaaataaaaggtgggccagaggtcgcctggaagcgctttgagggcaggggccgagcacgcaggccatctccgccacgcctggcccgcccggcgcccggcttaacaaagacttgttgcaccgagcgagaaggaagccaaaggggaagatggcggggagggcggtgggggaggaaagggcgcaggcggagcggcgcgccctgcaggccggcccggggccttctcgggcgcacctcccgcgcccggtccccgaggcggccttccacacctcctgtgatgcagggaattgaaatgcgctccagtgacacacggctgtgactcatgtttttctctgctccccttcttcctccccggtcagccgaggccctggcccagccccctcctcagggggcgagccggcggtggaggggacgcaggaaagccctgggcccggcgcggaggcggggtggggagcggcgggctgggccttgcagttgcaggaatgtggcaggaatgtttccggtgggggtggggagcgggcggggggtgggcccagcccccacccgtgcggcgggaagcgctcggggcccgggcagcacgtgcttgaccgggtgggggcgggggcgcctgggcgggaaggcgccaggggccgggagcgcgggttcaaaggggagggcgcgggcctggggccggctcggcctaggggtgggcccggaggccgccctctgcgcgccggctccccgccccacgtccaggtgaaacgcagttcctgagaagtcccggggccgcccttggaggggaaaggaagtcaccaaagggcggcccgaggggaggggagcagagggcggcggggcccgcgaagaaggctgggggaggggcggcctgcccctttgtctggtgggtgggggtggggcgggtggatcgcgccgctccctccatctttgtgccctgggcccggagcgcgcgcttagtaggccgtgagtggtggtggctggagggcgttcggtttcgagcgcgggaacctctgcggcgtggcatggaggcgcgattcctcagcctccagcaccccgtcccaggtcacaggctccccgccagcaccttgggacccaggtctgggctcgggctgccccccagagccgcgcgcccctccacttcgcgctctccaaggccgcggaggctgctaggcccgggcaccgggctggcggcctggcggctggggaggtgcggagagggtcctgtccgccctctctctcgggtacatctctccccgtccgtgtgggacgtgtggccgcccctgagacggggaggggagagggact

SEQ ID NO: 585314 - DNA, 4001 bp, Homo sapiens
ggcctgcctggagatcttggcgggtctccctggaagctctcataccatctggtgcctccccccacctcttgctgctggggaccctttaatcccctcagccaaccccccacgaactaaatgaaggcccgaggccctttccagtgaggccaagaaacgttcgtcttttccacctgtttctgaacatcagaggcctgtcttggaggaactacatttagggcctaaccccaatccctcactttgtaataagcccgcttgggcctcaagcctgtctcctccatacactgtgcatgcaaactgtgctcctcaaatacttaaggactctgcaggaaaggccctaggaaattatcttgggggttcccttgttttcttccccgtcccccgtaaaaaagtagcccagagaagccttgagttgcctaaggtcacacagcaagttggcgagcaggaagaagtaggttcccggagaccctttcaacccgacactttgcctacccgcctagcggctagggctaaacccccgaggcatcaggctccagacccggcccgagggtgactctgcaagtgtctgcgcccggccgttgcaggccggccggcgggacccggggccagggcgcgcggggggaggggcgcaggccgctcctgcaggcgcgggaaagcagcgcaccccgaccgcatgcaccgccacgcgggtgcacccggccccacttcctgccagagggggcacccaagcccgccttggggcaggaaacctggcgcgcgcgggcgcgggggagaggaagaaagccccctccctccgtcccctccccgcaaaataaagccccagaagaaaataaaatagaaacggggagtcaaagggactagttccaacagagcccagcaaagcagcgaaaccagtttgtgggggcggagggcaggcccggcccctggggctgaagaggcgcgggccaggccagaggtggggtcggggtgaagccccaaacccaggcccgcgctccggcctcatctgcggagggggcgcgagagaaaggccgagagggcgtagggccgaatttgggggttcctccccatctccctcacttccagaacttccctgagctgcggggggcgcccgaccccccactctcctgccgcgccgcagcccgtgtctctccccgcccctcacccgggcccgggctcgggctcgggctccggctccagcgggagcggccgccgcgcgaggtgcgccgggctcctccgggctccgccgggtgcacaactcgcgctcgccgcagctgcgcgccccctcccccaccgcgcgcctttcccgggtccccgccccccgcagggcgcccgcggcgcgggggaaggggtgcgggcgtcctccccgcgccgccgggccccgccgcccgcccccgcgccgcgcggccctcccccgccgccggctcgcgccgccccggcctgggaataaagccggcggcgcgcgctgcagccccgggcggctcgcaggaggggcgacgtgcgggcgggggcgcgggcgcccccctccgccgccgccgccgcgggccccggggacgactcaccgcgagctcggccgccggcctgcggtgcgcgctccgggttgccgggagcggcggtgctgggcgctgaggaccggcctggctccgccgcggccgccgctggtagcaaatgcggatctgaaaccgggagagagcagaggcgctcagagaccgccgccgccgcgtgctcgccgcccaggcccccgcggggtatttatgtgtcacagccaggcggggggacaaaaatattccccctcccccgaaggatggcgaggggcaggaagctgggcacggcccgtgcgcggcctcaataaataaataatttaattaaattatagatataaaaaaaagaagccaccggagcggccgcgaactcacgccttcttggagccgcgccagcgccagaaatagccccggctcggagtcccaattagaggagcgcagcaccggctcaggggagcttaaaaagagcgacccaggggcaggggggacgggcccgcccgcgccagccgtgtcactcagggggcggggccatgcaaatgagcccggggatttaaaagggcggccgcccgccagccgccgccgccgctgccgcgcgggtgggtgctgacggcagggaggggcgtgtgggaggcctgggctgcgaactcgagtcgaccgcccactcctcgcagtcccggacggaggaggtgtgggaaggcacgcgcagaggagtcacgaaggagcttctggcggggggtggtgacgggtggcggtatccttcctccctggtacaggggtcccagggagagtcacctctaggggcttccagggcgtgtgggcccggccccccccccagggcgtgtgggggtggacgggggtccacgcgggcccagggggtgaagagaaacgcgctcgttagagaattccgcggcctacacgccgccccctaactaaaatagagagatggtagatttcccctgggcggacaggtgtcagcatgtgcctttcagtgtcaacccgcgtgtggctgattggtgagatacaagtcttgtgaaattcaaacgtgaaacttgtgaaatccaaagtgttttattaatggccaccagcgagccatgatcaaggtggagccttccagcgaaaccaacgattggctcgttggcaggtacacccaagggaggcttcataccttgaggtgacttagatggtgttctggagatacgcaggcccacttggggacctgggcccttccgttgggactgtaaataaaaataaaaggtgggccagaggtcgcctggaagcgctttgagggcaggggccgagcacgcaggccatctccgccacgcctggcccgcccggcgcccggcttaacaaagacttgttgcaccgagcgagaaggaagccaaaggggaagatggcggggagggcggtgggggaggaaagggcgcaggcggagcggcgcgccctgcaggccggcccggggccttctcgggcgcacctcccgcgcccggtccccgaggcggccttccacacctcctgtgatgcagggaattgaaatgcgctccagtgacacacggctgtgactcatgtttttctctgctccccttcttcctccccggtcagccgaggccctggcccagccccctcctcagggggcgagccggcggtggaggggacgcaggaaagccctgggcccggcgcggaggcggggtggggagcggcgggctgggccttgcagttgcaggaatgtggcaggaatgtttccggtgggggtggggagcgggcggggggtgggcccagcccccacccgtgcggcgggaagcgctcggggcccgggcagcacgtgcttgaccgggtgggggcgggggcgcctgggcgggaaggcgccaggggccgggagcgcgggttcaaaggggagggcgcgggcctggggccggctcggcctaggggtgggcccggaggccgccctctgcgcgccggctccccgccccacgtccaggtgaaacgcagttcctgagaagtcccggggccgcccttggaggggaaaggaagtcaccaaagggcggcccgaggggaggggagcagagggcggcggggcccgcgaagaaggctgggggaggggcggcctgcccctttgtctggtgggtgggggtggggcgggtggatcgcgccgctccctccatctttgtgccctgggcccggagcgcgcgcttagtaggccgtgagtggtggtggctggagggcgttcggtttcgagcgcgggaacctctgcggcgtggcatggaggcgcgattcctcagcctccagcaccccgtcccaggtcacaggctccccgccagcaccttgggacccaggtctgggctcgggctgccccccagagccgcgcgcccctccacttcgcgctctccaaggccgcggaggctgctaggcccgggcaccgggctggcggcctggcggctggggaggtgcggagagggtcctgtccgccct

SEQ ID NO: 585315 - DNA, 4001 bp, Homo sapiens
gactcactcatcttcccttctctaaggagcaggtggaagagtgatggctgggatgctgggagacagaaaagtgcttttagacaaacatctcgcttcagccactttctaccccctcatcacccacaccttcaaggcacactgcagaaaactgtgctcccatgggcccccaggcctcctactctgcccaggatggaggggtctgcccacccccagatgctgccaagggcggggaagggccgttggccctaatcagcttcttatctatctcctgttcagaagggctctttgttgtcctgccttaacaccgccccagtgcagcgtggtggggggggtcccaggaggtacagccagcccagacctagctacatgggtgaggccaccctgggacaaaggtgtggggaggtgagatctgacgtattgccagcatcccctccttctgtagtcaactgctgccctttctctttaagagaaaatccagcctacgcagttcagtgggaaaatggaaagaatgagaccttgcgatctggcagctatggacattgatcccctgcccacctcactgacaatattgcctatctggcaaggtgcaagactcaggaccaaaaagagccaatcacacagccaggggtggtgcccaccaccagctctcttctctgttctcacccagggtaaatccctggagaattcagattggtataattgagggagggaggagatggttgaagctagtgggtgaggtgggggaggaaagtgagcccaaagccaaaggccaccctcctctttccccttacccctcctctgcccaactggagtcagatgggactttgtcagatgggtagggaattctccaactgaaatgcaccgcctaacagaccctggctggccctcatcctttaggatgaggtttagggctcatcctaaaaccttcttggtcattttctagcatcttccttcttcttagaggcctgttggggtttaattaaccccatcaattttgagttttcctaaaacttctcattggaaggagggcctgcaacctgtatttgggaataccctgtattacaggcttaaaaaggacagtcctccacatcttcatcctagtccttatccccaggctacagatggatgagacgccggaggcctaggctacacatttttccagtaaccaatccctgcctgccatggtaaggggtgggacaagcggctccacttctgaacccctctcaatctgtaagatcaaggtaattataaggtacctgcctgaactacctcctgactgcttcaaggatcaaactaggtaatagtttagaaaaacttaaaataatagaaagaaatcttcactctaaccaaaataagaactagaccatttgaaaatgatttatgggccaggtgaggtgactcatgcctgtaatcccagcactttgggatgccaaagcaggaggactgcttgaggtcaggagttcgagaccagcctggacaatacggtgggactcccatgtctaatttaaaagaaaaaaaaaaaagaagaaaaagagtttttaccccaatgagaggaaaaaaacatttttgcaaacttgtgatttctagagggcccaggacctccattttcaagcatcaagagaccctccagacagcaggactttggtaattattctatcttataatgtttcagacttggagacccttttaaacaaggtggttggtgatttatcctgctccgtcattagtggcttggcctgctctgcaattacaggcagtgattagaatcttatattacaccacaggtcccccttcaaactaaacatcaaaattaatcaactaaacgagtgctgacctcatataaggtctgcctggggccccctcatcgagggggttccagttgggcgaagccagtccggaatcccagagagcctggcccggcctgcctggagatcttggcgggtctccctggaagctctcataccatctggtgcctccccccacctcttgctgctggggaccctttaatcccctcagccaaccccccacgaactaaatgaaggcccgaggccctttccagtgaggccaagaaacgttcgtcttttccacctgtttctgaacatcagaggcctgtcttggaggaactacatttagggcctaaccccaatccctcactttgtaataagcccgcttgggcctcaagcctgtctcctccatacactgtgcatgcaaactgtgctcctcaaatacttaaggactctgcaggaaaggccctaggaaattatcttgggggttcccttgttttcttccccgtcccccgtaaaaaagtagcccagagaagccttgagttgcctaaggtcacacagcaagttggcgagcaggaagaagtaggttcccggagaccctttcaacccgacactttgcctacccgcctagcggctagggctaaacccccgaggcatcaggctccagacccggcccgagggtgactctgcaagtgtctgcgcccggccgttgcaggccggccggcgggacccggggccagggcgcgcggggggaggggcgcaggccgctcctgcaggcgcgggaaagcagcgcaccccgaccgcatgcaccgccacgcgggtgcacccggccccacttcctgccagagggggcacccaagcccgccttggggcaggaaacctggcgcgcgcgggcgcgggggagaggaagaaagccccctccctccgtcccctccccgcaaaataaagccccagaagaaaataaaatagaaacggggagtcaaagggactagttccaacagagcccagcaaagcagcgaaaccagtttgtgggggcggagggcaggcccggcccctggggctgaagaggcgcgggccaggccagaggtggggtcggggtgaagccccaaacccaggcccgcgctccggcctcatctgcggagggggcgcgagagaaaggccgagagggcgtagggccgaatttgggggttcctccccatctccctcacttccagaacttccctgagctgcggggggcgcccgaccccccactctcctgccgcgccgcagcccgtgtctctccccgcccctcacccgggcccgggctcgggctcgggctccggctccagcgggagcggccgccgcgcgaggtgcgccgggctcctccgggctccgccgggtgcacaactcgcgctcgccgcagctgcgcgccccctcccccaccgcgcgcctttcccgggtccccgccccccgcagggcgcccgcggcgcgggggaaggggtgcgggcgtcctccccgcgccgccgggccccgccgcccgcccccgcgccgcgcggccctcccccgccgccggctcgcgccgccccggcctgggaataaagccggcggcgcgcgctgcagccccgggcggctcgcaggaggggcgacgtgcgggcgggggcgcgggcgcccccctccgccgccgccgccgcgggccccggggacgactcaccgcgagctcggccgccggcctgcggtgcgcgctccgggttgccgggagcggcggtgctgggcgctgaggaccggcctggctccgccgcggccgccgctggtagcaaatgcggatctgaaaccgggagagagcagaggcgctcagagaccgccgccgccgcgtgctcgccgcccaggcccccgcggggtatttatgtgtcacagccaggcggggggacaaaaatattccccctcccccgaaggatggcgaggggcaggaagctgggcacggcccgtgcgcggcctcaataaataaataatttaattaaattatagatataaaaaaaagaagccaccggagcggccgcgaactcacgccttcttggagccgcgccagcgccagaaatagccccggctcggagtcccaattagaggagcgcagcaccggctcaggggagcttaaaaagagcgacccaggggcaggggggacgggcccgcccgcgccagccgtgtcactcagggggcggggccatgcaaatgagcccgggg

SEQ ID NO: 585316 - DNA, 4001 bp, Homo sapiens
tgtgagttcaattacgataagatagaaaaaatcacaattcaacagtattggaactaaaacagaattatttttaaaaattcccgagaacacaaaaagaagcataactctggagggagcaaagggctggactaaaaaaaaaaaaaaatttaaaatctgtacttgagagacaaataagagttttctaggcaaagcagttggtgggtaaaaaggcaatatttagagaagggctattatatcttcagaatgggccaaaaaagtcttcattaagctgatgaatgccccagaattttatttctcgggaatcctagtcattttcatttaacctgcttccatatcttagcagggcaaataagacatccttacctgcaaccaatcttctatcattgtccataaaacccacaaaatgtgtaaatcagaaaataaagagggagagagaaatataatattcactcaaaaagaaaaatcatataaactctcagacttaggaaatataagttaatggttcctgattaaataacagactgaatttaaaaagtcaagaacattaagataaaagttacatcaggaaggtcaaaatagaaggtaggaaaattaaatagacatattaacatgtgggaagataaaggataacttttcacctctaccactgtcatcaacaggttttgagttagatgaccatggccatcttttaagtaacgagaaacaaaatatcttctaaagaacacaaatgctgaattccaatttgtaaagataagattgcaatttcacatatgatacactaaactgagaatacacaatagaaaatgaatattttatattagaatagttgatttaaatccacatggtacaattatgcttaatgactaaaatattacaataacagaagttattttgttcactagtcgaatcagaaataatcttgtatccagcacctgtaatttaacaagaagtcctcacagtgctcctcctttattccatgtttcaacattttcataacaattatcagttatttaatattttgtggaattttagattttcaagttttttaaggaaaaagttaatttctttatacaccttttctttatttatctgacactggttaagagtgcattaaatcataagtatatgaataatattaagttgcctattgtcttaacatgccctttcaggaacaatgtgggaataaattttagtctgaaattgctgttatttacactttctttcaagtttgttgaagcacaaatacatttgggataattaatgttctgatggattatttcatcctactatgtcttcttaaccttctaccggtttcattcctttttctgcctcacattgtgacaaatttgtagtctttgttacacagtacaaggagcactgagaataagggcggtatccttgaaggaatacctatgaatacaaattgtattacgtaatgcatccctttccaggaaaacacagagaaggaattcttttctttaggcgaccagcaaatggtcacaggcagggattttgcagggtctgatctgtagaggcgggtcgatacattcaccgaagagagataacgggaaaccgtttaaggggtgcggcctaacacgacagaactgctgcgggaagggtcctggggtgaggaggtgacataaagggaggagggcaccaagaggttgcagggagagaggctggctgtcagtgtgcgcatgagggtggggacaccctgggccgcgaggtggtacctgcgcggggtcgagcgcccctgccactgaatccccgatccagagatgctcccggagaagctgctggtagctgaggcagtgcttcaccgcggatggcacattccccatggcggagcctggggcggcagtcggcgaggggagggagactggaggaggatgaggggcgggcaccgcgctgggaaactgcgccagctcgggagcgcgcccctccggtgcactggctgtgaggaccagagctgttctgcgcactgcggcggcgccgagagggcggggagtggggcgtggcaggtggccgcgcctggggcagcgggtgcacggggcacctgcgggaatcgacagaaatgccgagcacctgaacaggagagaaaggagctgagccagaggatgtccaggggtgtctcattttccgcactacactgagcgcccagggctgactgtatcttaacgtgcccacctacttctcacctggcatagatcaggtgtagaagaaaaggggtctaaaataaaaggaaggggcgtgagtgtttatgttgatgagttcgttcattcccagctgcagccttgggtgctcaagtgtagatttgcctaccgttgagctcacggagtttatgctttataacaataagctctatttaaaaatgtttttgaggcaatcagcaaggttaaaacatatccaacagtctaatgaaaaggaaaagatagtcttaaattaggttacatgtcagaggtactctcagaggtacgttcctaaatgagaggtaagctgtaagttggtgctgcggttaagcgctgaaatggaactgcgtgtttaaaagtctcatggcacaaaattattaaagccctaaggactagatttatccaaacggaaaattctatacaagttcttaggatattagaattggagacatttttagtggaagagagggtttgaaaaaatagccttcgagcagaccaccggcctaccttccccccctcactttcacatgtaaacttacgtgtattgtcacaccctaataatcttcgcagtgggttcagtggtttgcagctaaaatgacatagtcatcaagaatagtctcgtgcaggatacctagggtcttccggagacccagccagggtgtccatggccaggaatacgcatcagccctggtggctgatggagcaaatgtaaaccaggagccaaccgatgcacaccgtagtataaacacacagaagaaatttaccattcaaagtcaaaccatccttaccacttgtgtgttgcatgggtgggggtttggggggtgggcagtgagacttccacaggtaataaaaataaatgggttaagggaggaaaaagacaaagagtggaagagaaatcgtgtagatccttcggtaaaactgcactagaaagggcaaagaggatgaggaggtcatagtcttcttctcacagttaaccaaggattttttttttcttttttctttctttttttttttttttttttttttttttgagacggagtctcgctctgtcgcccaggctggagtgcagtggcgcgatgtcggctcactgaaagcttctccccccaggttcacgccattctcctgcctcggcctccccagctgctgggactacaggcgccggccgccacgccaggctaattttttgtatttttagtagagacggggtttcaccgcgttagccaggatggtctcgatctcctgacctcgtggtctgacctcctcggcctcccaaagtgctgggattacaggggtcagccaccgcgcccagccggatgtttaacctggagaacattccctgaactgctaaagtgaagttatccaattcctggatgcgcttaaaactctgtaaagcaccaaaactccggttgttatttacctaagcatgactatcatataggtgtacattcatagagctaaatctattagctgtaccagcagagctcagctgttagttattgttccactgcaagtgaaatggacggtactggttatatctatgcttactatcatttttctctctatatttaaattctgcaacagggaacatgatatttaaaaataattttaaaagatccaacttcaacaacaataatttaacaaggcaaccttcataatggagtcaacaatcattctaaacctcaaaaaggattggcaattaaaattgaagtctaaacttttggagaataagacctctaagataagtcagatatgatatgatcttctgctactaagaacaagaacatttagggaaaaaaaaattattgcttaatc

SEQ ID NO: 585317 - DNA, 4001 bp, Homo sapiens
cacctaacctactgtttatgtaaacaatggttataattcccaggaaaaaaagatggcctccagctcacttactctgtaacccgtatcttgatgattagttcctttgtctctactagaatttccaatccatcattaaccctcagtcaaaatgctgaaaatggtgacatcacttaatatcctaattctagtaaaacagggctagaaaataccttcataaaattaagtttaaataataaatctcaagtattagtgctcttaatatgccatctgtcttcttaaactgggagtacctttggatttccttaattcctcttgacccaccctttcgtaagtgagtacgaaatgggtgagaataagactttggcatctatagcatctgattaaatctttactagtagttattggttggtgagatgcaggacaatttatgtctttaagtcccagctgaatgggggtaacaccgctcaagctgttttcaggattaaatgagataatgcaagtcaaattctgcacagcgtgagggacacagtatgtgcacaacaaactctaagacttttaaacactttcaattatttttaaaaagtggggtaggagacaagtttctacccaatttttagtaataacatataagaaggggaaagcttttgaatttttaaaacttcagtattttaaaataatgcagtcactctcacacacaaattagtccatggtctttgataaagcaagacattaggtgtaattttgcttcaaatttaatacccacactcgttgacactgttggaaacactgaggctggcggtgggagggtgcaaagcacttgcttaggaaccagctgagaaatcctcactgatttctcagggaggaggaaacctttcccttccctccccgggacaagtcgaagccccaccccgagggagatttgtgtccctgaatgtagtagttggtgtccggggcctgcgcagaagaggacagtccgcaaggggcggaagacaagacaaaaatgactccagttcgctagacgcgcagaggggcggatagcgcgcggaccccgccttccccaaccgagtgtgggttccagtcgctggggaggacctggtggccccctgaccttggacgagccatattggacgccccggcgccgtcccgtcttccacgctgccaactccaccgctcccgccccgaactgcgggtaggtccaggccgccaggccccgcctcgccggccccagccctgattgacactggagttggtacatacgggtctgcagcggaggcgagcaggagggtgagcgctattttaaacatggctttctctttcccttagcctaggagccaccgcagcgcacccagcccgcgagtacagccgcatgggaataatcccaacatttgcctgatttattttcttccctctccttacgcttgtacttgtttttctcctctcgctgttttcccttcacactaattcgcaacctggcagtttgcaaagaggaaactccctttcggaatggaaagccgcttttgcttcttgttgttgggggtggaaaacattccagcgagaatgagttcaaaaagaagggaaaccgcgtcactggagagaaagtaacattaagagatcgatgaggacggagtgggtaggggggacagagagaggaacgtctgcaacaggcatctaaaaacaagcgtggaggagcaaagattcccaatccccgggttactaccgcgcgcgttctgcgcgagccattgcaatgccagcatttactgtaagcagaatttgaaggcttttgaaatctttttttggtaagacttacctttctcttcggcataatgactatgtcggtgaagcaaaaagtaaagcaacggactggaactgctggcgccgccgctggatgctgcctctgcctctgcagctgctcacgcgcagggcacgacgtagcccggcctcttcgacctgcacctccgcggctccctctgggggccctctgctcgcctccctgctgctccaatgaggagccccgccagccggccgcgaggccccattggctgaggcaacgttctaaattccacgagggcacgcccacctccgcgcgcggtacgcgctgttgtagtttccacttcaccgaaaaaaatctgcctggcgactgagcatgcccagttcaactagtagcctccaggccacacaatcctgaagtttcattgtttcgctgctctctctttgagattgtaagaataagaacagtgtgtgtcttcataggaaggaaaaagagtaagaatgaatacgtaaactttataatgtaaatatatacacagcaggtaccttattcatttcctacccataaaggcttttaatgaatgttacatggtgggaatctgtaaagcgtgggaaggtactctgtactggaagagcgtggcaacttctaaaggcctcagtttccccccctagatatatagtgacaacagtccctaaaatcacttagctctaattttctgaaatctgtgattataaatcactcactaattcagctaacttcaaactagatgtgaagacgaataggacatgtttgttacggaaattaggaaaagaaagaacaaggcaaaaactgattattttatatttgagacatatatttgaatgacacccgtcatgttacactttatgcgtaatatttctcaaagttctgcaaggcataaaatgagcattgcaaaaatatttctgaattcattttatgagaccagatttactctgataccaaaaccagtgaaagacttcaaaagagagttacagaccaatatcactcataaacatagacacaaaagtcgtgaacaaaattttagtaaatgaaactcaacaacatttaaagggacaatacatcatgacctgtggggcttatcttgggaatgcaaagctgcttttttaatatctgagaatcaatcaatgtaattggcaggattaatagaataaagggggaaaaacaatcctttcagcagatgcaggaaaagcgctagtgaatgggtaagcaaattgtgatgagcacatgcagtggaatactattcagcaataaaaaacaataaaaaattttcctacatggatgaatatcaaaaacaaagtgctgtacgaaagaagtcaaatacaaaagaccacactgaatgattgcattcatatgaaattatagaaaaagcaaaattgggcaaagttagtttcagaatcatcttagcaggcaaagctcacatcataggaaaatgtgttgaagccttacattacaaatatggccaaatccactttggtaacacagaggctgcaaatatgtattaaaaatatcatgtattaaatatgtattaaaaaagcaatgaagtttaatatttcactttttctttagtaattttcagaatacattaattgatctagtactctccagaggtggttgattactttcttttttggaacatctttatgaactcatggatttttacatatttggtgtgcatcagtgtattgctatcattattattacctttttaatgctcctattaccacatctttagccaatgcataccctttcaaattagtgcttgtgtccttttgacatgatcttaatcatttttgatagattccctgttcttgggcattcagtgaatgacaatagtatactgaaacgaattaagataaaaaccaattgcttagagctagataaaaatttacaagttaataattttatcattaaaataatatttataatgaagatgtctttcaagatattaatttgccaaatacttgatagttaaataaagaaaaagtcagtgaaaacatttttagtaagatatgtgtgagaaggatactgagtagcacttgcaatctggactggatggctatttttcttcatggagatggaaaggtgccacaacaaaggtagtgctaaggtgaatatttctcctctgtgatgaaaaataactcacaaaattggcttctttgttaattttttttcaaaaccaaacactcagatcatc

SEQ ID NO: 585318 - DNA, 4001 bp, Homo sapiens
aagaaaaaaaaaaaaagattcacaggcaagatgcagtgtgctacagaagcaagaggtcacatggtgtcagtcactctccagggcgtttgttcttcatcttccaaagtattagagacgcagcatgagtttccacggaggttaagtgagagagactgggagatgcaggggtagaaaggaaagatgagaaaacgcagggtgtctaaaagggtaggtttgctgctgcagcttgccagaatgcatctgctttaaagagaaggagtgagccataagctcccaaacagtcacccatctgtaaaggttggttaggggcacactcaccttccaggctaaagtattcctgctaactgggatcggagaaagatgaagaggataaatccttgtcatctcctaggaccctggaacctttgccccctttctgggcaccataataacttgcttatatttctgagtagtacagaggggattttaaatgaaaatgtattagacaggttgctgttgagcacatgcccaagtttattgtcttgctaaccaagatattatcttgctagccaaggtgttgtcttgttaagggaaccagcaagatgacaaaagaatggacctttcaagtcaacgtctacccaagcagcctgtttaagaaaatgataaaaagaaaacagctcattaacattgtccttttctttcttttcttttctttttttttttttttttttaattttgcggacccaccaaagaatgcagcccttcttttctcatggtcataaaaatatcacattcggttgggcgcggtggctcatgcctgtaatctcagcactttgggaggccgaggcgggcggatcacttgaggtcaggagtttgagaccagcctggccaatatggtgaaactccgtctccaactaaaaatacaaaaattatccgggtgtagtgttacacacctgtagtcccagctgctcgggagcctgaggcacaagaatcgaggtggaggttgcagtgagcgagatcgcaccattgcaccccagcctggacaacagagtgagactccgtctcaaaaacaaacaaacaaaaacaaacacatcacattcttattagtcatttgagggaacctggagcaatatgatctgagaggctaggcttggctaatccctagaaaaagtagtaatacatctaagaaagaaatccctcttagggaacacccgaggctgccaggtgacacaacaaaactttctcataaaagcgtttgattaatccgattaacttgtaagcaagccatgtggcagaggtaagaggccaaacaccaaggcaccagtcctgattctaaacaagtgctggtccatttcttaactttgggatccattttttctttgtgatggaatagcaaaaggtcaaagtggaggaggactcagcccttgggtgtctcctcaacgagggtttctcgaaggtaaattggggaggaagggagagcccacggcaggtcagtccaacctgccagtcaccacctctttaaggccacagccctgcgggagcaatcctttcaaatccccttccttccttcttttagaacgcccctagaacgccgattaggacttctcatcccggtcgggcctgcggctctctgtgaccccacctctggattcagcttttcccagggattcacactcggagctcaggagagatgctgcgattactctggagacgggaagacaggcggggctgacggggcccaaggcccctaatcatgaccggggccagctggcaggagggtcctaagtatacggagggcggcgggaccccccccaccacgcccctcattttccggggtagcgcacaaagtctgtgaggcacttacccgagtctcgtggccgtccgaggggcgcgggaatcccagctgaggcccgtgacgcgccggagccctaggcgtgggcagggccagcaccagccctaagacagagaagacgagcggagcccggctccgccaggaacaggaaggcgagggaaggtgaggatgcgcttccggggctgcaggcggggagccgccccgagtccaagccggagagagctggttctccccctggcgatacgtgtgtgagcctctgaggcccgccctaagcactgctgccccgatctagcaagacaagaagacaggaaatttatgacagcctgaaaaagtctttaaaagatacacactggaagaatttcgtagtaagatgaggaaaaaaaaacgtgtttccgcccggtttcgaaccggggacctttcgcgtgtgaggcgaacgtgataaccactacactacggaaacccactaagggcttatttttcagagtaaatagttcttcctgcctagttccgtgtttcttcgttccaagtgcgtgttttgctgatgtgcgcgtgcgtctctgtaccgacctctcaaaccagaaaaaccaatgaaaagctcagacccagcccctccagtgttcaaactgaagccatagaatttattctacaaatgactgaatagggaagaacacaatagagactttaatttaatctctgaacggtccttcgttcttcggccaaaatggccaggcaaggctgggcacaacttgggtagggcgagcgtttctctggcgtagttggcgttaccacgtggtcagtggcagaatgctccgcaaagaaatgataaccccatatgttgtcgggagctgcccctcttgcttctgagtcttccaggcaaatttatcttgcaggaatttccttactcctgcggagtcagaaagttgtaaaacgaccctgcttacaccgagccagccaggagtcgaacctggaatcttctgatccgtagtcagacgcgttatccattgcgccactggccctgcgcgtaccttaggggcgaggtatttcataagaaactaggttgtacccgtaatatctgggtgaacgcctgtaagccgcgtttgcccgctggtccaggctcgcagcgcatggactctctggtagctacttctgcacacgccccgtggccttcattcctttctcggtctgtctctgccggctgaaaaatggcggtgaaaagcaagccctgcatcctctctgccccaatatcaccgctccattaatgcgttcgttcattcaaccagtattagtgttcaaggcactgcagataacggtgaagaaaacatgagagacccttgccctcaagattacatggcagtggcggaagcggataataaagcattaaataaacaaaataatagtgataagcgattggagaaaaataataataaaacagggaaagaggataggaaaggccagcagtgaaagtgatgaatgagggataaatgctgatatcggggaaatgagtgatctggaacagggaaaaatcgctagggaaaaggcctggaggtggaagcaggcttgggagttatgttgaggaggccggtgctcagtggagaggaataggagatcctgggagaccacctccagctttataggcccttgtaaggactctggccagctttacaggctcttgtaaggactctggctggtattctgtaggaaactggaagccgttgtacggtgacgtggtctgagttttcatttgtctctctgtgggtctttttttttttttcttcaaatattttactaagcgaaactgtgctaggcctcctcactgcatgctgcttctactgcagggccttgatctcagaatttgacagctttataaggagcatcatcaacccggacactcatatgaatgttcactttttcactttgaaagcaaacaaacgtctcatatgtgtgtgttttagtttgtccatatttctgagaataaatcatccccatgcctggtgagcattttaaataagatgaggtctactaaacagaagtaaaactgcctgatattgagaatatacactttgagattagaaaatatttgttttcagttcataaggtttcaacagccgttacaaaaaatattctgctctttctgcataaatattaaggtagacctaggttatggattact

SEQ ID NO: 585319 - DNA, 4001 bp, Homo sapiens
cttctgaaagcatggattctgagtatgggtcccagactgaaaaatcatacaggtttaggattggaagggatggtagaagtaacctctgtctccctcccagaaagcagggtcttcagttactggagagtgggcctaaataagcctgttaccttcagacataatctcaaagtctgaagtgagaggcttttagaaagcccaccaaacaattcaattccaaataaaagctatccccttagagactagagacagagttaaaaaaatgaaaagaatcatcaactaaataataatgcattagtgatcattagatcaattactaagtaaaaggtaaatgattggaagctaattaaaggtcagttggggagggctggatataagagttccattacagaggtaggccaatggcaccacctcaaggcttctcaataaccatcaagtgctactttaggaaactactggaagtcggtgagaagctctgattacactttcagggtaggtaacaactagtgagtgagacaattactcaggaattttgaattgagaagcatcaaaggagttcactttaccagtcaaaatgacaccaactgaaggaaaacaaggaccactgctatgttatttctaaataatctaagtgataaggtctacagattagcttaaattttggaaggaaaagaaaactgaaaggaaaagattttcatttttaattttgtatgtgttttcactgactgtgagaactgaactcatggagaacacacttcagtctttccagtgcaagaattaattttaaagggccagccaggcacagtggttcacacctgtaatcccagcactttgggaggccaaggcaggtggatctcctaaggtcaggagttcgaaaccagcctggccaacacagtgaaaccctgtctctactaacaatacaaaattagctgggtgtgtggcacatgcctgcaatcacagctacttgggaggctgaggcaggagaatagtttgaacatgggaggaggaggttgcagtgagccgagattacgccattgcactctagcttgggcaatgagcgaaactccatctcaaaaaaaaaatttttttttaagggcaaaaagggaagcttcacatttcagaaattaacttctctgtctttgcccattagactagacatagaacacaccagaaacatttactgtgaagccagctgatgttgctgggacttctgcaagtccaatacctctcaactgtacacctatttagagctaaaccctagcactgtaattttctctccatggatttcccattgctttctgggcaattattctgagcaacagcctccttgtctggtgcgttcagcccctgaaaaccagagctaattaacatagttaaaactccccacgcctgcagccatctttccagagcaatggattgcaaactcgatgagctcctttagaggctcatacataattttaatgctcctgatagcacattaagtgtccactcataaatttcaaaagaaagatacatagatacatcatcactgttttgctacagctagaggtcaacaccagatgcacacggaccaactgagctctattaaatgacatttttactgtacacagctttatccctttcctgaaaacaagtgtcaatgcacacggaatacaaatggatcttgacaaaacatcttggtttgaggaacttggatctctctcttttaaaggctcagtaaatcaaaatcaatactgcagaaaagcatgtttcctgggaatttcgaaggagaaaaacaagtggatagacttaaaattatgtcctaaggaagtttaaatcaagccttaatgtcacaggggtataagcatgtgttttaagcacccacctatccaagctcccaactctggcgactagatacaggagactcccaacggcaaggcttcccagcaccaggagcttctgtctcagccacgcctgctgtttgaatagcatggccctccatcaaccttcaggactgctgcagcctgcgatagaaggactcatcagcagccatctcttagaggctctgttggttgtcacagagctaagcagaggtggaagacaggtgataagtgacactgcacaaagagcagatcccataccaactctcacaagtgtcatgatgtaacaggtacttagcaaaacttacctttcttttcctggaccatgttataagatcaaatactaactcaatggggaaggatactaactagtactaactagacagaacctgtgagataattgtcaaagtaaattaaaatgcatgtaacatatagtgtgtttgtgtgtgtgtgtgtatatataaaatgattcaaagaatatggatagaatgagcaacttggccgggtacggtggctcaagcctgtaatcccattactttgggaggccaaggcgggtggatcacctgaggtcaggagttcaagaccaccctggccaagatggtgaaacctcgtctctactaaaaatgcaaaaattagctgggcacagtggtgggcccctgtaatcccagctgctagggaggctgagtcaggagaatcacttgaacccaagaggtggaggttgcagtgagctgcgatcatgccactccactctggcctgggtgacagagaagacctgtctcagaaaaaaaaaaaaaaaaagagcaacttgaggcttaacagcagggcaaccataaactgaaggctctgcttcagaataacaaggtgaatttgaaatcccagttcataagttatcattttgagcatagcaatgacatattttaattacatatgtttttgttttgttttagttgtgagtagaagaagggggtgaaatcgaagtgatacttactgaagttatcagtggtgactatcaggatgtcacatgtttgaggacaatggccttggggaacctgatgtttccctccatgtcctctgctcagtcctgggttctgaaacatgttcggactagatgcttttgctatgtgacctcccctggctgtcaatgaatttagacaggtttggtgatattggtctcactcttagatcatgaaagaagcttacctggaagctctgttctcatatacctgaaataaggccagctgaggagcgtagggctttactagtgctgttattaaattttggggaaaaatgcaagttcccaattcagcctttcttattaaaaataaatccaatccctctttcaagataagattgtttgcctcttattgaaactcaaaatagtaacccaagaaggaagctatatagatagcaatgagtcatggttagaaattgttttgctgcaatgatatctctgtattgctatgtgaagtttttctttgtgcaaaagggatatactaggattgagtgattgatctattcattcattattcaagaaatcactgaattcccaaagcattttcaactattatactaggtttatcagagatttcaaaacagatccccaaagagttttattccttagaaaactgataatgtgattagggaatcatgaaataaccagagaacattacccaattatgataatgtatgaataagtgttgggaaaagaaaattaaggaaaaggtcagagaatgtgggcatggtaaaatttttttgtgtgtgtggaatgtactatgtgaattgctgaggagacggtaggagggcatcctaagagggagagataagaccagcagtcatccaacacacagttgacaaatacttatggaacatgtcttatgtgctagattctgtattgggtactatggagaatagtggccaattaaatagacatgttcttgccctgtgggagtccacagtctagtggagaagacaggcattaagcctacatacaggattaatgcatacttacaaattgtattcaatatgacaaaggaaagttacaggatctagtgagaaagagtaataggaggaacctacttcagtccttcctgaagaagtaacacttggggtgacacctggaggaggaggagcaaggaggcatgagcg

SEQ ID NO: 585320 - DNA, 4001 bp, Homo sapiens
ctgggaggggcagaaacatttggacagatgcatgggtggagacacaaatgggctagggggtacccacttctgtccctggccttgggaacctctgcccttcccagtggctccagactccccttacttgctttctcatatagtctgggttctacttctctgccctctccctccccatgctggcctcataccagtgacttccactgaggtccctgtgatgtatccactatcttcagatgccaagaatgcgaccacatctgccacatctatgagaatggtggggagagggcagaattctgctcactcccatagacccaaaacagccataatctcccaccaaagacatccctccccacaaacctctccacagacaccaaccaccagtcccctagaaaatccccaaactttggggatctcttcattcaggcccccttcccagggaccccactacattcagtgctcaccctcagggtcccccaagtgtcccatcgggatcatttcagtaatctgtaaggaaatactcatgtgggtgaaagcttcttttatggatttttttgaagactgagtctgtgacccttttttgtcttcatttctcatacattcattgaatatttaatgtttgccaggaactgtgcccagtattctctctctctctctctctctctctctgtgaagcccagagagattgagtctctgaatgattctgccctccacccacagcctcctaccttgtccaccactttctgtggcactttctgtgtcatgggtgttgcaatgaaccctgggaggacagagttacagcggatcccatgtctgtgggaaggagagtggctgccgattctggagagggctgaatgctggtacctccctcagaccccccaggtgctccccagcaccctcaagcatctgaccaaccgtccaagctcccgggctgcggtctgggtcagcccaatcactccagccttggatgctgcatagtttgtctgccccacgttccccacctataggtgagtcagagatgtggaatgagtcaggagtctcaaggaggggttctcctctctataccacttggctggctgacctcgtccaactcaacctgacctttcctacgatgctactgatgttgatgatggaaccacgacaaccattggacaccagggcttgtgctgcagcctgagtgactaggaaggtgccctggcgggaaagggtaacaagggagaaaagatcagctggggtgacagccctcctccaactccctccccaggctaagggggccaaacgtcgcaggttcagagatcgccaccttgaggttgacagctatgactttgtcccagtcatcctcagacatgtgcagcagaaactcatcctgggtgatgcccgcacaggacacaacgacagatggtgggcgagaaaagcaggcctatgggagggggaggttacgcatcaaaaaccccccacaaaaagccggggcagtggaggcaatatcagagctttagagggggaaagtggcctagcgttcacctgcacttgttccagcaggcacctggcggccctggcctcagacacgtcagcctggaaggcagcatggttccctcggggcggcccctccttgctccctggcccgcccagcagccgcaccgtctcctgtgccgctgcccggtccaggtcgcaggcagctacggtggccccctctccggccaggcgtacactgaccgctcggccgatgccgctccccgcacctgaggtaggacagaacacgccggaccgggcacggggaggagagggcagggatcagaggtcacagggcagaaagtaaaatgtgggtaaggggccagaggtcacagcggccgcgcactccaagggcacgcccctgacctcactccaataccccaaaccgcccggggaaagaaccccctcaacctgtgaccaaggccagtgcggagcggagtcggttctggagctgagacgccatggcgggctgtgggtgggtgggaatcccagcactaagccaatcccagcgcagaggggcgtggcaagggcaaagccggggccaatcaaaggcccgccagccttaggccatctgcggccaccagcgcaggccgacctcccaccgagggggcgtggcccgacactgctgcttaggggccccgggtgtggagaagacaaggggccccattccccccaaaaagacaaagactgcatgtggggcggaagatcggaggtctttatttccggttaccacccctccccctcgattcaaacacagtgatataaaaggaatagaaacaaaaaaaatcaggccatgagaataccaactaaccctctcccaccccatccccccaatcactcccaaatcaggacacacgattgatgtttgatgtttatccccgactcctcctgttaccctctctgtccaggactctggtcttccctgaagcctccaccaactggtgggagaaaggaaactggaccttggagaacttcctgtgtagcaacttggttctccgagaacaggtggggtaggggacaccaggtaggctgccatcaccccctgtcccttccagccttcttcatggccccatttagccttccaaatgcaacatggtcagacagtgcccaacactatggtccctctggcctctcattctcaccgctccagcctctgtaagactgccagcccttgaaggccctaatgccaaagtaaccattctcccaggctacagttccttcctttggcagatgtccctggccagggcccccaacctctacgcacccctgacctggagttaggggtagaggtttggggcaggggtagtttatccacccctcactcaaggtgggcaatcagcaccatcatgataactccccccagcagccccagcacctccagaagtgattgcaatggtgatgcctccctcagcagctcgggcaacacagacactgttgctacgtagataaagccacctgcagtaaatggcaggacccagccaggacctgcaccacctgcaatttcactgcccactgctcctccttcagtgagaagggcacaggctgtgcctgccagtgcccctactgctgtcagtagttgcagacgcatcgcctgatgggcagaaaagagaaaaaggcactcaccaatagctaaagattatcagtggtttagaagtggctggtggggtataggtataggggacatggatttggaaactaaacatcaaaataaaaagagaagagggagcagtctagaatagacaatttctgaaaaatcttaagagatcagaggtcctttccacagactttctgattgagtaggcgtgtgtgtgtaagactccactaaaccattcagatggtttatagaccagtttaagaaatactgagctaaaggacaaagtaaccagaacttcttccccctcatttctagaggacttgtcaatgacagtatgaattgtttggaactaataagaggctgtttgggtttagggtgagtgaggagagataaagggtttgaggcagctgtgtttggcagacatcaccaacctgctttttgctgcagccagactggaccaagatggcaaagtctccgacctcgtggggcacttcatgtagcaggacagtcattgtggtcaggatccctagtccccggccccctcgaaaggaagccccaatggccagaccatcagtgaagttgtgtgccaagtcagcagccagattcaggtaccccgacacacgcaggtcttgtacaggacaagaagagaaaatgatcagaggcttccatcaccacttgttccagtcttggtcagctattctcacacctcccctcagagaccactttacacccagtcctttagtgtttctcagatacctgccattacccacagcacatattccatgtgatttgtgatgatgtcccttgcccaaatttatcaccaactctggcccttacctaagcctcttttttcttcttcagcgttctgaggtctcactggcccatctttgggtactgtgct

SEQ ID NO: 585321 - DNA, 4001 bp, Homo sapiens
tccacatttgacagtactcagaaaataagaatgttattaaaacactgttgctaatcagaatttaataggcctaccactgacatgatactctgattaaaagcaactgccaatatatatagcccctatttctggcccataaaagacaaaaaggtatgataaagtcagctttcgtggggagagaatctcagtccaatctctaacacgaatacgtgtctgagtaacagtctgtactgatccttcttgtcaacttttaatccttctaactgatgaaaagcatgagacatgtgtttattttaagtacatgctagtggctggctttcttattttcacctagctttgtacaattgtacagaattcattaaatgcttaatagaaacactcacgcccccctactcaactccaagcagggagtggggctaaaaggataactcagttgctcataaagaacacacaaaaattaaatcctagaaggaagtcggaaaaaagaacaaataataacacaaggcaaactatggtattacagaagtcaaaacttcagggtcttaatatggtgctcactccctgttaagacaaaagtaaataaaactaagagttcctataataggagaacaggaaagaaaggaggacgggagataacatttactcagcacttaacaggtgccaggcactatgcaggtagttttcacttattcttctcaagaactacacatatgaaaatatgcctcaataggtgatcatctacaataagagttaaccactttccttcataaaaatgattccaacagcctaggagtgtattctaatgcacatgcactgtggatgtaaataatcattctgcctaaaatcttgtatttgggactgatataggtcttgggtcacctaggcaacccatccatcttatgaaagatttaacttaggccagacaagataaagggctggactaaggtcatgcttgtttagaagcagagttgagatcaaaccaataatcaacacatcgatatgcccctctgctggtaactgttcagcgaaatttagtaactactaagttaccacctattagtactttattaaaacaatcctaataatcccattatacaaatagcacagaatctcaaaagaataatttgttaatttctatatatttttaaaaccaactgataagcagtaacctgcgtttgaacgtatgtctattgccctgactgctctccacataaagatgccagatgcaaagcaatgttgggggaactgggggtgatcggtcgctgaggtaaagatcgcctcctataaagccccacgttgatgatcctggccctgggctccctgtcccctccgcgatttgtaacccctgagccgggcgggaggacggaggatgagtgtgcagtaaagaggctcccgcgccctcggctcgccgattcccctcgcgacgccgggccggttccgaacgcggaccggaccgttaaggggctgcctgggccgctacgccccgcgcgggccgcccctcccccaccgcggcctgaggagagcggcgctgccggccgggcccccgcggctccccgagcgaacaatacagggggtcccccgcgaggctgaacgccaaggccccgcaccgcgggcctcgcagacagcgtcgagccgcaaggccgcgagagaccaccccgcaggagagcgagtgaggaggcggttattcagggggttcagaggccgccgtggcctgaccgtacctggctccaggtgatgaactcgttagtgtgggtttcctccacaagcgtccacagcttgctgaggaaagccggcacgttcgaactctgcttcattgttaacgcggcgcagggattccaaattctacacccgaacgcggtggtagcggcggcggcagctacggcagcagctccccgagaacgcccacaacgcaggcgcagcagatcttggtccccgcccccccaaccccgccaggcgcgcggcaaggccgagaggccgggcggccgcacgtgacggacaagtctccgcgctccgcctgtgcgcgcagtggttccgcgcctgtcccgtccctggccaatcccaggagccgactgcacgacagagaaaagcgattggctgctgctgacatgaagggggtgggagcagaagggggtgggagcagaagggggcgctgcctcctcatttgccttttatacagaagccttgatggtagcagacttaggcttgggagaccgtgtttggatgtttcacgtggaaacagcttatggtttctgggctgtggctgggaggctacagaaacccttcagggcctttgagtcataagtttggcaggcaaagtgtggtttgcaccagtttagagaaaggatccatttgcataaggaaaaaaccagctctcaagcatgatgtgctaggccccaaattgaaattgtcttaaaaataatgaaacttgttcttacattttcattgggagaaaaagccctctttaaaatatgtttatcaaaaagagcagtttaaataactcactctcgattacttaaaactgtaaaccaggaactgcaattgatatatcatgtgctgtttttaatccagtcatcaagtgcctactctgtacccagaataaaaagaaatagactcatttgtactattttagttaattaaaatagtttttcctgcgtatactttacagatatagtcttttttgcctaagagattggtatagtggaaaaaacaatggaaaaggagtcagtagatctcagtttagataaagcctcttggacatttttctgtatattaaaatacactggttctgtcatttagaacaattccttagccaccagtgccagttttttccatttcttgactgggaataagatctatctttttacccactaagagtgtctttaatactataatggctgtgcaaatgctttgaaaatatgaagtctacaaaattcgactttttttttttacaaaagtcagcatgtgaaggcaaaaacttacaaacaagtcagagataacatacaaaacttcaacataggattggtttacttcttgggtgaatgtaaaatagtacattaaatatatatctatcatttaatggaagatatatgtatatctcttccaatgagcaagtatttagtgaatgctgcctttgtgctcagcactgggatgttggctgaagcaaaatcagatatatggaggcatgcatgtgatagaggaagtaatatttgatgagcccttatatatgccaagggctttacatatattattgaatcctcacaacaacccaatgaactaggttttattatcccattttcccagagaagattctgagactcaaaagttgattaatttcttcagtcacagcaagtaaatgggagagtatttacacccaagctttattgagctcaaaagtatgtgccctttccattgtacaatgatgacactgtttcaaagctcaagatgcttatattcaaactcaagaaacaatatgaccacagtgatcagcactcaatatatacaaaaagagctaaatgttttgtataaaataagtactagataagtttaaaaagacagattagtaggttaaggtggtaaggaaggatttcatggcagatagggaccttaagttgggtcttgaggtacaaatatatttgaatagctaaaaggaagacaacagaatgagcaaaaaccaggaagctaatgatcatgtctgtctatggagggcaacagctcaggaggtaagaatggcagtgtctaaggaggaaatgtggcctactttcatggcattatattattttcttctaaaaaaagaaggtgtgattagatagaagcagaaacttgtctttggacattcaaaggctgggcattcatagggctgggcttagtggggtgccatacttagtttaatgctctgttctcatcctcttgaaattctcagtttttgaacaagggactgtacattttcattttgcaatggatcttgcaaattgtgtagctgattctgtttccaatgtatggca

SEQ ID NO: 585322 - DNA, 4001 bp, Homo sapiens
cttattctggacatagtcccttccaagttcaagatggccagagtaaaacccatctttttggaatagctgcaagtttacccccttcaatagtagtccccaacaaaggccaaaccactcctttcccctccttctagagtatcaaaaaaaaaaaccatgccaaatgtggaaaccagagcacctacatcagaagcattagagatcaactcccgaaggaaaatctccttgttggaatagaaggtattgatgatgagggacatgagttgggcaatttctgcctgaaaggcaaaagtctccacctcctcctctccatggtgcacttcctcaggcatctaaaataaaaatctcattaattacaaaagaacactaaggccccatgtttaaaaatcctaaaggtcatatcatttgttaggaccttagacagtgagttcagactggtttaaccggagtactatcccttcccaagactaaaaatgcattctcttaaagatctcagactacacactaagtgggaggcctgaaaattcagaaggaaaaagaaaataagctaaatattcttcaaccaaatgtcacagaacccacctacttaaagaatggtgaccagcagcctcagcatcatctggtagtatggcagaaaaatcataatgttggtccaacccaggtatctagagatcccaagtaatccttacacaaatttaaatgtgaaaatcactacctacagttctttatttgggggagatcaaagtgactagtttaagataaaaatggcactaactttaaactgctccccctgaggtgtcagttcctaagaccagtccaagggcgggacactcctgccccatagggcagggaggaataacctgggatccatacgatacccaccggaggagcaattaaatccggacaaagaattcttaagccaaaagctccaccacgaccctttcacagcacaaaattacagaacaggaccaaacccaagaaagatggtggccgtagccaccaggccgacactcgtcactgccggacatgcgtcggccaggaccacgcgaggagggggcgccgcagtgcaccctccctcgccccagcatccgggcactggggcggggcgccagaatccagaagcttccagaacaatctcagctctcgaggaagggcggaggaaggagcccatgaatcttccagaacctgctcccctccccgcccctcctccaccgggactgcaagaaagatctggaaggagggagtatcgggtgctggagaccgaaagctctcttcccacaccgtcaaccctccctcacagaaacaaagcacccaagaaggctttaacaacgcgtccgataagagaggtgacaaagccagtcccacaaggccgtgctgagtcacccgagcgggcacccccgccaccctgcggtccccctccgacgccccgtagccgcgtccggaagtggaggggcaaaaatggcagcgtcccgggccgcgcggccaccacgtgcagctgccagccgcccactgccccaaccccacagcccacctcgctacggccagcaggcgccgagagaaagccccaccccccaaacacactagagaaaaccgaggaggactcaaaaaacctcacccaccactaccctcaccctataaaaatccagagcgttatccacaagccaccccgacatctagactaaggctccctaaaggacagaaaaaaacaaaaacaacacgaatacagcactaaagggaaagaagcctagcggagatctcagccttaccttgaaaagaaaaggattatacgtaatagtgagcaacgtaggcttgctttccgatacccagacagtcccaacactgcgccggagtgactcgagagagctactgcgtgccccaagtcgccctatataaggcgaagcacagtacagccgccctcctgtagatccctccgccttaaaggagtatgattgtcaaccccgcacctgccgccaccagcccaccttgacgtcatggtccgaaaaaaagagggggcggggaagaacccaagcaacggatccgcccacacatttgcttgtgatcacagccccatagtttcacgtctaggacatgactccatcaagagcggggatgaggagtgctcatttggcataaacggtgtctctacgggcgaggaacccactgacctccctaaacacttgtggggcaggcgtccccacacccaagggcgggactgggggggacaccgaaaaagagcggaggcagctaaccacgcggaccaccgctcccagacccaatcttcttcctagcatctgccctacacatctcgcgtcccgacagagggactggcattcgggacccaaccttgggtagccccagatcccgactctcgcaggagtagaggaagggcggagggttcgcgctgaggggcagctcagcgtagggggagggcgccggccggggctggcggggactctttgccgacatgcggcggaaggcgcggcggcggcactgcggcatttccagcagtttccaggcctgtctcggcggtcccgccccctccccgcgaggctccgcctctccggctgcggccggggcagggtttttgcagcgaccccacccggcgacccgctctgacctgtccgagagacgcgggtaccagcccaatcctcagggatgggatggagggttggggagggatcggctgacccctccttccccgcgtcaatcacacaacacccaggcacctggggcggctctgcgggcgtacacttttgcagactgagagtggagtacctgcgggggggacccccctctagcccctgcggccgccacgtacacggagcacggggacatgcgccctccctacgcaggcacgtcaagccctttctcaagctggttcgctttttttccgcccacttcgctcctgcagccatttggacctgggaaggagggagtctctgggaaccagtgcagggcagccggagctcttggaggccgcgtgacgatgccggccacagagcggctggccaagttgttccccttcagccttggcaccagagcccctaggccatgcccctggccagtgagctgccgtgtctggcctggctcagccgttttgcctgccctccagttggcaagctgtccttgcctttccaaggcctcatccgaaagcctgctggacccacaacccctccaggagagaatagccactccctgctctgtgccctgtagatgtccatctgctccccttcctggcccacccctgggatgcttgggaagagtttccccacagccacccacatcgtcctccctcaccagccctgttgttacccagtctacgattcgttaacaagttttgttcatgtgttgaataccaaagaacaaagggtgtcccttgctttcctcttctttgtccctgtccacttcgccatgcctgccatcaccatcccgattggatatcctttctccctttcattatggtctgcaaaaagcctatggctgggagaagtctataagaaggggcgttgggtgctctattcctgaccaaaaccgcaaaccagtgggagcgtgatcccttaacgtgtcctctccttctaagcagagctcattaaaaatctgctccccagttcacagagagcattcacaaactctcactctcctgtgagcggatgaaagtcagtgtgcacattctgtcaacagggaagtggcttcagtgactcccaaggcccgtctactcagagtccttgctgcactagctccctttctgctccagaaatggagcagggatgtgatctcacccctaggacctaaatccaaagcaggaatcactcctgtggatgggcttcccctgagctggatcctttctgtgtcaagactcgacggcttcctgaagactttctaaatgggaaaatctcaaatgttacaccagcatagaaattccactttctctgctgggcacagtggctcatacctgtaatcccagcactttggaaggccgaggtgggtggatcacccgaggtcag

SEQ ID NO: 585323 - DNA, 4001 bp, Homo sapiens
gtgtcagttcctaagaccagtccaagggcgggacactcctgccccatagggcagggaggaataacctgggatccatacgatacccaccggaggagcaattaaatccggacaaagaattcttaagccaaaagctccaccacgaccctttcacagcacaaaattacagaacaggaccaaacccaagaaagatggtggccgtagccaccaggccgacactcgtcactgccggacatgcgtcggccaggaccacgcgaggagggggcgccgcagtgcaccctccctcgccccagcatccgggcactggggcggggcgccagaatccagaagcttccagaacaatctcagctctcgaggaagggcggaggaaggagcccatgaatcttccagaacctgctcccctccccgcccctcctccaccgggactgcaagaaagatctggaaggagggagtatcgggtgctggagaccgaaagctctcttcccacaccgtcaaccctccctcacagaaacaaagcacccaagaaggctttaacaacgcgtccgataagagaggtgacaaagccagtcccacaaggccgtgctgagtcacccgagcgggcacccccgccaccctgcggtccccctccgacgccccgtagccgcgtccggaagtggaggggcaaaaatggcagcgtcccgggccgcgcggccaccacgtgcagctgccagccgcccactgccccaaccccacagcccacctcgctacggccagcaggcgccgagagaaagccccaccccccaaacacactagagaaaaccgaggaggactcaaaaaacctcacccaccactaccctcaccctataaaaatccagagcgttatccacaagccaccccgacatctagactaaggctccctaaaggacagaaaaaaacaaaaacaacacgaatacagcactaaagggaaagaagcctagcggagatctcagccttaccttgaaaagaaaaggattatacgtaatagtgagcaacgtaggcttgctttccgatacccagacagtcccaacactgcgccggagtgactcgagagagctactgcgtgccccaagtcgccctatataaggcgaagcacagtacagccgccctcctgtagatccctccgccttaaaggagtatgattgtcaaccccgcacctgccgccaccagcccaccttgacgtcatggtccgaaaaaaagagggggcggggaagaacccaagcaacggatccgcccacacatttgcttgtgatcacagccccatagtttcacgtctaggacatgactccatcaagagcggggatgaggagtgctcatttggcataaacggtgtctctacgggcgaggaacccactgacctccctaaacacttgtggggcaggcgtccccacacccaagggcgggactgggggggacaccgaaaaagagcggaggcagctaaccacgcggaccaccgctcccagacccaatcttcttcctagcatctgccctacacatctcgcgtcccgacagagggactggcattcgggacccaaccttgggtagccccagatcccgactctcgcaggagtagaggaagggcggagggttcgcgctgaggggcagctcagcgtagggggagggcgccggccggggctggcggggactctttgccgacatgcggcggaaggcgcggcggcggcactgcggcatttccagcagtttccaggcctgtctcggcggtcccgccccctccccgcgaggctccgcctctccggctgcggccggggcagggtttttgcagcgaccccacccggcgacccgctctgacctgtccgagagacgcgggtaccagcccaatcctcagggatgggatggagggttggggagggatcggctgacccctccttccccgcgtcaatcacacaacacccaggcacctggggcggctctgcgggcgtacacttttgcagactgagagtggagtacctgcgggggggacccccctctagcccctgcggccgccacgtacacggagcacggggacatgcgccctccctacgcaggcacgtcaagccctttctcaagctggttcgctttttttccgcccacttcgctcctgcagccatttggacctgggaaggagggagtctctgggaaccagtgcagggcagccggagctcttggaggccgcgtgacgatgccggccacagagcggctggccaagttgttccccttcagccttggcaccagagcccctaggccatgcccctggccagtgagctgccgtgtctggcctggctcagccgttttgcctgccctccagttggcaagctgtccttgcctttccaaggcctcatccgaaagcctgctggacccacaacccctccaggagagaatagccactccctgctctgtgccctgtagatgtccatctgctccccttcctggcccacccctgggatgcttgggaagagtttccccacagccacccacatcgtcctccctcaccagccctgttgttacccagtctacgattcgttaacaagttttgttcatgtgttgaataccaaagaacaaagggtgtcccttgctttcctcttctttgtccctgtccacttcgccatgcctgccatcaccatcccgattggatatcctttctccctttcattatggtctgcaaaaagcctatggctgggagaagtctataagaaggggcgttgggtgctctattcctgaccaaaaccgcaaaccagtgggagcgtgatcccttaacgtgtcctctccttctaagcagagctcattaaaaatctgctccccagttcacagagagcattcacaaactctcactctcctgtgagcggatgaaagtcagtgtgcacattctgtcaacagggaagtggcttcagtgactcccaaggcccgtctactcagagtccttgctgcactagctccctttctgctccagaaatggagcagggatgtgatctcacccctaggacctaaatccaaagcaggaatcactcctgtggatgggcttcccctgagctggatcctttctgtgtcaagactcgacggcttcctgaagactttctaaatgggaaaatctcaaatgttacaccagcatagaaattccactttctctgctgggcacagtggctcatacctgtaatcccagcactttggaaggccgaggtgggtggatcacccgaggtcagtagttcacaaccagcctggccaacatggtgaaaaacctcgtctctactaaaaattagctgggcgtggtggcacatgcctgtaatcccagctacttgggaggctgaggcaggaagattgcttgaactctggaggcagaggctgcagtgagctgagaccatgccattgcactccagcctgggcaacaaaagagaaactccgtctcaaaaaaaaaaaaaaaaaaaaaagggggctgggcgcggtggctcatgcctgtaattccagcactttgggaggccgagtccagcggatcaccaggtcaggagttcaagaccagcctggccactctggtgaaaccttgtctctactaaaaatacaaaaattagccgggcgtggtagcgcgcctatagtccccgctacttgggaggctgaagcaggagaatcacttgaacccgggcggcagaggttgccgtgagccgagatcacgccactgcactccagcctgagcgacacagtgagactctgtctcaaaaaagaaaaaaaaaaaagaaattccactttctcttccaggaagcctttcaggagaccgcctacctgtgtccacaagctccatcgttttccactcattgacactcactaagcctccactgtgtggagatcctggggatgcagagatgcatacacaggactgggagcccttaacccactggaggctgcagcagccaagtgtgaaccataggaggatgggagaagccgcagaggccctcagctcagcttgggaaagggagcagtcttaggaccatgcctagccaggc

SEQ ID NO: 585324 - DNA, 4001 bp, Homo sapiens
caaggtgttggcgtccagccacgagatgacctcttgacacttgtccagcaccttcttcttgtccgcctcgctgatcttgcccttgagcccctcatcctccacggcgctcttcatgttgaaggcgtaggactccagggcgttcttggctgacaccctctcgcgctgcacctcgtcctccgctttgtacttctccgcctcctgcaccatgcgctcgatctcctccttgctcaggcggcccttgtcgttggtgatggtgatcttgttggccttgccggtgctcttgtccgtggccgtgacgttcaggatgccgttggcatcgatgtcgaaggtcacctcgatctggggcacgcccctgggggccggagggatgccgctcagctcgaagcgccccaacagattgttgtctttcgtcatggccctctcgccctcgtacacctggatcagcaccccgggttggttgtcggagtaggtggtgaagatctgcgtctgcttggtggggatggtggagttgcgcttgatcagggcagtcatcacgcctccggccgtctccagccccagcgacaggggagccacgtccagcagcagcaggtcctgcacgttctcggacttgtcccccatcaggatggccgcctgcaccgccgccccgtaggccacagcctcgtcggggttgatgctcttgttcaggtcgcgcccgttgaagaagtcctgcagcagcttctgcaccttggggatgcgggtggagcccccgaccaggaccaggtcgtgaatctgggccttgtccagcttggcgtcgcgcagagccttctccacgggctccagggtgcttcggaacaggtcggagcacagctcctcgaacctcgccctggtgatggacgtgtagaagtcgatgccctcaaacagggagtcgatctccaggctggcctgggtgctggacgacagggtcctcttggccctctcgcaggcggtgcgcagccgcctcacggctcgcttgttctggctgatgtccttcttgtgttttctcttgaactcctccacgaagtggttcaccagcctgttgtcaaagtcctccccacccaggtgggtgtccccggccgtggccttcacctcgaagatgccgtcgtcgatcgtcaggatggacacgtcgaaggtgcccccgcccaggtcaaagatgagcacgttgcgctcccccttgcccgttctgtccaggccgtaggcgatggcggcggccgtgggctcgttgatgatccgcagcacgttgagccccgcgatcacacccgcatccttggtggcctggcgctgcgagtcgttgaagtaggccggcacggtgatcaccgcgttggtcaccgggtagcccaggtacgcctcggcgatctccttcatcttggtcagcaccatggacgagatctcctcggggtagaatgccttggtctcccccttgtagctcacctgcaccttgggcttgtctccgtcgttgatcacctggaaaggccagtgcttcatgtccgactgcaccaccgggtcgccgaacttgcggccaatcagccgcttcgcgtcaaacacggtgttctgcgggttcagcgccacctggttcttggccgcatccccgatgagccgctcggtgtccgtgaaggccacgtagctgggggtggtgcggttgccctggtcgttggcgatgatctccaccttgccgtgttggaacacccccacgcaggagtaggtggtgcccaggtcgatgccgatcgccgcggctttggccatgccggttccctgctctctgtcggctccgctctgagattgggggctggaaacggaacactggatccgcgagaagagctcggtccttccggacgccggaaactcgacgcgccggtgcctgcagccgcacaggttcgctctgggaagccttgggacaacgggagtcactctcgaaaaaggtagtggactgtcgcagcagctcctcaggctagccgttatccggaccgcttgcccctgggcttttataagtcgtcacggagacccgccttttcccttctgagccaatcaccgagctcgatgaggctgccaggtcgggaatattccagggttttcgcctcccgtcctgccccccagccttccttggaccaatcagaggccagagtgccgccccctgctcagaactctccagagtcttctgggattcactggaggggacagggaccctgagaggaagggggagtggcggtgggaagggtgttggtctccatggcgatgctgaccgcctgcgcttcagcgcctaattgacaggaagggtcggcgctgggcttttaattgtgggggcttgctgggcctgcgcagttgtgggcagggggctggtgcggggagcgggttacgcgcgtccaggggagggtgggggcgtttgtgttgacaccgcccggccacgttacaatggagatactgtctctgacctcatgggccagtttggaaaaagattactgagttggagccgtctcaaatttgcagggagggacggggtggggggtggggggaccccggttgtgcagtttgatattgagggagcccccacctactcgctggggctgcgtaatctggacgtttccaaactgaagcgaaggcgtcgggagactaggtgagccagtagggatctgattgattgtgaacctgaaaggctcagtaggtccttgtttgggaaagtactggaaagttccctagttggtttaagcctgaggtatgtgggcgttggctgatccgggtaggaggagcacttggggaaagctaagatggcttcagattgattggtcggagcagccagaatgggggaggcgggggaagggagtgcggcctgtcggggaaatggggaggcggggaaggcggggtaagggggaggcggggtaactgggaagcgggggaaagggagtgcggcctaggaatctgcggtgtggagagggatagacactaaaccctttattttatttttatttatttatttttaattttttttttttttttgagacggagtctcgctctgtcgcccagggtggagtgcagtggcacgatcttggctcactgcaagctctgcctcccgagttcaggccattctcctgcctcagccttccgagtagcagggactgcaggcgcccgccaccgcgcccggctaattgctccacctcccgggttcaagctattctcctgcctcagccatccgagtagctggaactactggcgcccgccaccacgcccagctaattttttctattttttagtagagacgaggtttcaccgtgttagccaggatggtagccaggatggtctcgttctcctgaccccgtgatccgcccgcctcggcctctcaaagtgctgggattacaggcgtgagccaccgccccccgcccttaaaccctttattgatcagttattggctccagaaaacaggagttttatttaggagaaggatacagatactgtctggagtgccatgtcgtttgagaaaactggaaggcttgtggttttctagcagtcatcttcagcctgactggaatttactgccggtgaacccctaatagagaatattatcccaggaaggcagcagaactcaagtgtggaggctgatgtctcttgaagagaccagaatgtacactactcttgggtcataaagagacagaatcccacagtaaaatatataggaacaggacagtagaattaggtcacttgggaaattgaaaacaatatacagctacttgcttcccaacttctttgagtagctgagaatacttttgtctaccctgtccaaaaagcagtctgccatgacagtagcgtctccatgtatttgtataggcttgctcatagcaacattattctgtaaattctgtaatctgtatccatcgagagatagataagcaaaatgtatataggccgggtgcggtggtggctcatgcctgccatcccagaacttagggagaccgaggcgggcggatcacttaaggttaggagtttgagaccatcct

SEQ ID NO: 585325 - DNA, 4001 bp, Homo sapiens
cttgtgctcaaactcgtccttctcggccaaggtgttggcgtccagccacgagatgacctcttgacacttgtccagaaccttcttcttgtccgcctcgctgatcttgcccttgagcccctcatcctccacggcgctcttcatgttgaaggcgtaggactccagggcgttcttggctgacaccctctcgcgctgcacctcgtcctccgctttgtacttctccgcctcctgcaccatgcgctcgatctcctccttgctcaggcggcccttgtcgttggtgatggtgatcttgttggccttgccggtgctcttgtccgtggccgtgacgttcaggatgccgttggcatcgatgtcgaaggtcacctcgatctggggcacgcccctgggggccggagggatgccgctcagctcgaagcgccccaacagattgttgtctttcgtcatggccctctcgccctcgtacacctggatcagcaccccgggttggttgtcggagtaggtggtgaagatctgcgtctgcttggtggggatggtggagttgcgcttgatcagggcagtcatcacgcctccggccgtctccagccccagcgacaggggagccacgtccagcagcagcaggtcctgcacgttctcggacttgtcccccatcaggatggccgcctgcaccgccgccccgtaggccacagcctcgtcggggttgatgctcttgttcaggtcgcgcccgttgaagaagtcctgcagcagcttctgcaccttggggatgcgggtggagcccccgaccaggaccaggtcgtgaatctgggccttgtccagcttggcgtcgcgcagagccttctccacgggctccagggtgcttcggaacaggtcggagcacagctcctcgaacctcgccctggtgatggacgtgtagaagtcgatgccctcaaacagggagtcgatctccaggctggcctgggtgctggacgacagggtcctcttggccctctcgcaggcggtgcgcagccgcctcacggctcgcttgttctggctgatgtccttcttgtgttttctcttgaactcctccacgaagtggttcaccagcctgttgtcaaagtcctccccacccaggtgggtgtccccggccgtggccttcacctcgaagatgccgtcgtcgatcgtcaggatggacacgtcgaaggtgcccccgcccaggtcaaagatgagcacgttgcgctcccccttgcccgttctgtccaggccgtaggcgatggcggcggccgtgggctcgttgatgatccgcagcacgttgagccccgcgatcacacccgcatccttggtggcctggcgctgcgagtcgttgaagtaggccggcacggtgatcaccgcgttggtcaccgggtagcccaggtacgcctcggcgatctccttcatcttggtcagcaccatggacgagatctcctcggggtagaatgccttggtctcccccttgtagctcacctgcaccttgggcttgtctccgtcgttgatcacctggaaaggccagtgcttcatgtccgactgcaccaccgggtcgccgaacttgcggccaatcagccgcttcgcgtcaaacacggtgttctgcgggttcagcgccacctggttcttggccgcatccccgatgagccgctcggtgtccgtgaaggccacgtagctgggggtggtgcggttgccctggtcgttggcgatgatctccaccttgccgtgttggaacacccccacgcaggagtaggtggtgcccaggtcgatgccgatcgccgcggctttggccatgccggtgccctgctctgtgggctccgctctgagactgggggctggaaacggcggacgggatccgcgacaagagctcagtccttcggaacgccggaaactcaacacgccggtgcctgcagccgcacaggttcgctctggaaagccttgggaccgcgggagtcactctcgaaagacgaagcggaccctcgcagcagctcctcaggctggccgttttccggaccgcgcgcccctcggcttttataagtcgtcgtggagacccgcctttccccttctgagccaatcaccaagctcgatgaggctgccaggtcgggaatattccaggggtttcgcctcccgtcctgccccccagccttccttggaccaatcagagggcagggtgccgccctctgctcagaactctccagagtcttctgggattcactggaggggacaggggccctgagagaaagggggagtggtggtgggaagggtgttggtctccatggcgatgctggccgcctgcccttcagtaggtaattgacaggaagggcccgctctgggcggtgcgagattggtcggatgactttggagacaaccagaacccgaaagttaccttgtttctcgaaggaggcggtgcatcgatgtgcctgggaaactctgattggactgtgtctgtgaaggacggagcagccttgggtcctttctccgaggcacctaatggcctagtctgcctgagaaacggaccggctctcccggatgttttttccgtcttaatgggaaggagaaggaaagagataatgcaatatagtttttgacataatctttaacctacaaggatagaacaactgggaataggagcctttaaattttcacaaggaaagcagttgtgtaaacaggcagttcttagcaagacaggggcacccatccaaggaggaagggaggcgctggtcgggtaatgggagcagtgggtccgccgcacccctgtccccgccctcagccgctcccctcagctgcaaccaggagttagaaaaaaattttccttagtatgtaggccgtccttaaggcatttgggattcctccatttccctccccattcctagcttggggtctgggacacctccttcctactttctcaattcctggttcactcctggacggtgtgtagaagtaggacctcacagtcccgagtaagattttctgtctgtccctgaaacccctaggctgttaccgtttttaggtcaaatttaacaagatggtgaccctgggagggaggtgcggggggtgtttagctctctttaacatcacatactacagctgtttggcaggtggccctctttaagcaaactgtgtggagtgatgctggaaagcaggaggggttgggacccaggttctagttactagctcctcttaacacctcaggttatgtgtcttaagtttgttgttttcgttttgagacagtctcgctctgtcgcccaagctggagtgcagtggcgtgatctcggctcactgcaacctccgcctcccgggtttaagcaattctcctacctcagcctcctgagtagctaggattacaggcgtgcgccaccacgcctggctaatttttgtatttttagtagagacagggtttccccatgttggtcaggctggtctcgaactcctgacctcgtgatccgcccatgttggtcaggctggtctcgaactcctgacctcgtgatccgcccacctcgggctcccaaagtgctgggattacaggcgtgagccaccattcccggcctgttgtttttgtttgtttgttttgagactgagtctcactctgtcgcccaggctggagtgcagtggtgagatctctgctcattgcaacctctgcccctggggttcaaacaattctgctgcctcagcctccccaatagctggaattacaggatgtgccaccacgccgggctaatttttgtatttttaatagagacagggtttcgccatgttggccaggctgaatgtgtctaagtttttatcctagattccaacttcctgcggattctccttcctcctgttttaaatacggttgcatttagtaatttactttccctttgtttttttccttcattcttagtgtgaatgcaagaccctttgttaggcgtctgaaaggaaaatgtgagggggttgaagcaatagtactgtgtttacaacctaccacaaaaaaaaaaaagaaaagaaaaaaaaaatagcctcattgccat

SEQ ID NO: 585326 - DNA, 4001 bp, Homo sapiens
aacctcctcccacctccaagtcaccaagtgttaggattataggcttgagccaaggcgcccgacctcttttttctatctctatgaatttgactactcttgtaacttcatataagtggaattatacagtatttatccttttgtgactttgcttatgtcacttagcttatgtgcacaggtttcatccatgttgtaacatgtcacaatttccttcctaaggctgagtaatattcatatttatataccactgtttttgattttgttttgagacagagtctcactctgttacccaggctggagtgcagtggcatgatcttggctcactgcaacctccacctcctgggttcaagctaattctccagcctcagcctcccgaggagctgggactacaggcgtgcactgccacgcccagataatttttgtatttttagtaaaaacagagtttcaccatgttgaccaggatggtctcaaactcctaaccttaagtgatccgcccgcctcggtctccctaagttctgggatggcaggcatgagccaccaccgcacccggcctatatacattttgcttatctatctctcgatggatacagattacagaatttacagaataatgttgctatgagcaagcctatacaaatacatggagacgctactgtcatggcagactgctttttggacagggtagacaaaagtattctcagctactcaaagaagttgggaagcaagtagctgtatattgttttcaatttcccaagtgacctaattctactgtcctgttcctatatattttactgtgggattctgtctctttatgacccaagagtagtgtacattctggtctcttcaagagacatcagcctccacacttgagttctgctgccttcctgggataatattctctattaggggttcaccggcagtaaattccagtcaggctgaagatgactgctagaaaaccacaagccttccagttttctcaaacgacatggcactccagacagtatctgtatccttctcctaaataaaactcctgttttctggagccaataactgatcaataaagggtttaagggcggggggcggtggctcacgcctgtaatcccagcactttgagaggccgaggcgggcggatcacggggtcaggagaacgagaccatcctggctaccatcctggctaacacggtgaaacctcgtctctactaaaaaatagaaaaaattagctgggcgtggtggcgggcgccagtagttccagctactcggatggctgaggcaggagaatagcttgaacccgggaggtggagcaattagccgggcgcggtggcgggcgcctgcagtccctgctactcggaaggctgaggcaggagaatggcctgaactcgggaggcagagcttgcagtgagccaagatcgtgccactgcactccaccctgggcgacagagcgagactccgtctcaaaaaaaaaaaaaaaattaaaaataaataaataaaaataaaataaagggtttagtgtctatccctctccacaccgcagattcctaggccgcactccctttcccccgcttcccagttaccccgcctcccccttaccccgccttccccgcctccccatttccccgacaggccgcactcccttcccccgcctcccccattctggctgctccgaccaatcaatctgaagccatcttagctttccccaagtgctcctcctacccggatcagccaacgcccacatacctcaggcttaaaccaactagggaactttccagtactttcccaaacaaggacctactgagcctttcaggttcacaatcaatcagatccctactggctcacctagtctcccgacgccttcgcttcagtttggaaacgtccagattacgcagccccagcgagtaggtgggggctccctcaatatcaaactgcacaaccggggtccccccaccccccaccccgtccctccctgcaaatttgagacggctccaactcagtaatctttttccaaactggcccatgaggtcagagacagtatctccattgtaacgtggccgggcggtgtcaacacaaacgcccccaccctcccctggacgcgcgtaacccgctccccgcaccagccccctgcccacaactgcgcaggcccagcaagcccccacaattaaaagcccagcgccgacccttcctgtcaattaggcgctgaagcgcaggcggtcagcatcgccatggagaccaacacccttcccaccgccactcccccttcctctcagggtccctgtcccctccagtgaatcccagaagactctggagagttctgagcagggggcggcactctggcctctgattggtccaaggaaggctggggggcaggacgggaggcgaaaaccctggaatattcccgacctggcagcctcatcgagctcggtgattggctcagaagggaaaaggcgggtctccgtgacgacttataaaagcccaggggcaagcggtccggataacggctagcctgaggagctgctgcgacagtccactacctttttcgagagtgactcccgttgtcccaaggcttcccagagcgaacctgtgcggctgcaggcaccggcgcgtcgagtttccggcgtccggaaggaccgagctcttctcgcggatccagtgttccgtttccagcccccaatctcagagcggagccgacagagagcagggaaccggcatggccaaagccgcggcgatcggcatcgacctgggcaccacctactcctgcgtgggggtgttccaacacggcaaggtggagatcatcgccaacgaccagggcaaccgcaccacccccagctacgtggccttcacggacaccgagcggctcatcggggatgcggccaagaaccaggtggcgctgaacccgcagaacaccgtgtttgacgcgaagcggctgattggccgcaagttcggcgacccggtggtgcagtcggacatgaagcactggcctttccaggtgatcaacgacggagacaagcccaaggtgcaggtgagctacaagggggagaccaaggcattctaccccgaggagatctcgtccatggtgctgaccaagatgaaggagatcgccgaggcgtacctgggctacccggtgaccaacgcggtgatcaccgtgccggcctacttcaacgactcgcagcgccaggccaccaaggatgcgggtgtgatcgcggggctcaacgtgctgcggatcatcaacgagcccacggccgccgccatcgcctacggcctggacagaacgggcaagggggagcgcaacgtgctcatctttgacctgggcgggggcaccttcgacgtgtccatcctgacgatcgacgacggcatcttcgaggtgaaggccacggccggggacacccacctgggtggggaggactttgacaacaggctggtgaaccacttcgtggaggagttcaagagaaaacacaagaaggacatcagccagaacaagcgagccgtgaggcggctgcgcaccgcctgcgagagggccaagaggaccctgtcgtccagcacccaggccagcctggagatcgactccctgtttgagggcatcgacttctacacgtccatcaccagggcgaggttcgaggagctgtgctccgacctgttccgaagcaccctggagcccgtggagaaggctctgcgcgacgccaagctggacaaggcccagattcacgacctggtcctggtcgggggctccacccgcatccccaaggtgcagaagctgctgcaggacttcttcaacgggcgcgacctgaacaagagcatcaaccccgacgaggctgtggcctacggggcggcggtgcaggcggccatcctgatgggggacaagtccgagaacgtgcaggacctgctgctgctggacgtggctcccctgtcgctggggctggagacggccggaggcgtgatgactgccctgatcaagcgcaactccaccatccccaccaagcagacgcagatcttcaccacctactccgacaacc

SEQ ID NO: 585327 - DNA, 4001 bp, Homo sapiens
cttcggcactagcacacataatggtttgtttgttagagttgtggcttgacaatcgctaaacaggaattacaaaattgtaaatctgcagaaaacaaacaatcataggtgttgattctcagtttaacactcctcatctcccattcccacccacccacccccatatagtttcaagtataataaaaatagagatctcagcatcagaattttgctgttaactcttcaaggtttctctgcgccatccaagccacacatagggtttgaagcaccaaatccacaagtttctccaaccaagtttaaatagacaaaaagtgaagactgaatgatgccaaagtaactgttcttaaattaagctgtaacacaaagttctccccccaaaaacacagggcattaagcgtctagttcaagtactgccaggctgtatgtagatctgtctcagacaggcttcagacaacaattacaagtacactgcttctagtgggcattatccacgataccaaagcagggcagggattcccttccattatcaatttttaaaagttgcaaccccctttgggattggctgccgcagggtcagtgctgagcccggggcttgaggggaggaagtgagcctcctcctgggcagggaagctctacatttagtttcaacacttctcctttcagagctctctctcaggactattctggcttctcaggatccattgcccttgcccaggagagagagcctcgctgggacccagaaaccgcgaaagaagattcgacctacctgtggaaccagacacaacttggtccccaaaggtcgcttaggcgaccccactgcaaacggcaagtcaacttgtgcacttaaaacgtatcagtttatggaatgcttgtttaaagtcctcattggacatggtatagattatggggttgatgagggagttgagatagcccagccatgtgaagaagtcaaagatggctaggtggaaccagcaggcatctttgcagataggcatcactagggagatgatgaagaagggtagccaacacacaataaaggctcccaaaatgatccctagggtcttggtggctttgcgctccctagcggccatgagtttcttcttttccagcagggcgtcggagactcgcactttgacttggttcacatacacaggagatccggattcgctgggcacgtcgggaacccgcgagttaatagaggtgaccgaggacgtggacccgggggagtcggttatcagctgggctcgggtcaagcgcttgccggtcctgttgggcgtctgtttcaaaatccgggagcgggcttctacgtagatgcggccatagagggcgatgaggagcagggtggggaagtagaaagcacccaccgtggagtagaccgtgtagaggatgtggtcggtgttcaccacgcattccgacacctcctcttcggccttagcctgacgccagaagaagggcggcagcgagatagagatggagaagacccacaccagcgcgatcatgaccgccgccctcttgggagtccttttagctgagtactccacggcgtccgtgatggcccagtagcggtccagggcgatgacacagaggtgcaggatggaggcagtgcaacaagtgatgtccgacgacagccagaagtcacagaccacctggcccagtgtccagcggccggtgacagtgtacatggtgctgatgggcatcaccaggatggacacaagcaggtcggtgaccgccagagaggcgatcaggtagttagccggggtgtgcagtttccgggtccggtacactgtggcaatcacaaaggcattggagagcgtggtggccaaggtgatgagcgccaatagcataaccagcagtactttccagggtagggagatggagtcctggtaaatgtagtccttggcgctgcagttttgggagggagcagaggataagttggcttgaggaacccaggtctcggagcccgcgggcggcggtggagcgcactgagcacccggttcctccatggctctcctcgccccagctccggagcgcagctcttgggcatggagcggacgaaggagagggcggaaggaccgtggcgatcgcaggtttgtccccagttgatagttccgtgagttcctcaattattcctccgcccaggttcacagctgaaactagaggtcatgggtgcggcagccaaggcaggcgggcgcctcccctgcacttccagagcgcctagctaagccgccgcgtctgtggttgttcctctccacaccgggtcttagacctgggttgctaagagctggcccaccgagccctgctccgctccagctccctggaggcgtctagtgcaggagggtgaagtactgcttgaggagaaggctttgaccaaatgggatctcttaccccagttgcttgaggctgagcgtctcctaacctggacgcttttggatctgcagactttgcccacaggagtttcctaggtgtagagaccaaagcttgcaggccagcgagaggtcccgagatcttgcattcccacccctcgccccaagctggggcacttttggggggctgcagcggccgccagagctgggtggggtgaagtctaggagcagcgctgcgccgcgcctcgcgccggagctctgccctccctctcttttcactctctggccactcggacgagctgccccgcggagacggagccataaaaggggggacacgggggctggagttgcggctgctcgggccgcgccgccgccaccgccaccctggtcccacgggagccactcggagccatgccactgggtgcgcgggtctggaggacctggcgcggcacactgggaaggggcaggtgtctgggggagctggagggacgcggcgtgcaccagcccgggagaagcgtgcgagctacggagcagatgggctctttatatagagtccaggtccggtccgccagagcagtgcaactcgtgcggcgcggcgggtgcggacgcccgctccccatcaccttccctttttctctctccctccctcttttccccccgccctgttcctttcctggccaaggaagctcccgccgggtcctaccgccctatctccccgcttcccaccctgggccatcctcccagccctgacaacctggagctgcatttctggtcaggggaagaaggcgtcctgttctcgcctctacggacatcagagcttgctgcgctgacctccagtgagacccatgtccttagccatggtcacaggtttagtccagcagtctggccctaggctcctgcctaccactcccaccctaggaggccagtgttaggcggggaagccctggtctctgacctctccgctctaaaatcatatccagccctgatggccacacccaggttaggaggcaccagtaatatcgctgtagagggcccaatgtttgcattttgtactttgccgtccttaactcttgatacaataaaaactattttttcatctagttttagaaatttgtgtttttcactcaactatgagtcaacagggaaaaagacaagctatctgcgaaaatgtaaaagttatcacaaacagaagccaactgtatgtgaaattaaaccttctgctccaccatcctcttccagctgctcagtgcttcagtgcctctggaaaacagttgccagtaagcgtgttccttccaacagcctacctagaaaggaggtcatcagaattcaagaaaaaagggggatggtggggcggggaggactggaaccatcatcagcaccatcttgtgtgtctcctttgccttcaactaatatgtgggaatgtcagccataagctgcagcatgcaataccagtacctaggtctcatgaccagggacggatcccctgtcctcagtttctcctctgacctcaacagaaacaaatgtagggtagagatgcaaatcagaaagtatgaagaaaagctccaggaaaggacaaggtattttcagctcgaaggattaaatgatccccactacgaattcctagagcctagatccatgttt

SEQ ID NO: 585328 - DNA, 4001 bp, Homo sapiens
tgttttaaatatgatacagaaactgagctgagtcccacttaggaggtgggcttcatcatcacaactccgtgggctggaggctaaagctctgaagggaggaaaaacagaggcaggcatattttgtgcatttgttaaatgggcctcaaatgcctccattcatttatttgttgaagacagggtcatctcatttaattcagcaggaaagcaactgtaccagaaagagaaaagctgtctcaatcttctctgtatttcaaaggtatttcacatatgctcctcatgaaggagaccgcacagggaatcagacccacgtgcctgctttgcctctcttgcgcaggattaagtaagggaagcccctgattcacaagtgcatcctggctgtttaaggttatgcatattgtgtctgaatgtacaactatgataaatatatattctggagcaatgttaaattcagcttaggacgatgtactgcttagagctttgagggaaaacataagaatgataaaatgagcctaaattattttggaaaaaacactgctcccccaacccatttgacgatctattatttcctcctgggctgctccctccccaagagatttggtgcaggaggcaaggaaggacaataagaaaggttaggaagaaacaccttgggatgctgacaccatctgccttatccttctaactcaaggacaagcagcgttgggttgaatacaaggtcctttcttccaaaactgggcacaggcagaaatatacatatagatgcaaaaccactatgatcctgtgataggagctggaatcacttccctttagactcaatttcctttccttttcgttaggtagggggtcagcctctcaccttgcagtattgggtggagatggcttaagaccaaacttctcatcttaactcttacttccaagatttattttgtattttaaaaaaaatgagcctgcctcattacctccacacctgggcattttgtttatcaggactgagcacagtattattttctgagggctggagcaacagtgcagtcctttctaatcaaaggttttttaatcagctggctttgaaatcacacagttcttccggggtccctggagcacaccacctccctgtgatttctactcaagttttccctggccccccccagcacccgttccatacctatttaatctttaagctgcctctaatccttttgcaaggaagcaggatgaaatgctcaaaccacagttatacacaatgttgattctcaggttcacacatttgaggaattgtttgaacaagaaatgctctctgtactataatccagggtgcaggcacggtgcccgggcgaccctcagtctccctccgacaccccgcatcccaactcccgccgcctttgcgcctcaaagctggcaaacatccccaagccagagctggagtacctggagtgggtgggggtaagaagggaagccaaggtcgtcccggaaggtgtgcgcccctcaccttgtggacggtgcgtgcagccgcgccgcactgggcaaaccggcacgtccagctggctccagaagtctcactcggaacccgctcctttttctcctgagctggatcagagcactgcttctctcaacattcgattctggagtacgttgagcccagggcgttctccccgccagcgtccttgcccgcgccagtgcccgccggggtgcggcgagacagaacctgggagcgcggcgcgccgggcagcccgaggcaccgctggtggcaggcgctgcgcttcgccgagtctgggcgcctggactggaagaggaggcgagagggagagagcggggaagaggaggaggaggagcaggagcaggagcatgggcaggggcagtctgctaaatcatctacgcaggtcgcagcctcccgggacaccgtgaacggagaggggggtggtgggtgtgggatgaaaagatgagcccgggtgtgaggcaggtggtattgtgaactggaggtcgcagctccgaggtactccaggtcttgcttaggttataaaagagaaattctggagctgatggcgccttagggctcccggttgcagacactagagggcagggctgtccatgttataaaccgggccagcggggttggaggtgtgggcaagggactcacctcctgagccccttgccggccacagccctggcggagaaggggaaaatagatacaacaagggggcagaccctactcccttcttctgtagcgagcctgggttgaggagggagaggaacggcgggagcagttgacgggtttgcacgctttctctacgcggttccaatggcaaacagaccctctggaggtgcatttcttagccctcctccaggggagattacagtcaacatccacaggatgcctcaaggagagagattacaaggaaggggtgagggagaagtggacgaaaattggggtgggtcaaagtggaaggggggaagagaggtggggaaagcagtgaagaaaaggagacggagagtggagtggttggggctgaaagacctgctgaagcagccttgccattttttttttttttgagggaagtctacctgggcgccatctcaggttgtcagagggctttgtgctcttctgagggtgccaggggctgttctttttgttgttctgctgccgcaaggtcagaaaagttaagctgggagggactttgcagaatcctggcattgctaaaagaagcttccttacggctggttggttattctctgtggagaacttgggtgactcaacattgaagcctaacatggattgagcccctgccattgtaaaaaagaaaatcagattgttcaaactagccataaaatgaactagacaatcttatggagacagtatgatctgtagacagcctgatacacaaaccttagagttgaaaggaccttggaaaccatgtaggcaacttgggtagctgccccaaacacctgcctcacacttttctttctggtttgtagccttatggctgatttgaaaaacactttaagttatttatttattttttgaagtttgacaattctaaaccaaatgaaacccttcttcagttcaaaaagcgagcctgtgtgcccttctcctgccttctagagcgcctctcaaggccagcaggggttgactgatggattatcaggggaatttcactgaacaagagaaaggaaggttggtaaactatagtcttaaattgtgatttgcttctgttaatcccattaaactgagaataggcttaagtagactgaagtctaacaggaggatgaggtggaaatatgttttcctactaaagatgacacatcttgaagtttgtttgatgataaaggtgttatgtaaaaataagcagaacaagaatcattcctcattttaaaaaagaatcttataggactgaagatattttagatatcccaagagagtaagtaaggacattgttctactcttgcaagtttggagttcctccaaaatataaaggaaatatgagtttgttaaattgctttatttaaaattgatttacctattttttggttattacaacataaggaactatggaaacaaatattatacacttggaaactttcctgaacatacctcagaatacccgctttttggcagatgttcagctttatgaagtgtctgattattttcaagctattaattaacttctggcatatattctaccagttttaataaaatcaatgctctcttaatcaagagctgctaattcaatttgtattacccatttgagtttccagtggcctctatgagtgctttaagattgcaggtatatgtaaatcacatccccatttcataatagagaattccttgtcagttagaaaaactataaggattgcctggagccctgggcatctggcataaaaaagtcatcaacttgcagcgggaactcaaaagtcactatgaagaaattaacttatcaaatccactcattcattaattcaaaaaatgttggtaaatatctaccacgtttgaggcatggggcaacttctag

SEQ ID NO: 585329 - DNA, 4001 bp, Homo sapiens
tgaagatgctgtgaaaactgttgaaacaacaacaaaagatttagtacagtgtataaacttggttgataaaccagtggcagggtctgagaggactgttttgaaagaagttctactgtggataaaatacccaaagcatcccatgctaaagagaaatctttcatgaaagtcaatcgatccagcaagttaactactttattttaagaaattgccacagctacctgagccttcaacaaccaccactggaatcagtcagcagctatcaagagggaggtaaagacctcccaccagcaaaaagattatgacttgctgagggctcagatgagcagcagcattttttaccaatgaagtattttaaaattaagatgtgtacattttttagacatagtactattgtactctcaacagactacagtataatgcaaacataacttttatatgtactgaaaatccaaaaaactcatctgtctttattgcaatatttgctttttgcagtggtctggaaccaaacttggagtatctctgagacatgcctatatttccttgatttctaatgtgaatatgatacatgtgaaaaatgaacctaataagcaattcaaactatgtagataataaatctaaaaaccatgtacactgatatattctttgacatatcctatacagaacacggcttaacaaagaatatgtaatgcacacacatgctaaataccttttatcttgcagatatatttagctctctacataagaaatgccctcggaaaacattcatacatattttaaaaggagaactttcccgctttacacagcagcattttataataaaatactgatgcaattgtttcaggattcaaaaatacttatttcattacaaccctgtttttcccccccgaaaaaaagagttgaagaataactttgatagaatcttaagcaggaaaaaaacctgacaaacccaataaacaaaacatgaactacccaactgttttaccaatgctttaatataaattttgcaaaggaggaagggctcaacaaaatatacgccctgcataagtcagtgaaggtccaaattttcaacccaattaactcagggtctgttttagttttgaaaagatcaaaaccttaaaaaaaaaatctaagctggctgaatttttacaaggcaggaatgaaatactgaagagagacatcttcttgaaccaaaacaagctgaagaagagtattgtcccaaatattgcacagggccgtcgtaggatgtatttgctgtccctccaaaaactgcagaagcttccgattgtccacccgcacttgcaccatgctctccaggtctctgttttcaggcacacccacagccgactggggagggtttccaagatttttaaaataactttgaatggacaccacctccgtctctatactcagggtcatcctgccactgaggtttgcttccaccagcacgtgactgcccacgttcgccatcctctccacgatgctcctcagcgtcctccagcgcggcaggcggatgctcgcgtcggaggcgcgcaggctgggcggcaggcagtcccgccacactctcctgggaagcacccgcacgggcagatcgtgcaccacgctgcgagcgcggcccagggacgagaccagctccaccgccaccgtgagggaggggcggcgcttgtgggtcagctgcagcttcagggaggacgcgcccgctgcgcttctcgccgcccgggacaggtgctccgccgtcagctccaggtggatctcatcgagatcttccgagacaccttccatgcgaaactgctggaaggccccctgccgcacctcgcaccacagcctggcctcgtggaggccgccggaacccgcggggccgaagcacaggctgtcagggcgcacgcggagcacgcagaccttcgctagcctcgcgacggtgccgctgacgtgaatgaacagctctagacagcctttgccggtgatcttggcgcgaaacttcatgatgccacagggaaggcagctgggggcctctgagggggattccgcgtgccacaagcccttccggtccgctggggtccgtggcgctgccctccccgccctccctccggccccccagctaggcaggcactcgggttcccggttgcggttgcgggttctgttgtgggttccgcagccctaggcctggagccacggaagggcctcccaacgcccgttctcaccttccctccagccctctcacaaaatgcttccgtttccactccggttataagaagagtaggcattccactgctgaaacttcttagtattctaaacacaatgaagacaaaatcatcactcagataaagaaccacttttaatctctttggtatatacactgattccatcttcatcaatcggcatataagaagatatagttccacgtgtcttatgaaatcatagcataccaggcatacattttacaacctcatcttcacacttaaatatgtaacaggcacctttccatgctggtgaaacaaatctacaccatcttcatggctgctcacttttccagtgtatggagttataacacaaatgacatttggatgatttccaattttttgctattatgaacacaatgaatatttttgtacaaaatagttttgcccatttacccaactatttccttgcattaaattcagaagtgaagtgctggtcaatgaatgcacttttaaaatcctaataaatattctcagactggcctgcagaaagctacatgaacactctagcccaccagcaacactgggtagtagcaatctgttttacctgtagcactctggcaggcaaaaaaaaaaaaaaaaaattcaacttgcactgtgtgtgaattccatcttatgccctttgcatctttttactgagtttatttttcttgattttaagatatctagcaagaacattaaccctctgtccattacatgtactgtaaatatcttccccagtttatcatgtgacttttcacactgtttttggtattctttgcccttgggaaatactgagtattttcatgtcaaacctattgaccttttctctactacttctagggtcatgctttcaaagtcctgtttctggtactttaatgttatctgtttttatgacttagttgtttgactcagttgaaatcttttttggagtaccgaatgcctagctgatacacataattcactaaacaatccacttctccactaacctgaaatgtcaattttgttttagacaaaaattctcatttttgcttgaatgtttcctggccctctctatattttctcccactgccctatcttgaacctgtaccagtgatttaatttctgtattatatttcaatatcgaataggacaatctttcagaacttctctcattctctcacagatactgctccagatgaattctaaaatattttgtcagagtctaaaaataatcttcctggaattctgatgggaattatcaccagcctgatatagtacatacttagacttctttgtttgccgtctagctctaaccacaatgatgtaagttagaggagttcttatctgttccatacactgctgtacacccagcatttagaacagtatttgccatgcaactggtgttcaacacaaatttttaaatgaatgtatgaaatgtataaatttcaagataatttcaggatatttaaaatatatatatatattttatatatatatatatatatattttttttttttttagacgaagtcttgcttttgtcgcccaggctagagtgcaatggcgtgatctcggctcactgcgacctctacctctcaggttcaagcgattctcttgcctcagcctcccgagtagctgggattacaggcgcctgccaccatgcccagctaatttttgtatttttagtaaagacgaggtttcaccatgttggccaggctggtctcgaactcctgatctcaggtaatctgcccaccttggcctctcaaagtgctgggattataggcgtgagccactgcgcccagccaaga

SEQ ID NO: 585330 - DNA, 4001 bp, Homo sapiens
ttttcttagagatttaaaaaaaaaagggcaggcaatccaaagacatacttaggatcttgaattgacaagatgtggtggtaattcccaggtttctggcttggagaacagatagggaaactagaaagaagagtaaggggtcaatactttggaagtgagtaaagcaaaacaaaattaaacaacggaaaaaacacacaaaaattataggtgaaattttgttttatacattatacacagtgctctacataaatataatccttattattgcccctgtaaatatgatcactttcattttctgatgaggagattcatgtgaaagtttaaaaagcctacctaaaataataccgacagaaaagtgctcttgatcccacctattctatgctaccaaactgctctcccaaaaggcagttagaaaaatttcaatgcaagtagtatagtgtagtagaaaaaagtaccatggaattcaattcaaaataattgaattcaaaagcagtttggtagggcagctggagactcaagcgattctgcctcagcctcccgagtagctgggattacaggcacacatcaccatgcctggctgatttttttgtatttttggtagagacggggtttcaccaagttggcctcgaactcctgacctcaagtgatccgcccaccttggcctcccagactgctgggattacaggcatctttttttttttttttttttttgagatggtgccacactcagtcgcccaggatggagtgcagcggcgcgatctcggctcactgcaacctccacctcccgggttcaagcaattctcagcctccccagtagctgggattacaggcgtgagccaccgcgcccggcctaaaaaatttcttgaagtaaactctggtttgactaaagcttctgcaaatatttgcaaatgtaattatttttagaaaccagttttgtcctcatctaccttgcctcaatttctaaaacaaataaaagttaaggaattcaaaatacaaaaagagaaatgatcaagagggggctggcaagcctgtgaatttacaccactttatgggcactgaaacactactactcataaaagtcatatcctttcagtatttctgataaatttcaaatggcctacttcgaggcataagttaaaaggtgctacatgaatctctggctaacacagtcaagttttatgaactacgttggaaaacaggagtcaaggacggcctatgttacctaattcgcagctgaactaaaactctttgagccagacagctctgcctgttacaaaaacaaagggcctgtcttctctgtctctctcaaccctccaccctccaaaaagaatcagttcctttttacatagcaatcaatgtccacttatcagatttcacgacctgcttccccagagtcagtatccccagggtggactcaaacttgtgactccaggaaggggataaggaacatgagcgcccacaggaatggcttcaaatccaagactcgaaggaaagtgacactacataactatcacaactaggaatgcaatgtcgctggagggcgtgtccagcaggacgggagcgtagcgcatcgccgggacaggccattcattagctgaggggggcggtagggaccctggccactcggccctctccgcgccgcctcgcgcgaagcccggcagcctcggggccacagagtcccctccccacggtccccccgcgccgccgtccgcagccacccgcaccctccagaaggcgaatactctccccctgcccccgggctgaagggaagccgcaccgcacggtcgggcagcgccaagccctccctcaccagtcgctagatgaaactgcgccggtggattccgcagggtccacatagagccacaaagggactcatcctcagtgaaggcaataagagaaaccgaacggcgccagaggggccagtccccagacccgggtcagttcggcaggcggctgcaatacagccgctactacaggaatcgggaacggggatgtagaggaagggcccgagcgggcggttcccagtaataaggcgggcgctggttggctggggctcctgtatgtctcttgatgattggctggtgcctgcccagaaggtttcgcgtggcagcacctctgccatggccttttccctggcgccccaaaggaacttgacctcgccggccttggggccgctgactcaggccaggggcggggaaaagaaaaaggccgcagcggggaactctaggccaacaacggtgatgggagtgtccctttcaggccagccatctcgtagttagaaacgtctctctaggtagctggagactcgcgggggaggctaaacccgagtggagaaggagacctggcaggatgccttggacacccggtcgctacgcagcagaagccaagtgcataggcgtcctgcacagaagagtttcctcccatggccttagcagtggggttactgcaaagccaaaggtgtagtctccgtaaacccagcctcacccctctctggatctccatacacccggattatctggcagtcactcccttggtcagaaggcgtcactgccctcttagatcaccaccgtaggactagctgccgacccgggtcacgccactcactgcctgacaccaggcttacactaggctttttccacttgaactctgaatctaaaggccatttagaaagtggtcaagtgaaaaatgctaggagggacagtagccaataatcaatactaggttactgaatgggaaacacactgctgctgaatgcctaatacggtaagcactcagtaaatgattgttcaaggaggtgtagtgtgactcaaaacaaacgacactaagaatcatgagttggctgtacagctctgccacgttgagttttacaagccactgagtcgacctcatctaatctctaaaagaaaggagttgcgcatgtcttaatgcccactgagctctgcttgctctcttttgaagccttttttgtgggagggtaggttactagcccaaagccacacagctgcttagcgaaagagaaagggagactaggacccagccctcctactgcccttcccagcacataattgtttctttgctctttattcttaatgtccttctacaaaacaaaaaccagtttgtaatgtcaaaattgagtggttttgaaaataagcttaagttggccgggcgcggtggctcacgcctgtaatcccagcaatgtgggaggccgaggcgggcggatcacgaggtcaggagatcgagaccatcctggctaacacggtaaaaccccacctctactaaaaaaatacaaaaaattagctgggcgtggtggcaagtgcctgtagtcccagctgctggggaggctgaggcaggagaatggcgtgaacccgggaggcggagcttgaagtgagcccagatcgagccactgcactccagcctgggtgacagtgagactccgtctcaaaaaaaaaaaaaaaaaagaaagaaaataagcttaagttgtatctccagatatttaaaaaaagaagctacatataatgactttcatattcatgaacaaagaagccaataatggcaaataaagctgctagtgtaaataaatgcattgacctgagttcgtaacttctctctcttgtatctgggcaagttaattcacttttctgaagcctcagtttcctcatttgcaaaatgggagaaataatgtattttggggttgtgaaaatgtaatgatagagatatatagcacttagcagagagccttagtcacacacaataatacttcataaatagtgctaatgaataaagtatttccttagtggctgaattagtccaagcaggcattcattaatttaaaagttacggccaggcaaggtgagtcacacctgtaataccagcactttgggaggcagaggcaggtggatcatttgagcccaggatttcaagaccagcctggacaacatggtgaaaccccgcctttactaaaaattaaaaaaaaaattaggcatggtggcgcacgcctgtgattc

SEQ ID NO: 585331 - DNA, 4001 bp, Homo sapiens
aagtgatcattttaaagattagacaggcaatagaacactgaaaagaccagagggatgcttctcattcattcattcattcagcaaccatttaatgagagcttactaagagtcaggcttgggaggctgttgcagtactgcaggagtggaagagtgaggactagattagaatatagaaggagggatccatataaaacatatttcaaaggtcttgatgactcattgatacagaggatgaaggaaatgaaggaaaagatggttaaagataattccaatgtttcaagattaacataatttccactgtactaggaacctcaaaaagcaatgagaataacaaacaataaagtataaaaagggctctgatgatgttgaacagtcaataaataaaactgctaaatggcttgtttgatatcctagtagttcatttacacttagtctgtggagaagaaacttcagtgaaaaggccttttctttgtgattaaatgctgagttcccttggcaaggacagcaggggtctacctaatcagacaggctccaataaccctccagcacacccctccaccatctgaacctagattggtttcattaggaaatgtgacggcctccctgctgcctggccaccagttttgactttggagaaggggataaggcaaagcagaaagggagaaataaaaagtgggcagagtcacttagagaatggggaatggtaccggatgtcattttaaataaaggatcccagtactgctttcctttctacatctacttctagtgttttacaagtcctggtcctcaagtagacaggaaagccttaaagagtctttaccaaattgtagcgcattgttcagaaactattttaaatgtgcatatttatgcatatattaactcccagcacagttcagcaaatgattgagacacaaattcttcttaataatttatatgttgactacagaaatttaaagctcatttaaactttatattcggcaatggtgccattcactattgaagcacaccctgaaactccactcactgggaaatgtgagaaatgaaaactgtaactatcaaacttctgttactacaaagagttctaccggccaaacaaacaaacaaaaaaattcaaaccccacaagcgcccataccttagagaaatccatcccgcttgtaaaattcagtgtggaattccctcagcctagcacagctccagcaaaagcaggtcttatttagttgtaagtggaaaggaatactcttctctgcagaatgatgcattagctatattacatataagtccttaatgttagtgtcaaagtcaaactttaaaaggttaacattacaaaagaatcagttgttctggaatatccgtcaatatccttctcataacagctactcagattagtaagaaagaaatcagaacagaaagaaatccagtaaaaaatggttgcaaataagtactcgaggatttttgctcagaccccttgtgggacagccaagggcctagtcagggaaattccgaaagcaagtcctcaacgtgccccgcaacgaggcttcaaattagctagggtcttccccctccttaagactaaaagataaacacccgtcaaaatcctccaggctccgagttttcataccaggaaggagagatccacaggatcgcggaaagaaactataacccattagcctcttcctgcgcctccgatccgtcgcggggccacggccaggggtctccccgccgccccatcccagcagctactacagtgacaggtcgcccggcagaagcccctaaatcccggagccccacttactggcgccgcgaacgcaggcgggggcccgcccctgaggtgagcgcagctcctcgacgagcggggcgcagccgcccgctccggagctggaaatggggacaatccctgctaggaccggccgagggctccgtacagggacgcccgcgaggtccggcgagtcgcacgggccgcacggcgcatggtagtgcagcaggaacccggccgttttccagcctccggcaggaaaacaaacaaaaggctgggtggcttctactggggacgaccggccgctttccctgggaaaagttaccctgcagctcccctcgctggccctgcgcgtccctgcactgcgtcctgttcgccctggctcgcgcggccgagccgccaggcgcagctctgggccgagggcagcacagcgcccagggacccctaacccccgctgaccgcaaggcgatctccgactccgaacgaacgcctcgttgcagatcggctcgatcaaccatcaagacttagaaatggaggctgtcgatggacgttctgagcacattaaattaaagataatcgttgtgaaaacatttttctgatttgaaaaaacgtagttgaggtggcacgacattgtgaaagtaatcaatgccactgaattgtattcaaagtggttaaacagcaaatttcatgttacctttacagaaaaataaaatgaaaacgcaactgattgcctgttagcattcctttgaactcttaagagtttttatgttgttagcaagtagttgtaaagactggactcttaacccagatgggaaactgactctagtcagatatcctctacacaacaatcgtcctctgtaactagttatagggaatctgacactaacacgtaattttataacacattgatttatgtcataagtgatattgtagacattaccttaaatcatccttataaggctagagcggtttgaataaagaagttgcttccaggtccctgattttaaatttacataattgttctaagccaacagttcttaaacattagcgggaagcatcagaaccacctggaggacttgttaaaacaaactcctgggctgcactctcagagtttctggtgctaatgttgctgggtcacactgctgtaagcaacacaaatttaattaataaagcagtaaccctttgacactttgtggactgttctctgagtttacaattcccagctgatcatatcagtttttttctcactatttttatttttgaattctacagactgaagattgttttttactgaaaaaatctataccaagacctgaatccttctctcctcttgatcttgtggaagaaacatgcaagatataagacagtcaagcttctttagatttcctctcccaaatggaaaaaggtcatctggccacttgacatatgtataacattgatatctacctttgtgtttacctatttaacagccagcccatatggcaaatgaaaactgaaaatcattatcagtgaaaagatagagacacgacaaggaatctaacaagtcatatactactcccatgaaaagcaatttctaaagtaaaatgatcagttttagtcaaattgtccaagcaggtctacctggcaaacaaaggtactgtcttggtctaccttttagcaagagtctgctaggctagtaagtagcctagatcagtagttttggcctcaggaaattataatcctgtaaatataatatgagaatataaccttgtaatgaggtctagtggatactgtggaactgactgaaaatagaaaattagtagctatgaagcataacagtattttaatgctcaatttatctttacaaatattattttattaagctttaattacttgctagaataaaagaaaccatctgtgtaattgaccaggctattttaaactagcactcaacattttaaatgaaacagatttgttcccaaactatttcaatacttcattctcagtatgtaagagtcacatttatcattttattctattataaatcttagatttaacctttccccccaatttaaatttcaaaattcaattttaaggagttcattgggaggaaatttatccttaaaaagacttaagccctagagtctcctttaaaacaaaaaatttaaatttttggcctcttttaaacagtaaggcattttttataggtagctgacttagggtgcaaataaaaacacacgcatccgaagggtggatcccaatattaaa

SEQ ID NO: 585332 - DNA, 4001 bp, Homo sapiens
agttgtatttttctttcctctctctctcttggaatgacgaatgaaaacgtttctaggttggccgatgttttttcctttcctccggtggctttttttctctaacttctgctcttccccctccctctctagtgctcctggctcgggctcaggcggccgcacacctgtggaagaggaatgaatagagggggtgtgtgaaccttctcgctgcagactaactggcgccaccgaccaaactcaagacatgcttgatcaacaacccaaaacaaaccaccaggtcagacaacacccgcccgcggccgggccaggcgccgagcaggcagctgcggccctcgggaagcccggagaggggacccactccggcgccctgcccgcgtccccctttgtgggtgacagactgcacgggaggacaccggggcagctcccatgcccacgagggtgccctccctcgggaactagggaaggcagaagagcccgctgaccaccagaaaaaacacggggacggcggggacaagggctgacccgtctccaccgagactgaacctcgagttctaaggctaagtacgggtttacttgctacttaggtggcagggagagaggggatttacttccttgggagtttgctctcagaaacgctgggggcaaagaacaccgcggtgcctggccccggaagccctcggggacgggcgtctctggtgaccggccacccgagacgggaaatgcgcgctcacctggacagcgcggctcagcggcacagaatgctgtcgccctgcttgttcaccgcgccggcctggaacagcaaccgaacaccaagggaaaggttagcaggcgcaaacaacgcgctcgacacggtcctggattgtcctcggaaatcaggctggcgcgccgacgcccccaccccagcctgtagccgggggggcccctccgggctcaggcgggacttgacagcccagggcgcccacagccccgagtcccgccctgcgcgttctcccggacccgcgctcgccgagcccggccggctgctggcggcccgggggagcccggaggagcagggggagggggctgtcattcctggcccgcccctgcccggaggacggtgagcgcccgcgtcccgccaccacgccaccaacctcccatcccccgcggcgtccgcccacggccggcgcccggcctctcaccgggtcggtgttgagcgcagtgagcggggtccgcggcggcgcggctggacaggtcccggccgggtggtgtggcggcgcgggcggtggtggctgcctcagcagggccgggtgcgtctccagcgccagctgcaggtccaggatgtagtcgataacgtgctgcaggatctccactttgctgactttcttgttgggcgggatggtgggcaccagcctccgcaggcggctatagcagtcgttcatatcgcactgcaggcacagcgccggctcgtcggccgccgcctcggccgccttacagcgcgctgccgccgccgccgccgccgcggctgcggagccacccaggctgtggccgtgctcggccaggcagcgcagcgccagctccccgccgccgcagcccgacggcgccttgcggcccgaggggcgcaccgggctcaccgccttcatcgcgcgcgccctgcgctctacgcgagcgaacccgctggggcgagcgagggaggcaggcaagctccgggccccgtccgcggccggctccgctccctttgcctccgcgcccggcgcgctcggggcaccgcgacactcccgagcccaacaattgacgggagggtcgctctgggttttacgagggaatctttgctcagtgggcgacactcagcccgagcccaaaggaaaaaaaaagcaaaagcaccggaagaaaagtagcccacccgggtgtcctagtcactcccttcggagctccgactaagcccgatcgcggccgccgcgctcccctagcccgggatcaccccactcccggtactactcacaaccgcgcctcctccactacgctctcgcccggcccgccgcgcagctgtatttatagagccgtgcgccccgggggcgggaccagcgcgcgggccgggtcgcagcgcgagccgagcggagcccgctgggcgcgcgggcgggggcgcggagggagaggcgagggcgggggctccgggcggtgctggggggcggggagtccggctacccgagtggaggagtgggcggggggtctggagtggccagccaatcaggcgggcagtgccacctcggggaatgacgctcgggccaatgggaagggcactccattccgtcaacgctgtgggtcggggttctgagaaaagagagctgagtgggagtcgggccaggctgatgtgtgcccaagggaggggaaaagagagagcgaagttcctgcgaagaactgcgggaatgtgcggccggaattcactctccaccgccccccttatcccgactaggctgctgagggagcgcctgggccctgctcgcggataccctgccactcctaatagcacggcgcccagggaccctccgccacccatcactccatccgtgggattccagtgccttaagaaagacgcgctgttcaagaaggcacgttcattctgttctatatttccctcctccgtttcattattcgccttttcacatttgccgaaaccataatgatggaatggaatgtgtagcctttccgttttctttttaaaaaatgctaaagcttagcaaaagtagaaaaaaaaagaaggaaaagaatgccgaatcgaatgcaggtttttggtgaagggaatataaataaaacaaaaacgtggggggggttcttttaccccatctaaatgcaaaagtgggctcaagaaatgcagttgccttgcgcattcaattagagcacgtaaagattaaaaatgcatggacacggaatatttaaaattccattatgacatataatattaatctgttttatgtaaaattcatacctgtaacttaatttaggccattaatgcacagcttcacgtattagtcagcgtaccccgctttaaataaggtgatgagaatgtccagagtcgcctcctttgacagcaaagcattaaaattcacacttccagtctctgggatcccgcttgggccccaccctgcaaaaaaaagcctgttaattaagggcgtttttgtgttagatttcttagagaaaagctgtccttcaagggttcaaaataaaattgcacaatgagctttggtggagcattgtgtgtacccttcaagaaaaaattgagcccttcagatgagaaaggtgcataaaaattctcagacaatggggaaatgaattttgagtgccttcactctacaaaccctcccacctttagacacgcttggagatgaattaacccaagaattttcttcattcgtgtacatgacatggattggtgtcttcattttcatagataattgaaagaaagagacatggacctcatttcttcctgtctacccctatatggactttttctacatccattcccagaactgaaatacctgcaccaggcagatattttgtttagctatgtcagtgctttatgactatcgcactattccccagagcacattcctttctcctgatgaaatgaggagcaactatttaattctggtttcacaggtagatgcaataaccctcctctcccctaatccttgtatgttactgcttctaataattgtttggaaacaagtgccattctcatttatttatgtgcatacgtagatggtctacatacacattaatcgagaaaatcagaattatgaaactcagaagggctttcttctaaagacaggcatagtcatatacatcattaaattaatgcaaatacagagaaaatgttgtaattttaaatgggaagtcggtgaagccagcactactggttgtaagctattatcttggagccagtcatatgagcacagacgataataataaatggatatatgtacagatgttttgttccattgatctttctctttcctagagtttaaaat

SEQ ID NO: 585333 - DNA, 4001 bp, Homo sapiens
ggctggggtctcgggaagggcggggtcgcgcagggacctgggagccgggcaggggccgctcgcagaccagctttcctgggagctggccccgctcccgcgttccccaccctgccgcaccccgttgctgcggcagacgcgaccccgccccccgcaacggactaagcacccccacttcgccccgcctcggcccagtgcgctcggcccgcccctttcccggcaggccccgctagagtccgcagcccgcccgcccgctggctctcgggcccagccgggctgcctggttagcccggggagggccacatccctgccgccccagtcaccgcccttcttgagccgggaatcccgcccacgccgcgccacgctccgcccccgggtgagggacttgacctccgcctggcaccctggcgtaagggtgattgccacatctcggattcgccgcggggcaactacctgggaaaaccgcagactgggcaatgaaagactacatccggcaaccggatgctgggttctgtgactccaggaaaaggggctcctgggcccagggaggtgcgcgggctggggactcggccacggcgcctcccgccggtccttgccatctgaaggccgggaggagtggggagtcggcgcttgcaaagatacactcaagactgcagacagtaaatcaattttatttgtgttcacagaacatactaggcgatctcgacagtcgctccgtgacagcccaccaacccccaaccctctacctcgcagccaccctaaaggcgacttcaagaagatggaaggatctcacggatctcattcctaatggtccgccgaagtctcacacagtagacagacggagttgagatgctggaggatgcagtcacctcctaaacttacgacccaccaccagacttcatcccagccgggacgtcctcccccacccgagtcctccccatttcttctcctactttgccgcagttccaggtgtcctgcttccaccagtcccacaaagctcaataaataccaagagacctgcatttacagcagggggaacatctcacacccttgcataagttaaaataaatattacgtacacatctccatcacctaggaggacgtacataaatacatataaatattaattaggagcaataagaaataaattaacgacgctctccttcccaccgggcctagccccagctgggctgtgcctcggtctctatgcgcctcggtctctgtgcgcctcggtcccgcctcaagcaccgggtggcgtctccgctgtagtgttctgagttcaagttgcctcggaagtcccagttggggatacgctctcgcgcaccaggtacgcctggtgtttctttgtggtttttcggattctttttggggagtgcggggagtcacagttagaaggcggccgggtgttgctggaggaaagtgctgaggtccagagcgtagtccgagggctccgaagtcagattaaagggctcgaggacggcggacacaggggtgggcgccagggatgcggcgttaggggcgtcctctggaggcaggggcgccggcacaccctcttcagccatcaggatctggcagaagacgatggtgagcagcagaaagagaagccttttggctgggttcggttcctcgactggcagctggcgccggacctaaggggagacaaaacaggagacaggtcaggtcgaggcctctggagtcgggtcgttccccagtgactccagggcagcgcaccccgcgaatgcccacttcggcgatactcaccactcgagggtagagaaccctgcggctgcgctttcggtgcccgcgagaggcgctggggcgcccggcaggggccgctgcgggctccgggagagggtcgaaggtgaagatctcaggaccggagccccgccggggtcccgggatggtggagggggccggggtcggggcctgcaggatggtcatggtcgggtggcagctgcgagagtgacacatggtgagccgagcggagtgtaaggccaagtgagggtcggctgccggcagaggtaatttatgtgctcctgaaaattgggcgggtccttctaactcctcctcccgcagctggggagcggttggcagcagcgggctggaaattccgacgattaaacaaagggagtgggtggagacttgacatgcacaatcctaggcgcccaactgcacgttgtgagtgtgtgagtcgtgagtgggggtgggtgagatcccgggctgcaggcacatgtcgaggcatgtggcacctggagaggggctcactttagccacaggatccctcacaggcctttttttttttttttttttggagatggagcagtctcgttcggtcgccaggctggaatgcagaggcgcgatctcggctcactgcaacccctgactccctggttcaagcgattttcctgcctcagcttcctgagtagctgggaatacaggcacgcgccaccacgcccagctaatttttgtatttttagtagagacggggtttcaccctgttggccagggtggtctcgatttcctgacctcgtgatctgcctcgctccctccgtccttcttctagtagtctcaagttgctattgttgccatctttacgtccacgagttcccaatgtttggttcccacttataagtgagaatgtatggtatttggtttgcccgcctcggcctcccaaagtgctgggattacaggcgtgagccaccgtgccctgccaagagggctttttattggagatcaggccatcctgctgcaatactgacccagttatatgcacgcattcatgcacttgtaggtatccttagaatataaactccccaagaaggaaattgttacagaaatagtcaagattaagggagaaatgaacacactagcacacacagacacaaacctgcctgcctgagcacacatgaagacacacaccgcgtagccatacaaaagaacaaaattatgtgctttgcagcaacatggatgcggctggtggccattatcctaagcggattaactcaggaacagaaaaccaaataccacacattctcacttataagtgggaaccaaacattgggaactcatggacataaagatggcaacaatagcaacttgagaccagtagaagaaggacggagggagtaaggcaaaggttgaaacactaactattgggtactatgctcagtacctgggtgacaggatcattcataccccaaacctcagcatcatgcagtatacctaggtaacaaacctgcacatataccccagaatttaaaataaaagttggggagggagggaaggatagaaagattaaaaaagtaatacacaatggtggggcatggtggctcttgcctgtaatcctagcattttggggggctaaggtgggaggatcacttgagctcaggagcctgggcaacatagtgagaccttgtcactataaaataacaacaacaacaacaacaatacacaattaaatattattcagccataaaaagaatgcaatcctggaaaaaaaggaaaacataccacgtacacctaccaacacacatgtacacagtaaaggtgcaaagactgtatagggacagttcagcaaaactactctcttaggagcgtgcagaaatattcacataaaggctggtgcagagggccacaaatacaaaggcaataggttagcagccacccagatttgccccttgctgtaagtcaaacaaccaaatttatgggacaaacattctaaattgtgagacattatacaaatgttacagtaatggtaattactcaacttaaagcagattcacatttccataacttccttacagacagctgctcatggacacagaatttaactttttttttttgttttgagacaggatctggctttgtcgcccaggttgaagtgcagtggcatgatctcggctgactgcaacctctgcctcttggctcaagccatactcctacctcagcctcctgagtagctgggaccacaggtgagcaccaccatgcctggctaatatatatat

SEQ ID NO: 585334 - DNA, 4001 bp, Homo sapiens
ccaacccaaccctctacgagaatgtccttcccatgcaagctggcacctgaacctagctgggcaaatcagagcctttccctggcattttgttagaatggaggaggctgcaagatgtcaaaactcagaagctgtcagcatccatgattcctgccaagtgtggaaagctgtcaatacccagacagaaataagaaatggagagtcctagcagtttgggttcctggttctagcctcttgagacccagctggcatctataattttctgtttaactctggtttttctgagacaataaattcctctttttgcttaagttaataaagctaggtttcttgctggtacacataatatggcaattcattatttggttcctacttctccacctaacctatctcctccccttgtaagctctcacacacactttacaatagaacgcttaatattccacgaattcaacatgctatcacacctctgcacctcagtctctgcacctctggttccaacactggggtcacctttgtgaagtcttcactgacttccctaaaagagacaagcaccccgccttgctttccactagtctgtgcctaagtgcaagctcttaccgcaaagtactgcaactgcccatgtggatgactgactagagcctagaagagcagttaagaacttggactctggagccaaattgagcagctccccactgagtggctatgacctctctgccagttgggcaggcctctccgtaactcaatttctcgtccataaagagagagacaaataacgcctactccagaagattgttgtgaacacagaaccaaaacgtggacctttcaaagtccctatgaatcataaatcataataaaaaaaagaaaactgaattgaaaaggtttactgttttctctggagctcgtaatcacaattactctgcacttcagaaaagccaccctcaacatttgttttctaggaaatgtcaataagcaggtggaaataaaatgctccgaagaacaaacccgtacgaagagacctactgccaaatctgctagtgagtgccggcaatccaccacttccagactgagacctaagacggactgccacttacttctcagctgccacttacttctcagctggcgacataatgcatactttcctaccctaagcactttgagtccccccccccacccccgctaagaaagaagtatttaagccacgaactgagaccacgatgccacatgctgatcaggacactcacagtcatgcgtcacttaacgatggagatccgttctgagaaatggagaaatgtccccttaggcaatttcttcgggcagtagaaacccagacaaacccagatgacacagcctactgctcttaggtcatgaacctgtacagcctgtcactgcactgaacactgcaggcaaccgtagcatactagtgagtatctgcgtatctaaccataaaaaaaggtacagtaagaagacgatattataatctttgagaccacgctgtcccacattgaccagcaacgtccttctgcagcgcataatcgtatttaaaagtggattacaagagtcggaaaaacaagcggcgtgatttgttgtggcggcaaccagggaagaggcaggagaaaggcaaccgacgagttcaaaccacggagccccagtctcgcgaccccacctcgcgtccccgtcgcccgctcagggcccgacgcaggggtcccgggctagggcgacctcggagaagcggggcggggcttcccggctggggcggatccctccctccctctcgtcccgacccggccgcagccctgccgcgaacgacggtacctgaggacggccccagatccgcggtgcccatctcagccctgctcacaccctgcatgacaaggggtaggagaaagaggagagccatgctgctaccgacggtcgctggctccaaccccgagcgcctgcgggaccagcccagcactgccctccagccccggccttacgtcacttccgtcaccggggtctgtgccggcgtcggcaggaggcgggaccagggcgtgggcggggtcaagtccgggaagccgcaggaggcggactcaggcgcagcacccagcagtgagcacggcgtcgtgcggtcgggacctggacttctgggtgtgggaggaatttgagtgcaaaggttaaggtctttcaacctggcaccccattctgcaattcttcttccagtttttttcggtttcctggggttgtgcaagtttgcattaggccacagccgagccacaatccttattttactaactcttggacttcacctggttgtcttggagcctgacatttttagaagagaatgagacttcaaaagccatttccagtccctgctttttcatttgaggaacctgagacttagctagtgaaatggtttgtgcagattcccacagcccaaatcaaatcggcttgaccaagaactactttgttcttggagaaaaaaactatttgcattaccttctcagcaattcagtgtcaaatcagtttatcaggcagcctctcatgaagaggtctgctctcttacctctctgggtttgtctgttattttgcatctctcctattccactgcagccacattgctaagtccttcagcgcttgtgctcaaacatgcgaatgtctaatgatctcacctgtttcaattctctgagtatcatgaacttttgttaaaaattttaaattgcaacacaccttctcctcctccttaccccgccctactgttttttcatggcacttttcaccttgctgtacactataatatacaccttgatatttgttttcttctccttctaaaatgtaagctccgtagagctgacatctttacttggcactcaattagtatttgttgagtgaaagactgcatgattactagtgttaaggaaaatttttaaagagggaaaatccttataaagacactatataaactagaggtattatcagccagatcattttacttgtattaataaatctcttagctcagtacttctcaaacttcaacatacatgtgaaccatctggggatcttgataaaatgcagatttggattcagtagttctaattcaggttgggtcttgagattttgtatttcggacaaaatgcacaggggatgctggtgcccctttcaacaggaccacactttgaatcagaagaatttagctcaatctagactaagtttagggagaatatttcctttgatgtgtttctgatgtccactatatgaaagacaccttctagtcgttgtaaggatgcaaggataaataactgatctttaccgtttaggcgtctatggagtaggacaaaatatgatatccagtttgtaaacatttttgtggtacttgtcacaggctgggttaccctggcagtaaactctgaggtcgagattaaggtataaggcattgattgattagggagtgctcttggaataaacgtctgtgaaggggaggtggaggaagcagagcggaggaagaagttgatctgtgatgccatcccagtaaaggctcccaaggggcgctctggagttgggatggccttgtaaaggtgtcttgagttggtatgaggggctgggtcttaaagcccagcactgattagtcattgaataccaactgtcatgattttggggctgtccatttctttcatggaggcattccccagaggaacgctgacggttgagggtgtctactggcagccctcctagcatcaggaaggggacagaacccagtcttctgttcctgagagggatctgggcaagtttcacaatcacagcacccaccaccctacgtatccttctgaagactttgctagttagtcatttggagactaaatatatttattaattgggtgaatattatcaagtgatactgtctgtgactgacatgaccaggcacagagataaagacctgagcaagacagacatggcccctgccctcacggagcttactgtctactgagggagatagctgttaaacaaggaattacacaagtactgaa

SEQ ID NO: 585335 - DNA, 4001 bp, Homo sapiens
gtatttatttatttatttttgagacagggccttgctctgtcgcccagactagagtgcaactcgactcgatcacaactcactgcaacctcgacctgcggggctaacgttatcctaccacctcagcctcccttaactgggaggacaggagtgtgccaccgcgcccggctctaattttcatattttttgtagagacggggtttcgccatgttgctgaagctggcctccaactcctggactcaagtgacccgcccacctcggccttccaaagtgctggattccgggcatgagccaccgcgcccaggcgagttaatttcttatttttggtcacagaagccattattccaaaatgccttcctctaaatgttgttctcagcctgacctcgtttaagctgccaccatttctctgtatcatactagttactggagtaactatgtatcttagggtagctaactggtctttaaactagtgtcacaaactctccctccatccacccttccccttccaaaaaagggagcataaaaaatatgggcctttccaaagagtttctatcgtgagatcagcctcaccctccttagactaatttctgcatgttctgaacacaggggtgctaataaaactatctctgatgcatgggaaaaataagaaccccccccataaaccctaccacaaactccaagttcagcccaaagtaggctcaactttgtttcactctgaaaagtaacttgtaaaagtaacttgtaaaagtaacagtaacagggagaaactgttgtctgttcaaaacttttcatcctgcttcctttttaccaaagtttaaaaaaataaacaaaagctgaattttccatcatcctaaacagtccagaaaaggatggtcagaaaattcctgaaattcgaagttccccaggccctggactgctagcagttgcgcgaggtgaacagccctcgatgggactgatgggttatacaatcatggttcccagagcaagatccactagaataatccgccccggagacaatgacatcatgtgagcaaccaggcaggaagttgggctcagagaagtgaagggtcaagtcttgaaagctcacactggacgacaccccctgcccccaatctaaagaagacaaaagtcaccgcctgctaaaaatatatatatatatatattctttaaagagaaaatgagcccacggggggaaatcaatcagcaaatgaaaccacaaacactcaactccaggaccattcctgcgggctccaacgccccggtgagcctctccacaccgaggggcctcaccggtgccccgctggcgaaactctgatgcaaacgcgcagcgggaacaaagcaaactggagttcctgcctccaactttcccggacgcccggccgcgcgagggcaggcgccgaccccaagggccggggcgaccgctccgcacaaagccacccccgactcagcgacagccacaagtggccggacgcggggctccaggaccgccacgaccgcgtgtgcccccgcgccccccgcctgcgcacgggacccggcgggactcgcggacaccacgcaggcaactttccctcgggaacggggcggaccccggcgcggaacggaggcgacttggagaccccaggagctcctcgagcgctccccgccccccacgccggccgctcaccccgggcaccgcgagcggagcctgcgtccgggcgggccacccacctgcacagctcggggaacggggcggcctgggcctgcgtggaccccggggcagcgacgagcagcagcagctgcagcaggagcagagagcgctgcgggcggcgggcgggcgcgggccccaggtgggggctccggccggcggcggcccccatcgcgccgggcccggactgcgcggcgggcgcgaggctaacggcgcgcgactgctgggggccgcgcccgggacggggtcgcgccgccagggcaaaggcggaggtggagacggagcgggagcccgaggtgagcgcggctcgactgggctcggcgacagcgacagcggcagcggcggccccggaaccgcgtcacgtgacagccgcccggcaccgcccccccacccccgccccccgctcacgtgactcccttgttcaggtgacccccgcccgccccggctcctcccaggcccgggtcacgtgagcgcagcgcgcgggacaggaagcggcgcgggcggggcgcaggctccaggtgcctcccggggcctgagcctctcggcgggctgggcgcggcgggggtgcctagccgggcctcagtttcccctcccaccgcgccctgctggatcgtggcgggtgcttcccaggttagagcaactgttcccaacctcgatcgaccagtaggggaaaatagggaacttggatcaaagtgccagggaggtaaatgccttcgcacagcctagtggcagcggatccgtggggggtgggaacacactttaactgcccgtggagtcaaatcatgggggtttacaaccttggcccgtcagagcctctcagaccttctgtgggaatgttatttcccaagcgtgggcttcctacagcaaggaaggcagcacaaatccagcaaggtgaaagagtggacaaaagtgtcgctgtcaagcaagtgccactcaacaaagctttattaattcactacgtggatggccatgagctagccacaatgaaagtagaacgatgaatctaaaagtcttgaactaaaaaaattcactttcttttagagtaaatatacaaaataatcatgactgaaaatagtaatcatcatcatcataaaagctcatcttttttagtgcttattccataccagacactgctaagcatgtaagcatgaatctttaaaaacctatgagatgggaacctacttatagatgaggaattgaggcacaaggatactcagtgacttactcaaagacactctgggatgtggcaaagctggaattcaaacacatataaataatcatgacccaataatagctaacatttcttgagcaagtaattatgtacgaagtactgaagtgttcggacactgtgatttagctcatttaatcctaacagtcctgtaagagggggtgcctttattgcatccgttttgcagataaggaaagtgaggaatggagaaattaaataactagttagtcttgcagctagtaagtgaaaaagcccgggtttgagcccaagccagtcacaggcctgtgacataaccaccgtgctattaatatattgcccaagaaaagaaagtgttgtagtgggtcaaagggagagctcaggtgtaaactgtggacgtcgaaaaagggtttgtggtgaccgggcgcggtggctcgcgactgtaaacccagcactttgggaggccaaggcgggcggatcacaaggtcaggagatcgagaccatcctggctaacacagtgaaatcccatctctactaaaaatacaaaaaattaaccgggcgtggtggcacacgcctgtagtcccagctactcgggaggctgaggcaggagaatcgcttgaacccaggaggcagaggttgcagtgagcagagatcgtgccactgcactccagcctgggaaacagagcgagattccatctcaaaaaaaaaaaaaaagaaaaagggtttgtgttttgcaactccagtgttataatggatacaggcaaagaccatcagtaaatactaaaaccatctggtgaaaaattattgtgaagcggaatattctctttgtctcaaagtatcaccttcaaagtatacttccttaaaaaacacaaaatacctcttcacaatggaaagatctggtagaaccaccttaatcaagtaattaaaactagtatcaccaatttttaaaaaactagcattttctgctttctaaagtgatgcaataaaaaatgctaaagggtaatatttaaaagatggtataatcatgactcagatgtagaatgaacatgtatcaaaggtattccttagctcattcattaatgtgagaaccggtaacatgtcacagctggttcaaag

SEQ ID NO: 585336 - DNA, 4001 bp, Homo sapiens
atcaaaatacatttggtatttaacccttgatggggtctaaatactgggtatactaaggatacagcaagcataggtatgttaggaagtagatcaagactatttaacacacaaaggggtagaaataccccagtgatacttattccactgggattcaaaaacaaaaataagcaaaagaataaaagtaaaaaaccctaattattaattatttgcaataaatcttctcaatggcagctctggttaagataataaaagcattaatcctctttgataaatgtctattctttgaataaataaagaatagacttggggtctcataaatattagaataatgattataattaatttgggttgattattggtgtcagtgacaattagatctaacaggatagggattattggaggctgtcctgtgcttggttaaagaaatctgtagaaagtttgagaattgctcttcacagtggtccttccaggtttgactggtaattctaaatgaataaaatcatcctcagggagatttaactggcagtctgatgcataagagggatgaagaatatagcatttttatctggaagctttacgtactggagattccaaggtgaggtggatcggttgtagtaatctgaggaccttttgggattggtattggtattccggttatggatgttcaggttgaccatcacagtccgggggaagttcttgtcctcagaatttgggcatcctggatttcgtgggattgtgattcctgccttcactatggcctccaggctcagcagcagtagcagtgactagaattgaatgggaaaggagagagaggttggagattagattactatgtggttctttttgacaaattaattgtgatgatgatgcattgctaatcatagagaacacacaatgttccaggacaatctatactacatttttcagatcagctagagaaaaatctaggtagatgaccaacataatgttaacaccatggctttaaaatttttttaaaaaaactagtttcaacattctccttttgacttaggaaagacatgttatccattggttggcaataattttaataaaaatgtcaagtcatggcatgtcattagcctatcagcacatgcatcattgtcaggtctgggaaggaataataaccttgattttctaggtagaaatatcctcctgcaccattgttctcagtcccatattctgtgaaactcatcgtgaagtcaaacattcacattggaagaaagagctatagaaaatctatgtggtatcaatattcatgctagaagtgctgttggtgctactggcaggcatccaactaaaaactcgatctccttcatgttttcttaggtatattttccagttgttctaaatttaacatgtattgattctgtaataaaatcagatttcaaaaaagatacttgaagttaaatatttaaaaaatataaaccccacttattctaaaacacagttatacctatgtttagttagaatacatagtttcaatgtactgagaatatggtacgagataatggaaacaaaggttgttgctgctacggctttcaaaatctcaaggatagtgacccattttaaagaaaaatgccgtgggagaattatattaaatcctttgtactcagaaaaacagactttcaataaattttctttcttactgcacagcatcatgtgacacttcttgtgtggtttagccccaatatagctatctttcagttttaatcttatctttcaaactgctgtgtatcagttcttgaaaatgctgcacaatgacttaaatacctaccaaagctttcatttcctatcctacatatacagtattcctggatctccatagtcagaacccagcgtttcatgcccacggtccagaaatactatctggtccaaatcagcaagagcatcgcacgttagtgcaggactcaccaccaatgaggtcttcccaggagtcatcgttgtttcttccaatcaactggggatggatgagtttgtgcctgctatgagatggacaaaatgtagcgctatcgtctctctttttatagggcttttctccttctgtggtcacttacgtggcgtgtcgcagtgggttcaggggtgacaccattttggttaaaatttccgcccccaatgaggtcatagaagaatctctccttctgaaggaaaatgggaagggcagaaattcatgttcctaaagaccatgtcctcttttcattcttacttgttagaagctgagcagagctgctatgctatgggtcaatatcatgtatttatgaacatatgtacagctgccagaagagttatgctctattttaatggttcatgaggaagaaaaagtttgaagtaacatgtaggtcttctggtgtcatgtaccttgattttccatttgatctttcttttcctcacagattccttggccaggtgttgtggagacaattccggaaactactcaagttcccatcatataagtaaacaaaaaatgaaaaaaatatttaataataagatatatcctatttaattgaatttaacaattcttttgttgaatatctactctgctcaaggaataaataactaggttcaagagacacgagattttctgttaaaggcatgttccaaccctgcatgctaccaagcaacttggtgttttgaggaaggaattgaaaatggggatagagactggacaaaggtgatggagatggagaaaaggggggcaggggggagtagagagtgatgagaactagaaaggagaggagacatgatgggggaaagagagaaggagttagcggttcttttctctgtactctaagtaagatgaacttggactcaggtccttgagaatagttccttctcaggaatacagaggactaggacaaggaagggccagtggatatagatgtggctggctatatgtcacccttctccgcccctacccccactgaggtgaatgataactctcaggcactcagctggtatcccatattctacatgctaactcggggggaggctggccagtagttccaactcaatggctggagtgtaaaattagtttgccggatcctgaacctgtttgtcctgagatccattcctccctgtcctgctctacctgtaactcagagggctgaccctggaggctgcttgctcaaactcccctgtcagctgggtttcagctaggctcagccaaaagggaattggaggacagatgagtaaaagtgggaagtggaaagtggaaagtggggagaagccaggagcttccttcctcagtctcccagaggactgctcactccctttgtccctgcagccttcaaatggtaacagcttcttgctgatggcaatctcaactaccagggtgactagttctctgacttaaactccctctgttgcaaatgcctgaaggggcttctctttcctggccagataaaccctggctgatgaatgagggaggccataagcacctgaattttagtggcaatagtagatatccttgataggtgaagcagatacagatggaggaggaggtaggatacagcttcaagtgatttccgtagtcctggttttggcatcactatctatgtgcttttcaagacaagattcagaatgagccctactgcccctcctctacacacgaccaggcagcaatcccagaagctgcagcatctctcacatcaccaatttccaagcttcctctaactcacactctcacccacttggatgagctatgcttgcttttcccaattgcttccttcagaccatcttcgacatgctttcaataatgattctcaaagcatggctctaattgtgccttttcttctgccattagcttgcatacagaatgaagggtaagcctcttagcatttgaattaatatttgagttcgtacaacttcctttctagccttaccccccaccatgctccaggacctgggatgatggggtcctgatttttctccaggccttctttcaaagcttacccaccctttgttaaggtattgtttctgaaatgccc

SEQ ID NO: 585337 - DNA, 4001 bp, Homo sapiens
gatttctttaaggaaactagaattagaaatagctatggagcacaaagctacccaacagaattgcttggatgcaatggctttaaattcacaaatcttgcctctgaaccaaagaaaagcatactgtatgtggagacagaaagcttagattggtgtaccagttcttgtgcttacagtatccagcaatgttaaataaatagcttaattgagcttttgttcatctgtataaagtggaaagtattcccatctacttcagtggattgatcagaatttccaggacaataataacaatattaatatgaacagttaacacttactgaatgctttctctatcattatcagtcgttgtttattagaatggccaaattaactgaaaattaagcatacacaaatctgccagtacagagtatagactcatttattctcaaagatattaattaatcctcccaataaatgccatgagaaagatgccattgttatccccaccatacagttgaggaaacggaggcacagagaagataaataacttacccaaaaatcctacatttagcaagcagtggagccaggtctgcctgacatcaaagcctatgcccctaaatatggcactttgctgagctacatgtaatctttaaaataacacataaatataaaataaaacataccattgctatatgccatgaaccttttatgatattcaagctcttttaagttgtatggcttgtaaaaggagaaaaaaaggaaattatctaagccaataatatgatgcgggatttcctaacccctgttttcatgtacctctatagtaaattcttctcaggccttatctgactaatgtcaggcaagattccagacctgctggggctagattttcattgcattaacatctctctttcctccaagaagaatgagatggtacaaaataaataaatagcaatcagagacatgggaaatttcccttctctaggagctgtccaaagtcaacactgggtgatttcatttcttccatccagggcactcctgtaatctcaggggaatcattaaacctcttgaggccccagtttccttggttaaaatgtatatgtacataatccctaaagtgctggccaagctcccaccatgagataagaatttcaggccaacctgactctataatggatggccacaggaaagaacatgctagttgtctgtgatgccaaggactgcacacactaacaccacctgggcacacactaacaccacctgggcaaaagccattgggtgaggagctgcatttttttttctttgagacagagtctcgctatgtcacccaggatggagtgcagtggcgtgatcttggctcattgcaacctccgcctcccaggttcaagccattctcctgcctcagcctcccgagtagctgggattacaggcaactgacccatgcccagctaatttttgtatttttagtagagacagggtttcaagttagtcaggctggtctcaaacccctgacctcaagtgatccacccacctcagcctctcaaagtgctgggattacaggcgtgagccaccaggctcgacctaatttctgtatttttagtagagaccgggtttcgctatgttggtcaggctggtctcgaactcctgaactcatgtgacccgcccgccttggcctcctaaagtgctgggattacaggcatgagccaccacgcctggccaggagctgcatttttatgccattataacttttctagttatttttttctttttctccaccagacaggagtcaaaattaaagtcatctctgttttttaagaagtaattccaaaaagaccccaatcaaacctaattccttaggattctgttttctgaaatcctaggcatgacagtccttaaaccagaatgattgctgctactcaccatggctgggccatgcagggtcttcactgtcatgttgcgctggtggcttactttgtgcaggaagctctttctgtgaatgtatcttcctgtgtatgcctgtgttctatcaatgagagtacctgttagttttatagcaatcattgcccctgtttcgattgacctgcttactgtctttaagttgtggttgacccggagttactgacgaatgcaggggtttttttttttattccatttcccgaaggggaacaaaagggggaccctaaagaaagggatgacaggaaaaggaccaaatttttctttccttctaccctacttccacccccattgcccacaaatcagagcaaaatttttaatttactacagagatgaaccaagttagaaattgttgtcaaatcttttttgttcttccacaaattgccaacacccttgtcacggaccatatgttctactttccagtcacgcaatatgaatcgtgatttaaatgggagaaaactcatccttagaggagccttggtactaaactatctttacctccattttatgaatgggaaaacaaaactaaagaaatgaatgacataagtgaaaaattcagaaatgatataccctggtagttttgttatctccctgaactaattattttttaaccccatggttagactcctactggtgcttaataaataatcactattcattgtgttgataaaacaaactgttttcctctgctctcacaccacaaccagcaacacaaaagatttccatgaccatgtatgtgggcatttatctccatcaaccagcaagcaatcaattctgcatccaacgccagctaagcatcttctaatccaattcaattctgacgctatctccaggtaggtagagtcagatcccacaggctgaaggctcagtcccacaaaactgctcccactttaagcaccaatcacaggtccaagcctctgggacttctgactgactggcctcaagttcaggttcccacaaaccgcttgagtttgattaggcttgattaatttgttagaacagctcacaaaacttagggaacactaatttatatttaccagtatattctaaaggatatttttaaggatacaagtcaacagccagatgaaaaggtacacagggcaaggtttgaaagggtcacaagcacagaagtgttctttcccatggagctggggtgcaccaccctcccagcacagggatgagttactgtttacctttcttagaacttccacaagttcagcggtccaaaggctctttgtatcccatcctcttgggccttttatggagtcttcattgggcagacatgattacaacatggaaaactgtaaacaaatgtgattggataaaaagggtataacctgatattaacaggttgaatgaggaaattcagccaggcctgcctgttcagatttttcttggcctctctgagcagccttccttcctcctgggtagaggggaggacccttcctgaattgagggtcttatggcctatgattagacaaggtaaatcaaagaatttctttatggccagctccaagacaaaaggtgtggggggtgatgttagatgacaggatattttctgtttctatggtcttggggagaaaaggtgggcaggagaagttcagagagggagattcttttttctgaggcctatttcttaggcctaaagtgccccaacattacaataaaagactgtctttttcacctttattgctctgaagctgtctgaagctgcttcaggaaacaaagacaaaaaagctaaataccctaacaaaagatatgcttattatttttatcacttaggatataacgagggctgtgggagttatgaaccaggagccatggacaaatatacatatatgtaaaatcacattgatgcaacacttaaatgcccattaccttggctatctctaagaatggttttttttaaccaaaattaattagcaagtagaagcctttaaatgcaagattggcagccctggcactgcagctggggcagcagagccaggacggcccaggaactgacagactgagggataggcagactgaccatagccgaccagccaaagcccatcagcctgctcaagaacctg

SEQ ID NO: 585338 - DNA, 4001 bp, Homo sapiens
ctgagaatgattccaggaacagtagaagcctctgaagggctttgagcagaggaggcagatgacctgagaagtcaccatctcccattctatcttagtgactttaaatgcctgtttatattatgctaatcatggttctttatcgttcctgagaacaggatatgggaatggccaatagggcggagtttgataagccataaggataaacttcactgtgaaattctgtccctggaggggtccaagagtgaatgacagcgtgttgcacctgccttgagggagccgcatagacattttgaattccattacaactttatctgaaatgaaataccaagatttccctacaaggttcatgacatgctgagttttttttttcctctttggatgttttggtattttacagcctgatatggcactgagctgtgagacgaaaatttttagaagtttaaaaaatgagagcattaaagcattaatctacctgagagtggcaaagtcatagaaccttagtaagcccacgttgtacagaagacattgtagataatccttcaattacgagcaggtagtatccaggtaactacatacatcttctaaggtggtcttcccagcagtccttagaccttagcccaaagacccaggagaggacgggaataccctaagaagagctaagaaagtagtatcaaggtctcttgggtcagaaaagatttcttactgttttgttttgtaaattttattttgaagtcaagaacattactacctggtaatgtcagcacccaacaattttatttctctctctcactttctttgtttttggttttttccccaaagacagggtctcacccttggccagactggagtgcagtggcgtgatcataactcactgcagtctggaactcctgggcacacggagtagctaggactacaggtttttgccaccacgtctggctagttttttatttttatttttttaatgtttagtatagacaggggtctccgtatgttgcccaggctggtctgaaactcctgacctcaagccatcctcctgcctatgtctctgtctctcaaagtgttaggattacaggtgtgagccacagcgcccagcttctctcttcgattaaaaataaaaacaaatttctgtctgttagttgaaggctcaatatttgcacgtcagtcgtttcttcccattcagtctacccgggaatattaaaaggaaaaataactataatttctgataaatttaaaagataaaatattttatgtataatagctatcgttcaaaatctctccaagatctgtgtgcatacttttcttattgttgtaactatattgaatttaactttttctttaactaccaaggactccagattcaccgtcaactttcttcctgcattcactcttactgttcagttctgggttaaaagacagcggggcctgaacgaagtgtctacaaagcacagtatttggagaagctttgttgttgttttttaaaataatttttttaaaaagggatcccggatatcttttttgtttttttaaaaaatctttttctcatgtacgagaaatacagggaaaaaaagcaatcaggttaatgaatcattctggtttactggattccaattggtagagaatttaaacttaaaaaccaaacaaaacgaaagagctcttcagttaccttatgtcgtaaacgagttaaaagttttgttatttctgaaaaatcaaagagcactatctgtacatggtcataactgcaaaggaaacaacggcgtacccaggacagggggagcttactttaagaagctgcgtctttctggatcatgttccttcggggctgaccctttcggggagtttggcttttaaagcgcggatctcgcgacgcgcggcttgcaggactgcggggcccggcggccgagacgcggcatccacaggggcccctccgcgcggccgcggcggtggtggcgggaacctgggactggccggcgaggggccccgcatggtaaccgtccccgaccgcaagtcataggctgtgggcaccgcgcagagcgcaccccccaccgaactccccccaccccacctcaattctcgagaccgaaagtgcggagcgcggagtcctgcaaacttgaccccgagccaaggtgcgcgaggcgacggcgagtgtcccccgggctccctgcagccccggggctggaagctccggcctccgcgcacctcgtcctctgcccgcccgaaagcgaaacctggccggcgggcaggaggggagagctcggcctcgagctctgcctggcggggccccggcctggaggcatccccgacccgcacctggcggcgcgacccacctacctgcccgtccccaaggcgccgccaggagcaacagcagcagcggcggcagcggcagcggccgcagggccgggcggccgggagcccgcatgggcggcggggctgggtcacatgtcggggggcagcagactgctcagtcccacgcccgctggggccaagcgcggccgcgcggcctcagctccgcgcctggggctctgcgtgccacgctccaggcgacctgagtcccagggcgcctccgccacagccgcgtcccccaggcttccccagaaaccaagggcgagcgactcgcggagcccccacgcgcgctcccccggctacccagctggatggcagcgcgagggcagttctcgcggatttatagtccccagccactcggctgtcagtcctgagagtctgagagtttccacctctcggggttcatgcccagaccaaccaggtcactaggcaggtaaaacctccttctggtaatgagcgaggcgagtgcattgcaaagagattctggtattcaggccggtctgatggtcagttaaagttcaatatcggaagacggatgaaatagagcgttatttctcgatatacagttaggcactcagccgtagatcttacagtcatgcatcatttaagatgacaggattacctcctgagaaatgtcttaggcgagtttcttgtgtgaacatcttagagtgtactcacacctatatggtatagcctcttacacgcctacgctatatggtacaggctgttgtttgctcctaggctacaaacctgtacggcaagtgaccatactgaatactgcaagcaattgtaacacaatggtaaatatttgtgtatctaaacatgtctgaacgtagaaaaggtacagcaaaagtacagtatgaaagattttaaaaatggtacacctgtatagggcactttccatgaatggagcttgcaggactggaagtcgctctggctgagtctgtgagtggtgagtcaatgtgaaggcctaggacatcactgtgtactactataggctgtataaacactgtattacacttaggctatgctaaatttattaaaaaattatttcttcaataataataaattaaccttagcttactatgattttttactttctacttttaaatcttttaaactttatttatttatttatttttgagatggagcattgctctgtagcccaggctggagtgcagtggtgcgatctcggctcactgcaacctctgccttccggttttgatgattgtcctgtctcaccctccagagtagctgggattacatgtgtgtgcccccacgcccggctaatttgtttgtatttttagtacagactgggtttcgccatgttggccaggccggtctcgagctcctgacctccggtgatctaccctccttggcctcccaaagtgctgggattacaggcgtgaaccacgacacccgacctaaactttttgacttgtaataacgtttgacttaaaacacaaacacattgtgcagcagtatgaaaatattttttctttgtattctttctataagctttttctatttttaaatttttctttttctttattttttctttactttttaaacttttttgttataaactaaggcacaaccacacacattagcctaggcctgcacagggtcaggattgtcagtgccactgatgccacctcaca

SEQ ID NO: 585339 - DNA, 4001 bp, Homo sapiens
tcactgcagtctggaactcctgggcacacggagtagctaggactacaggtttttgccaccacgtctggctagttttttatttttatttttttaatgtttagtatagacaggggtctccgtatgttgcccaggctggtctgaaactcctgacctcaagccatcctcctgcctatgtctctgtctctcaaagtgttaggattacaggtgtgagccacagcgcccagcttctctcttcgattaaaaataaaaacaaatttctgtctgttagttgaaggctcaatatttgcacgtcagtcgtttcttcccattcagtctacccgggaatattaaaaggaaaaataactataatttctgataaatttaaaagataaaatattttatgtataatagctatcgttcaaaatctctccaagatctgtgtgcatacttttcttattgttgtaactatattgaatttaactttttctttaactaccaaggactccagattcaccgtcaactttcttcctgcattcactcttactgttcagttctgggttaaaagacagcggggcctgaacgaagtgtctacaaagcacagtatttggagaagctttgttgttgttttttaaaataatttttttaaaaagggatcccggatatcttttttgtttttttaaaaaatctttttctcatgtacgagaaatacagggaaaaaaagcaatcaggttaatgaatcattctggtttactggattccaattggtagagaatttaaacttaaaaaccaaacaaaacgaaagagctcttcagttaccttatgtcgtaaacgagttaaaagttttgttatttctgaaaaatcaaagagcactatctgtacatggtcataactgcaaaggaaacaacggcgtacccaggacagggggagcttactttaagaagctgcgtctttctggatcatgttccttcggggctgaccctttcggggagtttggcttttaaagcgcggatctcgcgacgcgcggcttgcaggactgcggggcccggcggccgagacgcggcatccacaggggcccctccgcgcggccgcggcggtggtggcgggaacctgggactggccggcgaggggccccgcatggtaaccgtccccgaccgcaagtcataggctgtgggcaccgcgcagagcgcaccccccaccgaactccccccaccccacctcaattctcgagaccgaaagtgcggagcgcggagtcctgcaaacttgaccccgagccaaggtgcgcgaggcgacggcgagtgtcccccgggctccctgcagccccggggctggaagctccggcctccgcgcacctcgtcctctgcccgcccgaaagcgaaacctggccggcgggcaggaggggagagctcggcctcgagctctgcctggcggggccccggcctggaggcatccccgacccgcacctggcggcgcgacccacctacctgcccgtccccaaggcgccgccaggagcaacagcagcagcggcggcagcggcagcggccgcagggccgggcggccgggagcccgcatgggcggcggggctgggtcacatgtcggggggcagcagactgctcagtcccacgcccgctggggccaagcgcggccgcgcggcctcagctccgcgcctggggctctgcgtgccacgctccaggcgacctgagtcccagggcgcctccgccacagccgcgtcccccaggcttccccagaaaccaagggcgagcgactcgcggagcccccacgcgcgctcccccggctacccagctggatggcagcgcgagggcagttctcgcggatttatagtccccagccactcggctgtcagtcctgagagtctgagagtttccacctctcggggttcatgcccagaccaaccaggtcactaggcaggtaaaacctccttctggtaatgagcgaggcgagtgcattgcaaagagattctggtattcaggccggtctgatggtcagttaaagttcaatatcggaagacggatgaaatagagcgttatttctcgatatacagttaggcactcagccgtagatcttacagtcatgcatcatttaagatgacaggattacctcctgagaaatgtcttaggcgagtttcttgtgtgaacatcttagagtgtactcacacctatatggtatagcctcttacacgcctacgctatatggtacaggctgttgtttgctcctaggctacaaacctgtacggcaagtgaccatactgaatactgcaagcaattgtaacacaatggtaaatatttgtgtatctaaacatgtctgaacgtagaaaaggtacagcaaaagtacagtatgaaagattttaaaaatggtacacctgtatagggcactttccatgaatggagcttgcaggactggaagtcgctctggctgagtctgtgagtggtgagtcaatgtgaaggcctaggacatcactgtgtactactataggctgtataaacactgtattacacttaggctatgctaaatttattaaaaaattatttcttcaataataataaattaaccttagcttactatgattttttactttctacttttaaatcttttaaactttatttatttatttatttttgagatggagcattgctctgtagcccaggctggagtgcagtggtgcgatctcggctcactgcaacctctgccttccggttttgatgattgtcctgtctcaccctccagagtagctgggattacatgtgtgtgcccccacgcccggctaatttgtttgtatttttagtacagactgggtttcgccatgttggccaggccggtctcgagctcctgacctccggtgatctaccctccttggcctcccaaagtgctgggattacaggcgtgaaccacgacacccgacctaaactttttgacttgtaataacgtttgacttaaaacacaaacacattgtgcagcagtatgaaaatattttttctttgtattctttctataagctttttctatttttaaatttttctttttctttattttttctttactttttaaacttttttgttataaactaaggcacaaccacacacattagcctaggcctgcacagggtcaggattgtcagtgccactgatgccacctcacatcctgtcctcctggaaggtctttagagacaataggaattttttcagctctattataatcgtatgagaccacctttgtatatgcagtctgtcactgactgaaaagttgttatttgatttcattcaactctcacaacctgcagttaggtcctggcccttttttcagatgaggcaagggaaactcagaaagtctaggaatcatcatgaagtcccccaaacctgtgagtggcctgtgaccagtggtgtgtggacttccacacaaggcggtgggtcctaggttccatgctctttataatgggaggggggaagggtgcaattaagaggtgagtcttgaaatactatatgaaaaatctgagagaggctctcagctttgtacctttctaggtggttctaaaggttgggcacagcctgaagatagatacacgatttacctcagatgtgttccatctcttttgcccttaaatgtctgttttcaaatgctccaataaagggaaacgacactcaaattagagcaactattgttttctttttctttttctttttctttttaaagggggtcttcagtattaaaaaagatcttttttggtgaggagggagtaaggagatagaagatggggcaggattttctgagtcgcctaagtatgctactttttccttcctgaaagacttggaaacagaggaggaatctgggtcagagggccccttaggctgggatgttagcttcgtggtgctgacgtgaggcctcttcaaaccacttttcttgtttgttagctggttcttttcctttccaccaaaaggggccctgaaggaatcctgaaagctggatgaggaaagaagggacttgcttcctatttgtttgctgttcttgtc

SEQ ID NO: 585340 - DNA, 4001 bp, Homo sapiens
gggtggagctggggccacgcagggaaaaccttattcctgagcaaagggtcttagaagagagcttatcagaaatttcctcagaaaccagatcccagtggaccaggccactatcaattttcatttaacaaatttcagttattggagggcagttgcgctgcatgctttctgaggccagccctatgtggaaaggtttgtgtggataacatcaggtttcccagtgcctctgttctacggcagtcttctgaatccaggcttgtatctcctccagctgaagtttttggtgcttataaggtagcttctgctttgaaagaagaaacatgcagcacgttttatgttcccttttcacctcttcatgctccttagcttgcaaccttctcagcattgttattcacttccctgctaatgtttaccacttcacatttactttggtatttaaatgggggatgataatgtgggtttgcactattgatgttcaatggcttcaataccaatagatctcattttgaagccaccaaattgctccaagttccagctaagaataaaaggaaaatatttaaattcgaggttttatgatgagagcagcagagaacgaaattgaggtttccactgggttgctgactttgtcaaacaaatgaggggaaattaggcggagtgggataagcaaaacatatttaagaactgaattctccccaaaacgtgagctttggtgctctattaaatttcacaaaccagaccagttctgtcactgttcaattagctctagttgtgtaatagaacctgcataaaagccaacactgtcaacaaggcctcaaggtagatgaaaagataaaattaaattctaatttcccatcaatctggaagcagaagaatttgtacagaattgtttcaaatgaaatgctgttttgtttgggaagtaagaaagttttagtcactaggggatctccgctctgcctcctttcaggcatgaaatgctggcttcattccctgccctcccccgacctcggccccactccgcagcagggagagtccaccttgacggtgacaacgggtatttccatcatcgtgttgactctggagagaacttgcttaagcccctgtcttgaacagatttgattctcttcttcctttcttcttgtggcttccagcagaccaaccatttatctaattaaggaatcatttttcattgtttttaggtgtgatgtggaattttggttattatttttatttttttttagagctacctattatagtactacagatgaaatggtgtcatgtctgggatttgcttcaaaataatacaaaggcctgggaaagggggttaccatccatgagctgataactgttgaaattgggtgtcaggtttattatactctacttttgtatgtacttaaaattgttcataacaaagaaaaaagatttttaaagtttatctacaagatgtggccagacacggtggctcacacctgtaatctcagcactttggaaggcggaggtgggtggatcatttgaggtgtggagttccagaccagcctggccaacatggtgcaaccccgtctgtactaaaaatacaaaaattagccaggcgtgacggtgtgtgcctgtaatcccagctactcagtggggctgaggcaggagaattgcttgagtcaaggaggtgaggtttgcagtgagccgagatcgcgccactgcgctccagtctgggcagcgataaagcgagagtccatctcaaaaaaataaataaataaataaataaagtttacttaccagatgctgtcttccttttggtaattttaatgccattttagtgtcaataataagatctaataattatgggacgccatgttatgtttttcccatattttgtctttgttaatcctcttatgaagtctaggagattggtattattattcatttgatgttacagatgaagaaactgagacatagatagagaggtggagagaacttgaccagggctctatagcgagtagtggtaaagtgagggctgaaatcagatctggttagcctcagggcctgaggagtattatgaaactcctcttgtgttattctttgcttgtaatagacattccataaagggatagaatgatgtcaaagaacatttgtccattggcttctcgaatcgtttattcagtcaaacaaatgtttattgagcaactgttatatgccaggcactgtgttagacatcggggatgcagaaatgaacaagactacagagccagccctcagggaaccaacagcattttcttcaaccaggtcttggtagcaaagggctaagtgtttcttattgtttttcagagaagtgtttaaaaactggtgttcagtatgactttggtgctgtccattgaagggaagtcagagcaactgtgtttctgctaggccctttccttcatcctatgatttggtgggcagctgagcatcttttaaaagtttcatcatgaatgataatctgaacaccacccttctccctctctggaaaactatagagctgtagagccaacaacagggaaacaacttgttctttcttatttgctgggacattaatagctccaccgagtaatattcatgtcctttaagcagttcggcattctggaaataattggcatgcaaaaattcaaaatggtttgtgaacttgaattcagaaaagaaaaagaaacattgttattcaaacacaggtgataagcacaatgactaatctgagtttttggactgtgatcactaatatattatttaaaatctccactcataggacatagggcttaatgaggttaacctttcctgctcttcactcttatttttctggataaaagatgctattgattttgctttgattattctttaaaaaattttttaaaatttatttctgaaaaccaaaacataaaggagtggtaacatttaaaaaatatgtattttttttatttcagtagctgtgcaatagtgcaagtggtttttggttacctggatggattgcacagtggtgaagtctgagatattattgcatctcttacccgagtaatgtacattgtacccaatatgtagctttgattattcttcacccaaggtcaccttgaaacccctaccagatatcatcaatcattatgcccatgcaccagtatgtttgtatgtattgtttgatcctgaaaatatcttcatggcataaccagaatccaactggttttcacctcctccactgtacccatttggtaacctgctatcatcatctcttgtgtggactgtggccacagcctccttactggtctgcctgcctctgtcactgttctctgcatcaggtggagtgttcctattaaatgtcagaatagaacattttattcagaaccctgtgatgccttcccatctcactcagattgaaagtcaacatttttccagtcccttactaagccctatataaccaggtcctgttacctctaaatttatttcctactgctctcctcccaacccatggtgctccctcctgggtggtctttttgctgtttctcaaacatatcaggcacatccctacattagcaaggttccctctgctccaatgctcttcctgagatgtccaggctcactccctcacctccttcatgtctctgctcaaatattatcttatcagtgaattctatgacacccaaaatagcagtccccaacagctgtccctggcacctttatctgtttgttttccaaaacatttatcatcatttggcaggctatgtttcattttattcttgttgtctatctccccaactaggatataagctccacgaggtcagggatgttatgtgttttgttcactgctttaactctagcacttaggacaaggctggggacacagtaagcccttatcacatgtctagtgaatcaaaaaaaaggaatgtgattttagcaactgccatgaatttacaagaattaagctaaaggaacgggaaggtgcttttctgctttttatggtctgaagtaggagtcctgaggggaaggggctgaga

SEQ ID NO: 585341 - DNA, 4001 bp, Homo sapiens
tggaggctgctctcttaagtgaaataactaagaaacagaaagtcaaatatcacgtggtctcatttataagtgggagctaaataatgtatacacaagaaagacatagagagtggaacaatagacactgggcattcaaaaagatgagagagtggaaggggaatgagggatgaaaaattacccaatgagtacaatgtaccctattcaggtgatggttacactaaagcccagatttcaccagtgtgcaatatatgggtgtaacaaaactgcacttgtactccctaaatctatatttaaaaaaaacaagtaacatgttaggattttttattatgcaattactggacattgtttcctagaagtaagcatataacaaatggcagttttcttgataagcttatttcatttcaattcctatatgtataatatattacatatattaaattatatgtatatgtaatacattagaattataattatatgacatataattgttatatataaaaattatatataattatatatttggaattgtgtataatagctgatatgcaatatatgaaaatagaaaaaatcgttaaattaacagaattaatgtaacaaaaaatttaacacagctgaattgcttgatcaagtctacgaaatagtcaaattggtttacttcatcagattcagttcagaatataccaaaatctcattatttatttctaattaaaatgattttataaatgtaaatatttatatataattgataatttaatgaaaaagtaaataaattttgcttctttcactattgtgaaaacatgaagaaatcttttccagaaatttttttctccctccaaatgcaatcactgagaagtttcatataacatgactgatggaatcacagttattttgtgacttacacatgcaatgactattaattttactttttcatggatattccaaaccaatactttagttaaaatgtttatcatcatgaagctatgtcattcttaaagaaattcttaaccttattgacttcaaatgtcttaaaaagattgagtatattatgataggtaggcttatccttatataaaaaagtcaaactttctccaacatgtgtgtttcttttttaaaacacacattatttttcttaaaacatcctgtttgtggcttattttaatttcatattcagatgcagatttgccataagaacatacattgcctagttcttttatgcgtacaacttcaaaaacaaccaaattttgaagtggttgtcatcatgaaccctgaagatgaagaatgtttgctattttctaagggaaagcaactcatgatttcattgtgagaaggtaagaaatacttacttttttttgtctgaccataaatgacttaaaacattacttttatctttaggttttatttgttgaatttcggtggataaatggagttagtttcacagatctactaatattatttacattaataataagaattttcaatgaatgttttagaacagcaaataggatgcattcatctctcctattttgttaatcttcactgcacttaagaccatgtagtaaatattaaatcaagtgaaaatcatttctgatagttaattattcaatcaatcaagcaatatttattcaaggcctactatatactagcccgtgagatcaattggtagccttgttggttctaaatattcacttctatcggtagattttatagataagcaatttaaaagtaaacatttaagtaacttacctttggttccttgaacttggagaaaaatccaaaaaacaaaaatagctcttctagtttccaaatacattctggcttttgtgcattggtaattctgataacaatcacagaacaacctcaaatctcattaaaaagtaacagaaatgtgaaaaataattatatattgataccagatgattgaggataaccttcttggtttacctttatgagggtgttaatttatgaagaacatgtagcagtgtctgtttctggaataatctgcttgtctttccctcaggtgtaatctctgcttaagggccagctggaggaacctttatctcattaaccttctggaggagcatctgtcagcctagctccaggaccctgaatgccattataaacaagtgtctacagacacagttttttcttagttattcacctgttacagtgacacagagagccaggggaagttctgccaaacagagaataaggctgacagttagggtcagatgttttctaaaatgacatgtacaagaaacatccattaaaagagcttaatttctgtccctgaaagtatatggttatccaatatgtattagtctccacagatagcgaaactgtctccattctcttctatgttctgctttataaattgcttttgatttggaattacatacaggtggcttttttgatttaagtctggttttaatgtttaaaatctgtatgcactgtgtttaaggggtcaaatactttttttctacaaagtttgtaagaaaaaattgtgcctttcttctacccatgccttctttcaaaggggagccatttttacttcatcaacctaattcttctagtagtctcatttgcacttctaaataacatgcctctattactattttggaggttttcacttttaggtattatcaaataatagatattgagaataacttcacttccacacataccctttctactcattgtaaacatctttccatctttcttcatcagtattattgtaatttcagtttttgaatatttgattttatattattttgactatacatgctacatattgctgagtcatgaaacacactgcaactactactgtatatggagctcttgtgttgtggatagacattgttcttagagatgtccatagattatccatagattcctcaatatgacaatataaacactgttaatactatctcttttaaatttgaggagaataaagtatatgtggcagagctaggatttaaacctaaagagtctggttcaaaagcctacacccttttttttttttttttttttttttgagatgggggtctcactctgtcacccaggttggagtgcaatggcgtggtcttggctcattggctcatttcagcctcaacttccatggggtcaggtgatcctcccaccttagcctcctgagtatctgggactgtaggcagatgccaccacacctggataattttttgtattttttgtaaagatgaggtttcaccatgttgcccaggctggtctcgaacttctgggctcaagtgatccagcagccttggcctctcaaagtggtggaattataggtgtgagccacgcacctggccaagagcctatactcttcaccactatccttctatgatactttttgcatagtctcattaaaaaaaactttttttagtttctaaatacaaaataataaattatccccaaatattcccctggatatgtaaatctcttcacataaacacttcaaatagtctgtctttcccagggctttctaaccctctccagtctgtattatttaatttcttgtcattgttcatagcagtcatctggggattgcccttcacagtcatcctgaggattccttcaacctctttcttgtgttggatcttgtgatttctggatcctgtattgtcttctttcttaacttaatctcttgttttagcggagcaactgctctagtacattactgaaagtttgtggtaggtaaatttaaaatcttacatgtttgaaaatggtttccatctgccctcatacttgtttgatagtttggctggatatagaattctgggttgaaaacaacattcatttagatattgaaaatgtcagctgtagaaattctaaaactttattactgttgtcttctttctcgtggtttgttgtggctttatacttaaaaaaattccttaaatattattttcttggggtattcagaggtggtcaaagggaatggatttttagctcttaccttcaactacagattattttggtaatattta

SEQ ID NO: 585342 - DNA, 4001 bp, Homo sapiens
caccctggtgggtgggtgaggcctctcagctgccagctgggcctcccagccccggatgagttgcagtaactattattaaggtaacacactgcaactgcagcccgcgggccagcacgcgctgccaccctgcgcctccccagccagtgcacgtgctttcttccctgaaggacctgatgctcataaagtttattgctgttccctgtggctgctagtgaacaagagagcaaccatccgggtttctgcctgggaaggatttattcaggctctgtggagggcaggagaaagaaggagatgccgctggccagggggtgggcttggcctggcctgtgacccccggaagcagcagaggacagggagggccccagaggccacaggagcattgaggggcagggatgcagggaagtggcccaggaggggacaggagacctggttctgcctcaggctccctgagcctgcctctcggggcctcagcttccctatctgtactgagagctgtctgaccctgccatgttcttaccctcctatgggacaaccccccctttgattcagcaaggcaaagtggtggggaaaaatcaccatggtggggggtcggggggctggcagaggctctttctaattgaaagagatttaagagacctgctgacccaatgccttttgactggatccttttctaacaaaacattaacagacatgtagggccagctggggaaaggagactgcagacaggatgcagacgctcatgggtagttgttcatttgttagtggacagtgggttatgtgaggacctgctgaggactttgtgcaggggagaggcgtgctgtgatgtcagaacactctagctgtagcgtattcaatgaaacaaatacgacaaaactcgggccactgctgaaatcaggcgcaggatgtacaagtgtgcatgagatcattccctctatttgtatgcttgaagtttttcataataaaaggttaaaaaataaatgggtagctttttaaaaatgtagaaggcagagtccctccctatgggatcagaatttcaggggaaggggcctggcatggggggtttaaggcccccaaggcaagctcagttctcaggttcactagggtacctagaagagtcatgggtgggggccaagactccaccactgcccagggcatcagggaccaccgtttggtggagacatgtctcccacccccatgaccgccatcccgtggtctaccaccaccctgcaccaggccccaggcagctgctgtagatgctgatgtcatccagcctggtgccggcctcctgccccctcccgtggaaagctggggctgctgggctaggacatgctgttcctgtgcccaggggatgctgcccgcgtttcttggacaccggcctctgttaagggttaacgcagcccccggtacttgcccctccccccagcttcctctgtagtcccagtccaccctgaagtgagagggctccaggcacccctggaaggggaggggtggaattcccctgggagaagggagagggatgaaagaggaacagatgccagaattcctatacactgaactgtcccaacgccctaccccacccccgccacacacagatggacagacctccacgaagacgctggcacctccgtggggcagactcctggccagcctggaatggagacaagaccccagggtacagacaggccctgtgaacacgagaccctctctcccctcagtcaggccccgtcaaagaggctggccctgcccatccctgcctacaaggcagcactcaccagagcttcctccgagatcgtggggagtgtatggaaggcagggcccaggaatcttgtctctcagtgcccaccatgtacaggcatcaggcaatggcccgtcccagcgtggagcatttgctgttcaccagagccctggtgcgggaggtctgcccgggagggccgggctgccgtggcctggggagggaagggtcacctgaccctctggggaagggctggtggggactggcatgtccagctgtcagctgggtgttctgctgctctggggcagggccagaggggctggaagggaggggacaaagaggaggagagagaagaggggaggaggaaaggaggactggtctgaggcaggggagagttcagctcagctgcccacgtagatgtcaggacctgggcaccaagggcccatcaccccaaggccctggttattttttgattcctaattcaaaaggaaaggggtgagtctcgggttggggggttcatgctctcccttctgctgggcttcttgccccatcctctctgcaagaacctcactgcagcttaccccatactgtggctgccagagaaggaaagtcaggcggcaagacgttccatcagtcaacagtcagttagactgaggacaatcaggccatcaacaagcattttttgagaccccctgctagggctgaccaagcacccccagtgtcaggggattacagctggggggctcagcaagtcagagggcaactccaggataagtgtctggtgagagaatagaggactttgcagagagtgaggagggcatcctggaggagctgaccggctgagagctgaaggagaaacagggtcatttggttgagtgggggagggtggtgagaagggggctctagctacaggagaggctgtgcagaggcccagaggcccagaggcccagaggcaggtgggagcagggtcagggaggtggaagctgcagggagtgggactggggagagatggggcagggacgaggtggcctcaccagcctctgtcctcagcctctgggaggaactgaggtgctttatgccaggaagagtcggctcaggcttgtgtttaaaactctcaaaggtgggcagacagatgctgtcctctgggagagtcctagcctggttgggagagggggcagtgtggggaaggagacggcgagttcctgagatgttcaggaatcaggctggtggaccgggagagagggggtgggagcaaaggacagggttcatcaggggacaggcttcaggtccaagtaaccctggaccagtattaggaagatcaagctaccctggacatctggctgaagttcccctgggcactggtgccccacctgcctttcctgggctgctccatatgtggatgaggggctcagcctcctctctggccagagatgctgcttgctccactcgggcccaggttgcccactggtctggttcagcctctctcggactcatcccccaggacccccttacccatcttctggtccctccagacctgttggtgtagtacttactccatttccacatgtccatggagaacatgttccaggacggccccttctccctcaccgctcatttcacagaggtaagatggggcaggtggactgaacccattctcctggccctcacccgccagccattgtccattcagtgccctctacgcccacttcaacgctcagcacagcaggagccgctcagcagatgtgttagcggcaagagaacaaggggtggctgggcacggtggctcacacctgtaatcctaacattttgagaggcagaggcagaggcaggaggaatgcttgagctcagaaggctgaggctgtggtaagccataattgatcatgccactgcgctccagctgggcgacacagagagaccctgtctccaaaaaaaaaaaaaaaaaaaaaaaaagcctcccgtgatggggaggctgcagcctgtgtggggctacctacctgcccagctgccttcgggtggctgagctcctctcccatctccactgtgtggatggacgtgggcctccccacacccagagagggaagagccccacagaaataacaggaattcctggggtgccctgaagcctggtttaaagtggggtggggatccgatcctcccctccctgccccctgactcccccctgcagggtgactgactgatcacatttcaccagggaaggcacatggcctcttgtgtgctctgtccctccccctgcccagctgtgtgctgg

SEQ ID NO: 585343 - DNA, 4001 bp, Homo sapiens
gggggagcatcaggaagactagctaatggatgctgggctgaatacttatgtgatgggttgatctgtgcagcaaaccaccatggtacacatttacctatgtaacaaacctgcacatcctgtacgtgcacccctgaacttaaaagttgaaaaaaatacacattttggttaaagaacaagtcaaactaaattagaacaaattctaaagcgtggctgatgaacactaggcttgcccagtgctctgtcaaaaaagggatccttggccaatcaactgggaaatactgcttattaaatttctcctaaataaaaaatattccccaccttggagatttacaacacctgttaacgtattagcagccctaagaagttcttcaatggaggccaggcatagtggctcacacctgtaatcccagcagtttgggaggctaagacaggcagatgacttcagcccaagagttcaagaccagcctcggcaacatagcaagaccccaaatctattttctaaaaagaaaattaaaaaaaaaaaaatgttaaggaaatccttcaatggagaactttttttgcttaactttttaatctttctctctctcctctttctctcctctctctgcctcaagtgtgtcctttgacttcatttgagactctcttcaggcctagtgtactcgtttctaaaatgtaagagctcagaccagatgaagtcaatggttcctattctactttatcattccaggttcccggtctcactttagaaaaattaagcaattgaagcattcgatgttattgctttgaaacccagccaaataaataatcatcagctattactgaacttcaaagtattctgtatgattgattaatgtcatatgaagtgatactcaaatcactggtgcattcatgaataccaagaaaaaaatttatatcttttttcaaagcaacttagtataaatcttaaaagatggcagaaaaaaataatcgcagtcaaaaaggtgttagttcagactctaatgtttccaggacacaggaaaaaaagtttttaaattacattttaaaaatctgccacgtgcagtggctcatgtctgtcatcccagccctttgggaggtcgacgggggagaatcacttgaggccaggagtttgaaacctgcttgggcaacatggcaagaccctgtctctaagaattttttttttaatcagctgagagtaatatttttaggtaactattcacaagaacagctatgtcagccaggcacaatggcttacacttgtaatatcaacattttgggaggctgaagcaggaagatcacttgagctcaggagtttgagatcagcctgggcaacaaagtgagactctgcctctacaaaaaataaaaaaaattagccaggtgtggtggcacatgcctgtagtcccagctactcaggaggccgaggtgggaggatcacttgagcccaggaggctgcagtgagccatgaccgcgccactgccctccagcctgagtgacagagccagaccctgttgcaagaaaaagaaaaaaaaagaaagaaagagagagagagaaagaaaaagaaagaaagaaagaaagatccaaaaactaaaaaaaaaacagttttgttatgaattcctagattcgtcatgcaaaaaagaaagtgaaattttttttttcaccaattctctactcattttcctcgcaaacagctcggcactagcttagtggcgaattcacatgcttccaaaaagtgagagagcaaattagaaaagactggatcacctgacatcaggaaatgctcatctgagctcaaatcaggagagtctttgttttgaatctttgtttttcttcagcaaactccaaagtacttcccagccccactctggcctccgtgctgtccaaacttcttactagtttgtagctaacctgaagctgccatctgagaaaatacagcacaacctacctccgtcccaaggagcactctctcagtctcatggcaagaagaaagtgagaagactacatgtgggcttagaacaactgaaattcactattacccaccagattacttccttataaggataatcttctcggatagagcacagcaatgaccaacaacaacaaatgcaaaatccaatttaaaaaaacaacacatataggacaaaagagatccaattcagtacactcccctgaaagaaaatggggtgggaaacaactttccttttaacagaataccagcaggagcaacgggacttctacaattatagcctctttttttttttttttttttttttttttaagacaggatctctctctgtcacccagggtggagtgcagtggcacaatcatagctcactatatagcctcaacctcctggactcaagcaattctcccacctcggtcccccgagtagctgagaacacagacatccagctaattttttttatgatcggtagagataaggtcttactatgttgcccaggctggtctaagtcctgggctcaagcgatccacccgcctcacctcccaaagtgctgggattacagccatgacctccacgtctggccagcctctctttcaactaatgctctgcctaaggaagttgtcttatatgcaaatttaaaaccaatccaagcattttctcttacagcacccctcacaagtatgttcagctgtggaactgggccttcctaagttctgattctgtcttgaatttatcaggacaccttacttccaatctttcaagaggcaaaatagtctggcttagtggttgacacagcattttctacagcctactgtcaaaggcaaaaccttaacaaaggaattctttccttccatatttaaaaatgttggaggaggtagctaggcagacatgagcagggcaggagagggctccttcctaccccagggatgtcagacaactgtcaagtgatagtcaggcagttgttagtctctctaaaataataattcaggaggccgaggcgggtggatcacttgagatcaggagtttgagaccaggctggccaacgtggcaaaaccccgtctctactaaaaatacaaaaattaaccaggtatggtggcatgtgcctgaagtcccagctactcaggagactgaagcaggagaattccttgaacccgggaagtggaggctgcagtaagctgagggtcacactgctgcactccagctggggcgatagagtgagactctaaaaataaataaataattgagaatttgagagagaaagaaagaaagaaaagaaaagaagaagaagaagggaggaagggaggaaggggaaggaaagagaaagaaagaaaggaaagaaagaaagaaagaaagaaagaaagaaagaaagagagagaaaaagaaagagagagagagaaagaaagagaacgaaagaaagaaaggaaaagaaagaaaggggaaggaagaaaagaaagaaacttaaaaaaagagcagttttatgacttcaataaatggaagaaataataatataataatttgttgcagtcagtaccaaggaaaggcagtatcccaatagatagaaaacacccgaagctggtgatcagcagcttcccaataagatcccaggcattggagagtaggctcaagcatgtgcactaagaggcaaaatggcagagtttaagctggtatatgaccttccttgaggaacactcgactcaacaaaaatcctcaaatgagcattcatacagctctactaaacacatatgcatgcagcccctcccaagtgctgaaaggccactgtgggtgaggacagcccaccccaaggaaaaaatcaagggaggagagacacaaaccccagaaccatgacagtgcagaagacccccagtcaaaggtctgatagggcacttggttttctcaagctgctcccttggccctcttccaagtttacatcctttcattactgctctgaaactttttaataaactttcactcctgttctaaaacttgcctcagtctctcactctcactctcccttatgcccctcagccaaattctttcctctgag

SEQ ID NO: 585344 - DNA, 4001 bp, Homo sapiens
ctcctccactctgatcttttctaacattcactttttaaagtgcctgagtaacagagataaagcaatggctttcctaccacattcattttatgaattatgccagttattcattcattcaacaaatatttactgagagcaggcactgttctgagcacttgggagcacaagtaactcctccatttgcaggattctctttaaggctaaaaagcttattttttaggatttttcttcacacacacacacacacacacacacacacacacacacacacacacacaccatttgccacattagacctacttgcaaattgttaacctgtactgcaattatcagctcacactgcagagcctccaagctggatggaaagcagaagtgagctgttcaaaaggatgcacgagtcaaaaggaaagtctcaggcaatagtgatgaagtaatttcttatctcttattgccacagcaaactaccgcaggaaagaacttcctatttccatactctgatgatgtatatttgcttaacacagcttgcctgaaatagttcatacatggacccactccagaaaagacacttgatttataaaaagaggaatggaaggaaattataaggtaaattaaagaatgagttcatcaacacatacacaaacttacacccttttcttccttgcttgcatgatgtgagcagaaagaaatgtgtgttctttccatttctgtttcttttctttctttctttcttttttttttttgagatgaactcttgctctgtcacccaggctgaagtgcagtggcgcaatctcagctcactgcaacctccgcttcccgggttcaagcaattctcctgcctcagcttcccaggtagctgggattacaggtgcatgctcccacgcccagttaatttttgtatttttagtagagacggggtttcatcatgttggccaggctggtctcgaactcctgacctcagatgatccacccgccttgggctcccaaagtgctgggattacaagcgtgagccaccgcacccggcattctattttctattttcttttctttctttttttttttcttcctgtagagatgaggtctcattattttgcccccaggctggtctcaaactcctgacctcaagtgatcctctcgccgtggtcacccaaagtactgggattacaggtgtgagccattgtgcccagccctcggtttcaattttctacataaaataaataactcgatagaaattagactttatcaaggacagcactaggaacacataggccactcaagactaatagagcccactgctgtagtcaaagatgcttcagtgggttataattctgacttctataattaaatactttcacatataccccagcaaagaaaaatcaagtgccccagacacccttactaaaagactctgaaccaacaacacctagctttcatttttataccagagatattttggcaagcctgagacctttatcaaagtgtaaaatgtcccccagctgcctccatgcaaaggaagctcccttgcaaagaacacactttctcgaaagagggcggccccagagtgcttccccaaatgaactcctcaggacccaaatacatgctgaattgtgcttttctaaatcaaacctgtggtctgcagtctaaacacctatcaagacaacacccatttaagaaacataaaagcagagtgagtacacaactctctcctctttcaaagctttcacagaattaaagaatctttagcacctggcttcccagattacagagagctgagtgaatattacatccccaaagtcatatttcctacctcactactctaaggagagtgctagggtatccattgctttgccatcttgatctgtcaagcagttacctctcatacatcagccaagaagtgacgttacttacatgcaatacaaagagagtaaatccaagagcagtcttattcctggattcagaagcctcatagtactctgaggccaagcttgaggattctacttaaagcagcctcagctctggaaactcagtcaacccagaactaacattcaaagctgatcagagagtaaagctctttcgaaagaagaggaagtatcatctccacttcctcaatcctaacgttcttccttctcattgttatgaaacccttccttgatgcccatatccaggacacagtacatgtaaggcaagcacaccccatctgcctgagttcattgatcactaagcactgcccagtgtattcatttgccgagcacattggtggaacagttcatggttctgctttcctgttttggaggcaaggatgttcatttacaggcatggagggtgagatgatctgcagagtcattctcagcatttttgggtgaaatgccacttcaacctctttaggttcaatcttctttcagatttccctctttcctcctttcctaatcgttcataatgctctaataaagagagggtacagacacatttgtaaaacgtattttaggataaaaataagtcttagcctgccatcttttgcagtagacatagaagagtctctaaccacaaaacttttctttcccacattggaaaaggaaaatggcaggctgaaagtcagagatattccatctcattacaaattcctgccctcccaatctccctttcaacaccagcttcttgtttctctataccttctagggaaatgaatacagctgggcgtggtggcagatgcctgtaatcccaaccactcaggaggctgaggcaggagaattgcttgaacctgggaggcagaggttgcagtgagccgagatcgcaccactgaactccagactaggagacagagcaagactccaactcaaaataaataaataaataaatatgtatgtgtatatatatatataatatatatatataatatatatattatatatatattatatatatattatatataatatatatattatatatatattatatatataatatatatattatatatattatatatatataatatataaaatatatatattatatatataaaatatatataatatatataatatatatataaaatatatataatatatataatatatatataaaatatatatataaaatatatatatatataaaatatatatatataatatatatataaaatatatatatataatatatatataaaatatatatatataatatatatataaaatatatatatatatatatatatatatatatagaatatatagaatatatagaaacctaatccccaatgtgattgtatttagaggtggacctttggggagtgattaggtcatgaggacagtgccctcatgaatggtattaattttcttattaaagagaacctggagatctgcccacccctccaccatatgaggacatggccagaagacagtcacctaggaacgaggaagcaggtcctcaccagacaatgaatctgctggcgccttgatcttggatgtccagcctccagaactgtgagaaataaatgtcttttgtttgtaagccacccaggctacggtgttttgatataacagcctgaatgactaagacaaagataaaatgtaaactaaatctgtggaggagtgaaaaaatgaaagaagatgctgtacattttgagcaggaacaaaatgaaggttctctcagcggcttcttgtttgtgtacacttctatttctggaagtgctgcctcatcttctccctatattgagttgtcttctagttccctgctttacgtagaaaaaaaaatggtactaggtgatattaaaggaatttagtggtatcaacagcatggcctggcttctcaccagacatttagatgccatcatcaaagatatcctcaaaagacatgttatttacctttatggggccagaatagagccacttaaattctttgagcaaagatgatttgtagaattagaataatcctcaaaacggccggactgtcagttcaagatgacgggctgaccacagatttgctccctccctccccaaaga

SEQ ID NO: 585345 - DNA, 4001 bp, Homo sapiens
tagttaatttatttacttactacttatttgagacagagtctctgtcacccaagctggagtgcagtggcaccatctcggctcactgaaaccttcgcctcccggattcaagagattttcctgcctcagtcaccctagtagctgggattacaggactgtgccaccatgcccacctaatttttgtatttttactagagattgggttttgccatgttggccaggctggtctcgaactcctggcctcaagtgatccacctgccttggcctcccaaagtgttggcattacaggcatgagccaccatgcccagcttatgttgttttatatattagagacctgtgagctctttttattttatgtaaataacttaaaaacttgttaacattattcaaacgactacagcactagtagcagttttttaaaactatttttctacatattaaacccactttactcacattatttataattatctgtatttttctaaattgtaaaatcatttgaagaaatcttgtccaaatgactttgtaataacttgtatgtttgtattataaatgcaattcaaatatcttttcttgttaaaaataaggacttgctttttcggggtatggaatttcttgcaatagactggaagtaacaatgcctgcacttttaccaactcaatgtcatcctggataagttacatctctggcctttggggtcctactctataaaatgagaaaactgaaatcgttgatccctatgatttctaattttctttcattctaattatcggcagaattggaagcaacttacattctggtttcaggaatacatgagttcaaatattgctctacctaaagttcagagcattgtttaacctctttaaatttggaaaacagggatattaaaacatgcctaacagtgctattgtgtggattaaatgatggcttcattttttttcttgccttaggagtaggcttaaggtaagatttgtttagtgatttgtctcatggacatctccgttaagtaagtagaagtatttcgtatatgtggtatccacaatactggcttgattttttcttttaagttaaacctaagaaggccgaagaaattttgggggaatcactataaaatgaaaatcattataaaatgaaaatggacgcaacttcttccccacttcccaacgttactgtttgcggaacatactcaagaaccattccatgcaaagttttacatgatcggaaggaagcaggtcgtgctcttcacttgccaattccatggtgcggaataaaaacaaaacaaaacaaaatatttagtgtccagcactccacgtgggcaagtatttacaactaacatttcaagttttaacatttcatcactttaaatttaaaaacaaaatcactgaagcaaatatccccagataaaaacctacccaatttgcattcttttatttttaatttgcctgaggccaataattaccttcgtctaggagaagaatgggtcaaatattcactctgccaggtcctggcgtcccggagtacctttgcaacaaacgcgtcctaaacgctccagaccctccacatctcccttcccgctaggggggcctgtggggcccgaccatctgccaacccttttgtgtcttccggctcttatttcctcccccgcggagatctcacctgcacgccctgctgctggaggctctgcgtgatgtaatctagacggcgacaaacgctctttttggcctcggctgccgcctccttggtgctgctcactcgcaccaccacctgcgcccggtcagggcccgcagacacttctgaggtgccgcttacttgcacctcgcgggtagcagtttgggcttgtgttgaggagagggggtggcgtaagcccggtagcgtctctctccctgaggccaggttgttctcccggctccggtcagcccagggaaccagttccacgaacactcgggtcggaggggtcttttgcagagacatagcgatggcagctgggtttccatagtaactaccggccgacggcggccgaaggggccaatgcgcaccagggcttgcctgtgcacggcgcaaagtatgccgggatgggtgtggaggccgcggaacttctggcgggcgcaagctatatgccttgttgatcttgccgcatcttttttactagatgtcggctgagtgagtagctacagtttttaacatgtttaacttacggccttcaaaaattgttagcggactttctctgttgcctcctcagtgagctctgccctttctcgcaactccttgtcgtcccaccgcgcctctgcacctcagaggaaggagaagagtagcgaggccgagcgggtttttagatttctctgtgattacccccagccttgtcttttctgactttaccgtccccgcttggggtactgctttttgaggctccctcggccacatttttgtggttcgtgagaggtttcagttgaggtgaactttttgcccctgtgatcttggacagtttatgattcttcatatctcagtatcatcttctctaaagcagggttgataatattttttatattagtaatatataatatattctaatatatataatatattctaatatataatatattctaatatatataatatattaatattatcaaagcaatgttgataatatttttcacatttgctatgtgcttataaggcgcccattgtatgtagagtgcgttgcatatggaaagcagagtgaacataatggatgtttgtaatgatagctatggctttggcatcatttttgtgtctccccatttttttctaaaatccctggaatggttcgggccttgaattccgacagaagagatttaggtggtagcaaagcacgtccaacatggagtttgctgggcctgcacaacttggagcttctctgtacccttttcttcagagaacttttagaacacaaccctcaacttcccgtcttctggattctcttcctagcactaagcaatgatctttgtaaaaatagccccactgacttatacgtctttactatctgaattttatcaagagaatcgaggggggaaaaaagaattttgaataactagttctagaaggacaagaactgttcttttaaaaggaccctgaaaagctgacagtcctcttgtagtttcttcaccatcgttttttctgttcttttcgattagtataattcaactaaatcaatggtacccccctcctttaattaggctcatcactagattaacataattttgtgtatatccatcttgtttattgttagctgaaaacaattttaatttaaaaactaacgttaagaactttccgtcatagtcttttattatttaagacacccaaaataatgtttcttaaacttggtgaaaaattctttttcccttacgataaatgcggaagaatatagcctccaaaataaattattgaatgagtgaatgtcataaacaaaaagcaacaggagttaaagtgtaagtatttagtatacgataaaagatttcatatcagtggaaaatgattacatggtacagggataattgtaagctatatatataatatactatagctatatagctatagtatattttatatatatatatatttttttttttttgaggcggagtctcgctctgtcattctggctggagtgcagtggtgcgatctgggctcactgcaagctccgcctcccgggttcacgccattctcctgcctcagctcccgagtagctgggactacatgtgcccgccaccacgcccggctaatttttttgtatttttagtagagatggggtttcaccgtgttagccaggatggtctcgatctcctgacctcgtgatccgtccacctcggcctcccgaagtgctgggattacaggcatgagccacggtgcctggcccattgtaagctatatttttaaagaatttgtatcttatatcatacattgaaaataattcagatgagaccaaaaagaaaaataattggaagaacctatatgtaaatataaatattctg

SEQ ID NO: 585346 - DNA, 4001 bp, Homo sapiens
ccacggacggaggcggcagacgggagcccggaggaagggcgggaggcttgcgtggaaacgagaacgcacggacgaacgcgcaaaacccctcaagcctttggccgcccttccccgggcccggccgggccttcagcggtttccctgcagcctccacgcgcccaggacccggctcccggcccccgcggtcccgctgagagccgaggcctcctttcctcctcctgcggctccggcgacgccacctgatgcctccgccgcccgcccgtccgccccgcgcggtcccctgggctcgcctcggaggcggcgccggggaccccgggctctgtctctgggccctccccggcgcgcccccgccggctcccgaggccggagaccttgaagagcgcggcgtcctcctcgcggttgtagtcctgcttgcccgcgtgcttccaggggatgcggaagatgctcttctcctcgttctcccacaccagcccggggtacttgccgctgtcgatctggtcgatcagccactggcggagcttcccgttgccgcagctcaccgcgctcatgccgaactctccgcctcggccgccgccctccaggttcatgccccgcgtgccgtccgcgcccgcgcccggggtcctccgcccgctctgctctgcactgcggggagaagagctgcccttcagccacgaggcaccgcactccgggcaccccgccccgatcccctgcgccagtgaccacgaggccccggagtctttgaggctgcgaagcgcgcgcgtgccgtgtcagggtcgtccgggcccccggaagaaggcaccttcgcggccggcccgggcgcatcccctgggcgggcacagccgtccgccttccgagctcggcccccgcgaaggctcctacccgcctgctctcctgtaacgcacccgcagcccaaaggctcccgacacgcgccgctcgtcttgcaccctctctccccacccagccgccacccctcctggccctccttccgcactcactcgcagctctcgcttgccttcgctcactcccaacccgcttctcgccccttccccgcgactctgtcagtttccactcccctggcggcctccacgcgcggaggacctcgcctgcggccgggcgttccaggggcgcagccccgggttcctccaccctccgctttctctgctcgcatccagacccttcgccccgaataggacccctatccctgcccagctagcgcgcactaagtgggctctgcaaacgacaagtggcgcagacgcgggggctgcagccccagtacgggggattccgcgcgcagagcgtccgccggaccccggagcaggcccgggagagcggaggcggggagggcgcgggagagggcgacgacagctgcggagcctgggaggcagggaccgcgccaggccggctaggccaccgcacgcaaggctcggagcgacccaaatgtggagctcctcctcctcctgcgccagcgggtgagcaccgcgccggaggccgccgtgagcttgggccccttaggaacgaagagcaggggaaggagcctcggattggggtccacagggccgggcctgtttctcgcaggcagttgtgccgtcttgtgtgggtgccttggacggccccgcctcagccactcctggggccccgacagtccggttagctcatcccgtccagcttgtggcgaccccgtcgcaggagcgcggagggcaggcggggaggctcgggcagagccaaggaggcgggccttggagcccaaaccagcgcctccggctcagcgcagatggggtgggagtcggagctccaggacggggcgcgctcccttcccgctccgaagccggggtaccctgcgctgccctggaggtcgaacctctggttcgcgctccgggtcctctctggtatcagcctcacacccctcctcctgcccgactccagcccttacctcgccctggactcggagctgagggcagcggtgggtcccaagatcgagcggtgaaactgagagtgcgaggtgggaaagaggaactttatagaactctctggggcggggcctggggcggggcggggcgccgaggcctgtgggggccgggggttggactggggagagggactttgcaagccgagagccggggccggccgggcgggcgagcctcagggccggcgtgaaggctgggggctgccgcggccggggtggggttcccgcgcccttggcgaccctccgcgcgccgcgcccggagagcgcacctccagccgggcgcgcgccgcttcggggactgtcactggggccgtttcccgcgaagggcgaggtgcgaaatgcgaatctcgcctttgcgccaggacctcaggaggccagtcaatcactaaactgcagcgatgtggccagggcgggaaatggggggcgtgtagtagcgggaatctggtgcgaaggggacttcgctttgcagagcgtgtaacggaagacggaggaatggtccaaagagaactggaggtggaggttgcgggagcaccctcggcaaggccatcaccgggaaccctgcctctccgcggtgtttagagaacatcgcactcactaaaaagaaaataggaaatggcccagctcccttgagctattaagcttgattcaaatactgtctctgcgtgtctgacatgcttacatccttttgcatctattaggctggtgaattgaagtgactcagacaatgccccggccccgaagttttaattatcttagcatgaaagagatgggggcggggagaggctccctaaggatccaagtgcttaatcacttccagacttcagttcaccttaaaatgatgtcgttttaacctcaacctggaggaaagcagtttaccagtggggtataaaagcccaaaataggccaggcgctgtggctcaagcctgtaatcccagcactttgggaggccgaggcggtggatcgcctgaggtcaggagttcgagaccagcctggccaacacggtgaaaccccatctctactaaaaatacaaaaattagccgggcgtggccccagctacttgagaggacgagccacgagaatcgcttgaacccgggaggctgaagttgcagtgagccgaggtgggcgacagagcaagactccatctcaaaataaataaataaaagcccaaaataggaataatacttaagtggaccagggattttacatacttttccaagatgtccttaatcgcaaaattaaccccctgagctttcacccgttgagctttcgatcgtctgagatgctgagtatgtgcatttacttcgcattttcaggtaaaccatcagatctctggtttctatatgattttagaccaccaccaccgtaggtcaacctgcaacttttgaaaagcttttgatttcacttatttctcagtttttgttttaatcttatatattgggtcaatgtctcctaaccaaagaagaatctatgtttaggctagagcaaaacaggtagtgaggtatggataggtatgcttttcctaaaaccaacagacgttctcagaaattaacaggatgccattttttatttcacccaagtaagttttccattaccaaagtctatgtaataaacaacagggttttgttcacaaaaagttctggtcacaacctgtttttcttcctttcctttcacagatttattcacttgacaaatgtattttgagcacctgctacttgtcaggaaccgtcctaggcacttggaacacatcagtgaacaaagcaaagatcgttgccttcttgttgcattatattttaatcagtgttacctttccctcaaacgttcacaaacataccagagaggagtttgctgaggacaaaaaatggcaaatgagagctttttgcactttcgtatacgtgtcctctgcaccgggtttagtcattttcaacataccctcccctcactcatccacatcctctgcttttagttcagaacaacagtcgttgtgtgaaactctgagccttcacaccactaccttgtttttaaatgtaattgctaatct

SEQ ID NO: 585347 - DNA, 4001 bp, Homo sapiens
attctagcctgagtgagaaagtgagaccttgtcttaaaaaaaaaaaaaaaaaacaaaactcacaggcacttgaaaatcatcatgtgttcagccccaagccaggcactaagcaacagaggtggtcatttcccaaaagtccctggtgctcttcagacactaggaggggacttccacgatagatccctatgtccctcccagtccccacaccctctcctccttccctcagctttatcagaggtgtttactctgtacctactgtgggcagccctggcctcagggcagccagggcctagtcactgctctctggaggaggcctgcacaaatgctggcccagatgtggctccacccccatcctctagggagctgggaagaagttagatctagtggaagtggggacaaataggcagggattccacgtgtgaaggggagggcaccaggagggacctggatggttctgcgagaaggcgagcagggcaggctggaatgccaggtgagaactccctgcttggcagagccagccctccaatcccacaatccattccctttacaccaagatgaaagctaaactcccagcaaccctgggagagaccagtgacccctcacctcccaggcttggggtgagccgggccctgtccagcatcagtcctgagctgagggtgccaggttgtcctccaaggccatcagaaagaaggcaccacgcggctggctggtcccactcagtggatcagcagaggagggtgggtgtaccctagaggacagccatgtgtggttgggaggatgagacaatttaacccaggcccccagactgtaaacgggacaaagatagccgaccctgccctggggtctggctggagaaaccacctacgctcccatccagcgaatcacatccagctgctcctctgaagataaacccatcctctctacctaatttctctcctgccctctccctgctacaggcctggccctctccagggacgtgaactgattccctgttcatccagcccagaccctgggaggtggcggccagaattaattaatgtttgtgaagtgctggagagaagctagaaccaaggacccaagggcgccagatgaccggcgcaggaaattgaatgggagaggcggggagaaggggcagctggccaggaccttgaagcctggaaggggagggctgagaagacactcctactgaagctgggaagaacagggagagagctgtgaggagaaggtgcgacccctcaaaggcaccacgggatcggtaatagaggattacgggctccaagctgagcctgcccactcccgacagctccgccctaccctcagagccgggcacgtctcggcccggctgcccttccccaactcagcctccagccacccacctgcccgcccccgggaccacctgcaaaggaagcctccgtccctccgccccctccaaaggcgtgcgcgggagggtagaggctgcgccgccgagggaggctcctcctgccaactccagtagggagcccgagtcctacctgagcaaacacttcacttcctttctgtaaaagaaggaggcgagccgttcccgctccttgagactagggggacgtccaggcctctatcggggggcggcggctggacgcacgcagctggcaccagggcccacggcgccccctctttacccgcgcccctctcgagctcggctcactcaccccaaagtgctgatgaagccattgacggagccctcggcgtacagggagacgatgtccccgatgtgaagaaagctggacatttcactcatggctgcggccctccggggcccagggcgtggggggcgcctaggggcgcgtggccaagctcagtgcggaggactgaggcgtccggggagcggggaggggtacgctcccacctcggatcccgacgctcggtgcggccggggcgggctggcggccacgggagccaggaggcggctcggcggggcccggggtccgggtgaggaggtgcccacgtcttggcgcgcccgccgcccgcccgccccgcccggcccgcgcgtacctgcagcgtagaaggagcaggaagtctggggccaccacacacatgcaaatcccgcccgggaggcggggaggccacaccccgccccccctccccccgcagctcgcccgccggcacccatgtgcacccgcctgccttcccgcgccccgcgctcctcgcgcgtccggggcccggcctcccggacgccgaatgcgccgccagccctcctgatctccagaggcgtcctgcaaggcaccgggtctagggggctctcggagctgccatccctgggaggcccaggcgtagtggggagctctccgccctcggggttcccggactatctgcacccgggccctcggctggctaagagccagtgcaggcgcccgcggaagggggagtccagctctccggcgggcgtcaccccggagccgctcgcggagggcgcgccctggagcgccctggccgcggccgccctgcggccaccgcgcggtctccgcgcccagctgagagcaggctggcgcccagaggcgcgctcatccctttgcagagcaaattcgggattcatttttctcaacgtgaaaagccttttcattgcacaatagaaagtgctcaggcttggaggggaaatgaagcaatggggtgggttttgttttttttctctccgcattcctgtgtacaaagagatccaacttccgaatcagttcagccgctccctctccaggagttggctccaaaactcttggctccttccgtctttcctttcaaaaaaaaaaaaaaagcagggatgaaaattaccttcgctagttgacagagcacccaagcgctaacgatgccaagtctgggtgccggccccctgggagtgacccgctgcggcagcgccgccaggctctggctcccgaagtcctgccctcaaattcgcgtcccgggctcgcttactttctgttctgttccccggtgcttgggtgtttgcttcctagtcctttatttgaacgcctaagatagggtgcccattgccaccgccatccgatcacttttgctcccttcggaccccccaaccccacttcctgagttgtgggggggcgtttgtccctgggagagagggaggaggggactcggtgactgaagcaggaagaagagaggctaggggaggggtggagacagctaaaagcaaagagacagctgctgaccctgggaggagaagagccccaggcagtggtttttttgttgttgttgttgttttgtttgtttgtttgtttgtttgttttacgaagacccccaggaacgatgtgggagggaaggacacctccaggatcgctaagtaccgtgttttacagttttgttttgttttttcaccatggcaaacagtaacaagttttacagcagaccagtccacaccttcgtctatatataagcaaaacaatagatcaccaaacaatacttacttttatgacctttgatgcatgctgatattttctattctatttcagttgtgttcttgttgttgctttaatgctgattgtaacccactgaactggttttttttaatgtcccaaatgggttgcaaactgcagtttaaaaaacctcatccagtccactgtgccaaaaagagatgaccaaagcccagagaaggaacaccacccatcaagggcacacggcaggttcctggcaactggaggcagaagccaaccaagcctctgatttttagccgggtattctcctattaccccacaccaactgagccacagcgatgggtcactggaacctcactgagaaggggcagcccctgggacagtttcacttgctcccaggagtcaggcctcctgtatcatccccaaaagttagaagggaaaaatatgccttcattccataagcatttattgaaggcctgtgatgtcaggcctctgctgggcaccaggctctgatcaagctgtcagcctgggcccaattgcctttttcccttccccagaccgtgaggatgaagagggacaagttga

SEQ ID NO: 585348 - DNA, 4001 bp, Homo sapiens
tgtcctcgatggaactcaacatcttcccctttaagctggatcctcattccctcacccacttatgatagcttccagtctccaactctccctctctcctccttttcccaatatccaatttactagcaaaccctgttgctcttccattaactttactctgatccacgccttccactgcattcccacctgcccccaccatccaggccatccttaccagcacaaaccattacccagcttcacagcagatgttccctggattaagggaagtgcttctccgctgggtagaattgacgttctgagtggaagaggtttcaatgtaggagagcaagaggcagccctgctgagaggctagactcctgtacggtgcagtcagcactacaggctgttagcactgagagccagctggacaccctgcgccccggtcctgagattaggacacacactcatgcacacactctctcacaaacacactcatgcgcacgcacacacacattcatgcatgcacacacaaactcatgcatgctcacacacactcatgcacacacgtgcacactcacacgcacactcacccactcgtgcacacacactcatgcacacacactcacacatgcacattaatgaacactcacatgcacgcgcacacacatccactctcatgcacacacacacacgcacgcgcacacacacatgcacattcataaacacacactctcacacacatacactcacacacactcacatgtccaggtggcctctgtttggggatgggggcatcattagcccagctgaagatcacagagcctcttccaaatcgaacccatcccagacaaagcttctcaaacacagatggctcaagcttcctccacgctctctcccttcctacctgcctccttcatcacctcttcttctcaaggtggccataaccttcccgccctcaattctctacttccattcttaccctctccctccaccctcaattctccacttcctctcttacccctgccccaggcctccaggtgcttctgctcctttggctccttgttgcctgacaggcctcccagcacttgctatttgtaccctattcatcctcccagcctggtttgtcctttccctgactgcaccgtcaaactcccaggcctactctaaacaccttagaatcagttccaccgggtctgtctctttgttactctctctgattctagtgtatcatcttggcagctgaactggacattcagtttgttgaggacagaggccatcccaggctttcacttccagggcctggcacagggaaaggtagcagcctcctaggtgatgccacttggtagatttcaaagttcctgatcaaaacctggcctcttagtccctgcccactgccagcctgggatgaattcctgcagaaagattttaacaaccagaacagaattgtagccagggaaaacttcagcctctcaacagctttttcactgggcatcaaaaataaaaaagggttggtcccagcaggtgacaagctcatcactggagagagatgacctgtctgtgccaagcactgattcattagcacaatagaggttgatgttgaagctggcctgtgtgtgtttcttcctctccataagccctgccattgactcacactcatcatcaacacaacacgacagcgaagctaagcagcatagctggtgtctttaccttcttctgcttggtgcaggtcactgctgtcttttaagtcttcatccacccaggggcgagcttcggccctggttctaggctcccccttctttttctccatgcttctgtcggcatttttaaagatccacacaaccaaaatgcagagaatggctaccaagatgggagtcaggaaatacatggtctggagtctgacgtcacaggcgtgcacacttcccacaccggtttttaaacacacagagacaggagtggagaatgccgggagatagaaggaatgcagacacaggtgtgccagggaaggaacaaagtgcagaactcttcaactctgtgaggactttgcaaaggagcaaagatcacagtcacatgtgtggggtgttgtggctttggttatacaccagtccattaactttttaaaagtatgtactctgtcgatatattcttagacaacaattgccagaatctgagtaagaacttgcatgtgctagatctagctagatcacctgaagaacttgtttttgtttttgttttttttaaatagatttccacacaccaactcagatctgctggaagaaaatgttcaggaaagaggtttggcaccatgcattttaaatggcatatttgtgaaaacagccctagggttttgattttttttttatgatacctgagccaatatatggagtaaagagaatatcatgttttgcatcagagaaaaactttgatccaggaaaagtgacacaaaaaattaaagtgacaacttgattatgtaattacttcagtagggctttttatgtgttagtttgtctgtctgttttagaaagtgccttagtcagttatggctgaaataacaaaaatactatggaccgggtggcttaaacaatataaatttatttctcagccaggtatggtggctcatgcctataatcccggcactttgggaggctgagaggggcagatcacttgaggtcaggagttcgagaccagcctggccaacatgatgaaaccccatctctactaaaaatacaaaaattagttgggcctggtggtacatgcctgcaaacacagctactcaggaggctgaggcaggaaaatagctccacccaggaggtggaggttgcagtgagccgaaattgtgccattgcactccagcctgggcgacaagagtgaaagttcctctaaaaaaaaaaaaagaaagaaagaagaagaagaagaaaaagaaaagaaaagaaagaaagaaagaaagaaagaaagaaagaaagaaagaaagaaagaaagaaatttatttatcatttatttatcatagttctggaggttgagaagtccataattaaggtgctggcaaatcagctcctggtgagggctcccctcctggtttgccaacaggtgccttcttgctgtaacctcacacagtggatggtggaaacagatcatctctatcatcttttttcttataaggccactaatctcattaatgagggctccactctcatcacctgttcacctcccaaaggcccaacctccaaataccattgtactggggcttagggctccaacacatgaattttgccaagacatattcagtctttagcatcaaggtgcaaacgtatgtataacatgatgccatttgaataaaacagagtggaaaatatgatacatttatacaaacttatatatgtatttcctggaaaagcatactctaaggagcggttatatcaggaattctctttattaattttgcaatttcttgtgagtctatattatttcaaaataaacagtgaaaaaaacagtggttacttgttttggagggagtgtggaaactggatagatgggggacaagggtgagagaatttctactgaatactattccataatttaagtattttgagctgttgtaaatatattatctatttaaaaaattgaatatgtgttatttatttcaatactcattttgatggttttattgtatcatatattgtaatactcctttttgtgatagacagttgttttttaagatgtatatcatattggttctctaactccagagaactctgtagaagataataaacaaagtttattatggaagcactggcctccacagaccattgaatttggtggtgctgcctgccatgccgacagcttttgtacaggaaagtgccctccctgtgcctgctgaaagggtgtcagaggggacatgtccagtccatgtgatccaaccccacgcaggcagctgaaaatggcagagcctgtgttggggcccagcttctctttacatcccactaaaaacacagaataaagaaaccactccatagcaagagaagagcaag

SEQ ID NO: 585349 - DNA, 4001 bp, Homo sapiens
agtttaacatttggagtacggtatatattaacactggagttatttccaaggcacttggaagtgcgtcaatagccttcagcccagcaacagggactggtttaacccactatgaggaaacaggcattaccgagtaccaaataattctagttgtctatttgggccagtggctacagggacacacaagttaggtattagcctactgtaaaataatataacctggataataaaccaagttggattacttgtcgacataatttttctttcaaattttagtgacactttggacttcattgtgtcttccttccatactgtccctgtacagtgataggagctaaactgccactgccctgcacctaagtaacacagagcaagattttccactactagaaacaagtaactgaaaagccacgtaaacatcccaggaaagaaaaaatacagcaataaaataacgtgcaaatttccccaccaccccaccaactgtaaaataacgtgactgaacaatttgtgatgaataagttttaaaacaaaaaacctcataaatccaaccactgtatattttgtgttcttcctacttttttctttgtaattttacgtagttgtaattatagtaaatccttttgaagcttataacaaaaactttttccaatttttaaatcatacactttcaaatcagaaaattagatacttaaaacttacagcctagtggtacaaattctgcttgagctgtcctagaaaatcaaactggcaatttgttttcatgctaactacaggaattactatcttcataaggcagagattctctatttcaaactgatacctgatcaaatagtggtgaagccccagtatcctatctgttattctccctaggaataaccaggcagtggaatgatggaaacggcagaaaatatctctagagcaaaacatgcaactgtttttattgtccaagtcgattggggctttcaaaggcaaatgttttcagttatttaaggtattgcagtgggagtcgtgctcaacacaattaagacaggattacactgcaacttatgagtttctcaaggacatcatttattacgaaatataacaatcatttctcccaaagcctactatcgacaatcgcacccccaactctgctttgctaaggtaataaactaaatggcaactcagcaggcatcccgggcttttgagaccaattgtgggaaacgtgctgccttccaccagctcaagtaataatgccaccttacttataaagaggcatactgttttacatcttccatgcacatgatcttttcagtgacttagttaagtggcaatggcaggtatttttccattttacaaaagagaaaacagaacgccagcctctggtttccctgctcagaagaactaagcccagagcaccttgagacttaaaggagtcctgtgctcttctcagtacatttatcaatgacaagtcttcctttggtccagccccccaaaataacagtcagtaggtacagagccggcacagcaaaggaaagcccccccaccgtagtaccacaaagcttccagaaagagcaacagttgctgctgtgcagcatcatcatgaaaggcatccggccacatcctgctgaagcacccctaacacgacttcaagtgacaaggtggccaaatccacaacgcggtcctccaacaaagcacagctttccctgaatactttcatttctttacataagcactggagaggggacacatgcaccacgctagtaatgcaacaccatcaggagacctggaacagaggaagtgaaaacattcctgcagaaaggaggcgcctcctccccgctccccgcttcccaagtggcatcagaacagggtccagtggcactcctttggggacctacggctccccggccctcacctggtgggaagcgcgacgctccggagcggaaggcagaggccgagcgcatcttcctcctcttcctcctcccacgccgcagcccggctctgcggcagcccccgcccccgcccagctccctcctccccccgccgccccgccgcgcctggagcctcccgcccgacttttgacgtcacggaggaggaggggaaggttccacccgagcccgtccctttgtgacgtcacaatgacaacagagtgcggccgggagcgtcggggaaccgagcgccgcggggggcggagggagggaagaagggctggggcgccggcgcgcggcgggggaagaaccggggggcggagagggggcgcgctgacgtctcgccggcttaacctgttgctctcgagactgcgtcggagcccgcaggcagggccgcgggaagccggccgggccgccgccgccatgctcggccgtgtgcgcggtggggggcgcccgctgcagctgtgcgccgcgcgccccctccccggcacgcccacgcccccgcccccgctcccaccccctccccgcgcgctctcccctccccgcgccccgcaggccgcgccacccccgcgccccacccgccctcctgcccgcctgcaagccggcccgggtagaccggtgcccgcctcgcgcgcccgcctagagcccggagtatgccccctataggccgcgcgcgcgcgcccgcccgcccagccccggcccagcctgccgcgacccccgcgggccgtccctttcgcagccggctcgaggacgtcgggaacaccggctctgctcccggtgcattaactcgtgccgtgcctcccgcagccgccgccagccacgggcttgcagccggacgcccggactcggagacacgatccgctgaacgcccgcaataagaaagaaaacccaccccacgctgctctccacctcaacgaggtccggaatgggaggcggggtgcggttctcgtccaagttctaccccatttgctttgtggctgcatccgaaacggacgtgccccgggaaggcgtccacgctccaagacaaggttgcctcagtgcagtttctacagcccgagtttaaactagtcctttgcattctacccagccctctgcaatgcggatgtattttaattcttaaattctttatggaacagctttctaagttgggcttgattatttaaccttgcatttctttcatagttgaagttgacgtgtctagataaggatcagctctcttgaagaggcattcagcttttccattaaatatatttttttacaaaaccagtgccccgaaggtcatctctcattacacacaccacaatgatcaaaaagggaaaatattaacaccaatttgtctacccaacttaaataaactttcctcttacgttgcattattcctaaggtatgttcatttggccttttttgaaaaaaaaaaagagttatttaatttaaagcatgcagctaatcacagatcactcgagtgcatatttggttaatccctcggtccccctttcctccctcccctcaaacttaaaaaaaaaaaaaagccaccacacacaaaacaaaaacactccccatgccaatcaaaacgtagctgtactatgcacaaaacaaatttaactattccaagccatttaaatctaggaataatcacccaatttcagaagcccagttaacagggagaaattatttgtagttacttacatatgcattcacgtacacacttaaaaacattagccatagtgtgtgtccttttcccctacaactggaaaccatgaattttttaaacaaaaccagcctcattattaaagtcaatcccaacaaatgcattcgctgtaacatgattcccaactggtttatgttgcaaaccagataagccaaaacgaccacagacattaaatttgatgtgccagtgcaaagagaagatcgccataatcggaccctcgatcgcaacttaaagggcttccaacacacatgcgttacacgatttttccaaataacattaataataataacacaggctcatttgcatgcaaagtgcaatacggggccaaatccgcttgagaatgcagtttagttacattaccgcagccaccccccacctcaagctccacc

SEQ ID NO: 585350 - DNA, 4001 bp, Homo sapiens
gctgcatccgaaacggacgtgccccgggaaggcgtccacgctccaagacaaggttgcctcagtgcagtttctacagcccgagtttaaactagtcctttgcattctacccagccctctgcaatgcggatgtattttaattcttaaattctttatggaacagctttctaagttgggcttgattatttaaccttgcatttctttcatagttgaagttgacgtgtctagataaggatcagctctcttgaagaggcattcagcttttccattaaatatatttttttacaaaaccagtgccccgaaggtcatctctcattacacacaccacaatgatcaaaaagggaaaatattaacaccaatttgtctacccaacttaaataaactttcctcttacgttgcattattcctaaggtatgttcatttggccttttttgaaaaaaaaaaagagttatttaatttaaagcatgcagctaatcacagatcactcgagtgcatatttggttaatccctcggtccccctttcctccctcccctcaaacttaaaaaaaaaaaaaagccaccacacacaaaacaaaaacactccccatgccaatcaaaacgtagctgtactatgcacaaaacaaatttaactattccaagccatttaaatctaggaataatcacccaatttcagaagcccagttaacagggagaaattatttgtagttacttacatatgcattcacgtacacacttaaaaacattagccatagtgtgtgtccttttcccctacaactggaaaccatgaattttttaaacaaaaccagcctcattattaaagtcaatcccaacaaatgcattcgctgtaacatgattcccaactggtttatgttgcaaaccagataagccaaaacgaccacagacattaaatttgatgtgccagtgcaaagagaagatcgccataatcggaccctcgatcgcaacttaaagggcttccaacacacatgcgttacacgatttttccaaataacattaataataataacacaggctcatttgcatgcaaagtgcaatacggggccaaatccgcttgagaatgcagtttagttacattaccgcagccaccccccacctcaagctccaccaaaatcccttgcctttcatctaaaagtagattatggttgtgtcattcgaggtcaatttattcacttgaggtatctctacaccagtctgttttttcaaccaaactaggcagacaccactttgcttgaaaagccctctttcagaaaaaaaagaaacagccttatcggacgctgtgtttaaaacccttcagaggcagaattatctataaacttgacattcacagccattgcttaaaactgcaagtcaaaggatgtgttgttaggagcacttacgtatttcttctgaatgatattcctcttgggtctttccttgctcattctgagatccaaatgctgattgcaaaaggggacaattgcttcatgaatttaaagccgtcagaaatttgcaaaaaaatatcctggtggtttttattgttgttggtggtggttgatcttgtaatccgacttttcttcctcttcccccaaagccagattcgccttgaaataaatccgaaattgggaaggaaaaaaaaagagccaaagacgaacgaagcaaacaaaaaaaaattcactttagtaaaacactcataatggaaaatttcccccgaaacacatacacacacacacaaaaaaaaaccgacgcccttcactcccccccctttttcctccaaaaactacatcagcgaaacgtgaaggtccttagtgtctgatccgtagttacatcttggaaaagaaaagggaaagataaataaaaaatgttggaagtcacgtttgtgctgcagcagcagtgcgagcagaagagtcaactccagcggcggcggcggcggcggcggcagcaccacagcgagggctcgccgagtctcttttttccaagccccctaaccaatgagagagaggctatccagcccaactttaaatggactctgcttttatacaagttagggctcctcggataattccccgccgggcgccagccgaaaactcccaccgctcagccgccaggcgcccgcttagcctggtgccgaccgcccctggcccagtccagggcacccccgcagcctggccaaccagacacccgagcgacctcgacgaacccctcccaggcaagccctcgggcgtcgctcccacgccgagcccaggcgtggaattgagagaggctccctagctcaatgcatggcacgctccgtcgctccacctcaccccctttcccctgcctgccgctcaccccacggccgccccacgccagcccccgccactgccttcgcgtctacctgcagccgggctgctgggtaggagtgccccaggacgcccggccccggggagagccgcctattcccggggcaccttagaatggtccccttgatcttctggaagttgtagtcccccgactacaaaatggctatggccacggaagctgggaactacaattcccagcctgccccgcaaagcctgtcactcaactcccctccctcctcctcgccccctccccctcactggccgtgccaacaaacgcttggacgtgtcccgcgtgcgacactgctagaggctggctcgggattggcccgcggagcgtgtggtccgcgagcgaggaactccccacgccggccctcctccgccccccgggccccggcccccctcccctggcggccgccagccccctccccgcgcgccccgcccccacccgcggcgcgaaccgcctgtggaatcgaggaatcgcgcgcgtgcggcccggagccgcgggggagggacgcgaggcttccccggggaaggcctcggagcgtggcggtgaggggggcggtgtcagggaggggttggagcccgtcctaaggaaaactgggccacgcaccaagaggaatcctcggtgcgaactagttgatcggcggcgcctgctgcttgtgccgtgcagccggtgtcacctcaggacagcgcctcgcgtctgtgtacagagcgtgctgcgggcgcctagggtagtccgaggtcacccctctccgcgccccgcagtcgcgcacgcccccacgcgcggggtgggcggtggccgggggtcgccgagtggaaaggccacgcccccccacgcccgggctcggcacgctgcccctgggtcgcgaacgcgcctccgctcgacccgcttggaggacgtcgctggtggcccaggagtgaagccccggcggctgcctcctgagaaaagatagccgtgtttaaagagactgaacgggatctttgctttgccgggcgtattttgtgataaaataccacaaaatgttgagacaaaaatgagtggaatatggagaccgagccgcacagacacgcaattgtaaggaaacatctcgaacaccgagtgccaggaatatcaactgtccgggccacgcaagagcctgctttttacctgcctccagccccctgtcgtgctggtttaatcgctgaaacaaatgaagtagcaggccctggcatagcgctttgggccttcgccttattaacaactttgtcaagtctcgcatcgcgattctgccttgttaatttccttgtttttcgctgtggttttggagaagcaatgttttccatgatctctcaggctagcctcggaataaaacgtggcagaagcgctcccgcgaacacatacccatatattttattctacctattccctagagtctgctaacttcaaaagtctagatactcacacagctgtttacttgcagcagtatttgaagagataaccttggtgtctagaaaggtctcagaaactggaggtaagagacctggattcaaatcgcgccttggccacttcccaaaaggcaaccgagagcctctctgagcttgtcagtttccgcatctgcaaattagtggtgatcaaacctgtggggatgattatgtgataaataacagtaacctagtttaaaactaggc

SEQ ID NO: 585351 - DNA, 4001 bp, Homo sapiens
atattatatatataaatatatataatacatatatattatatatattatatataatatataaatatatatataaatataatatatatatttatatataatatataaaatatatattttatatattatatataaaaatatataatatataaataaataaataaaatatatataaaataaaatatataaaatatatatataaaaaaaatatatattttattttctaagacagggtcttgctgtgtcgcccaggctggagtgcagtggcaaaatcataggttactgcagcctcgacctcctgggctcaaacaatcctcccgcctcagcctccgagatagctgggtccacaggcgaataccctgcccacctactttttttttttttttttttttttaattgtagagaccgggtcaggctggtctcaaactccttgcctcaggggatcacaggcgcgttatagagacgggggctttccctgtgtttcccaggctggtctagaactcctggtcttaggcagccctcccgcctgggcccctcaaagtactggaatttgcaggcgtaagccaccgcatctggctttgcacatttatcttccagcaaagaaaaacctgggcaactacatccaggaacttaattgctttaatttgggagcaagcaggagattgaggggtaaaggtgcaagaagagagaaaagaaaaattaggctgtttggaaagggtagcacagatatgatgtaagaaattgggtttcaccatatttgtgtgtgtgtgtgtgtgtgcgtcctcctctctcctgccctcactaggcgtgcctgtttgaaggccccgcgcgtttccggctcctgctcagaagctgtccaccttgattctgcccgtagcaggtgaacctggtgtggtgcgcgcactgcgggtcctgattggctgtgcacgccacggtgaaaaacttgagcgtctactccgagtcctgcaagctcctagtgtctcctctgggtggacgcctaggcgcacggccgttacttctctttcacctgtggattcgtcagtttctcgttcgtttcaggaggcgatcccgcgccctgggtgcggtgaggccgctgggacagcggaggtgcctcccgacgcgaagcagcgagctgaggcggcggccagcggggaagatgagcggcagcagcgccaggtccagccacctgtctcagcccgtcgtgaagagcgtgcttgtgtaccgcaacggggaccccttctacgcggggcgccgcgtcgtcatccatgagaagaaggtgtccagcttcgaagtcttcctgaaggaggtgaccggcggcgttcaggcaccctttggggccgtcaggaacatctacaccccgcggactggccaccgaatccggaagctagaccagatccagagcgggggcaattacgtggctggaggccaggaagccttcaagaaactcaagtgagtcggtctcccccaccgcccacccatttaggtgccctatagtgtggggttgatatgaagaaatgcagatccctacccccccacacctcagtggttgaggggctgtgacttctcggtgtgattgatgcccctcaaaactctcgttgcagttggggggtagaggttgacactgtgactggagaaggaatttcacttgggtcagcagtaggagtaaacttaaaatctgtgtataaacaacaggaatcttaaagaaaataaaaaggtatccttgcaaaggttagtgaccaaactgatacttttgcgttttctgttcagttttttctttccttttccttattttttttccttggaaatccatccttttaatttaaataaacattcttaaaaatcacttccaagtgttggacactatattgtcaccagaggagaaaattgctctgcatttcccgtactgtttaaattatttcaacctttcattccaagtagaattgacaacactcacttttgtgaccctgctcccaccccctgcatgtttatgctgttagcataatgcaggaagagtttactggctgactgtatttgtcgactgtctgtctccagcaacgtgattagaccttcaagggcaggggtccttattcccagctcttgagctcactcatagtgagtgttcagtgaattaagaaaccgtcagttcagggaacaaagatgagcaaggcatgattccttgtctttaggagctttcagtctaactggactacctgcacactaacaattttaatgcaagctacaaagggatatgtgcatagaaaaataaagttatgtgggaattgtgagttgagagttggttggggtggtcattataggacaggtagaattttacattccattttttttttacagctttattgagatagatttctcatggcatgaagtccaaccatttcattggctttcagtgtattcagagttgtgcaaccatcaccaccaactaattgtagttcatttccacccctcccgccaaaacatttgtacctcccagtttcctctgtcccctgtcatctggaaaccactaatctattttctgaatctatggatttgtctattctggacatatcatataaatggaatcatacggtatatggtctttatgtctggcttatttcacttactgtaacattttcaaggttcatccatgttgtatcatacatcaatacttcattctttttattgttgaataacattccatgatttgggtatattaccttttatatccatgcttatccatttatcagtttgatgtatatttgggttgtttcacattttaactattatgaataatgcatctatgaatatttgtgtacaagttttcatttctctttggtgtatacctaagagtgaaattgctggatcacatggtaactctgtattccatagtttaatagaacattttaattgaaattcatcttgggccccaggatagaaaaaagccttgaccataaatctaagcttatgaattcataagcattattggattcttaataattaaaattcaaataaagtcttataactacatagaaatatttttcaaaatatcactaaaattcttgaatgtaatccttcttctcctatatttgtttaaattgagttctaggtattctattatactttttgttacgtcagacattcttttcatggaaagtgagggatatatttggatttatttttccctcccctgaagcttcttaagcatgctttgttaaacttcgtaaaaaagggctaaatgaaattgcatgcttaaaggaaacttaaaaccaggagactgaagactgagttgctcatcagctctgtgtccttgggcaagtcgcttgactcagctaatcagtttcttaatacagaaaaggtgcataatcatttgtaccacacagggctgtgataaaaagtaaatgctatagatgtgtgttttgtaaacaccaaagtgttacataaatataagacacctctatgaccagttccttttgttacatactttattttttattaaatatttccgtctaaagcaatttcgtggaaatgaaagtctggttcagaatctctgaacggctgaaaattgtagactcacttttatagttcatgttcttttgtttatttgatcctaccaactcacaagattaaaaaaaaaaggtacagttccacaccaaataaaaaagtgtactcaagtctctctaagagatttgcatgttatttttgctttcagttcatacacaaaaaactgaatttgttataacagtgtccatggttaggtttccatgctgacagatgactattttatttgtgttaaagaagtagtatctacggttataatgatagaagccaagaatacttgaatgttgaatatatttgaaacttagcacttataagtttatgtaaagaatggagaaactgtcagaacaaaagaaagcccaaacgatattgaggacaattcgtgggctttcatttagaccctaaatgttgggaaagacagcaacatctttttcaaatggaactgatcaaat

SEQ ID NO: 585352 - DNA, 4001 bp, Homo sapiens
aacgccacaagcaaaagctatttggcatgttatcaacactgaccatatttatgtgataatactatcttttttaaacagtcaagtggctaaaaaaacccaaactattgttaatagaaattcaacaatgttgttaatagagtgaattcaacaagattctctaatcctcaatatttgtcagcatcttgataccagtttcaaaatgaggtggagaatcccttgtggactacatagcatgcctattacctataaaaatgtaaacgcttcttgaataaccaacgctataaagaagctttatatagcttttcatagtctaggaatgttgggaagttgatcactactgcgtgtttttttttttaaaggtatttacaggccacaacttgttaatgttaatacaaaacaaagttttgctcctatttcttggtataagaacaaaaaccggccgggcgcagtggctcacgtctgtaatcccaacactttgggaggcctaggcgggcggatcacaatgtctggaaatcgagaccagcctggccaacatggtgaaaccccatctctactaaaatacaaaaaatttgccgcgcgtagtggagcgcgcctgtagtcacagctactcaaggaggctgaggcaggggaatcgcttgaacccgggaggcggaggttgcagtgagccaagattgcgccactgcactccagcctggcgacagagcaagactccgtctcaaaaaaaaaaaaaaaaaaaaaaaaaagaacaaaacccagctcttttggaaaagaaaatagggctttatactgagacatttaagcccgtaaaaacatttcaagaatctgtcttaacatctactaaggtgattatcattgtgattacgtgacaaagatctactgcacccattctaaaacatcgggaatgttttcagcaataactagaggtctaatttcaaagaggaagacgtaaattagtgctttcaagagaaaagagcatcactgtgctgttggaagttagtaactaatataaaagcggcccttcgcggttttaacaggaaactatttttgattaaataagagcttgagattatccactgtaaggcacttcaggatctacgtttatctctaactttgtcatcacatttgtatgaaacaactgtttcgagggaaaacttttctaaaaggtaccaactctaaaccaaaaggcccacaggccttccagaggacgccgggctctagaataaataagaaataacatccccaacaatatcactcgaacctaacaaattttaagaaaagaagttgcctcccaatgtcatggccatcgggatttttacctgtgagggtttcggggtggggggcgtgagcgggttctggagagaaccagtcgaaaaatcgaagaactaaaaactcggctggtgacttcgctaacgacacagatcaaaagatgggatcgacaggagcccccgaaaagtcctccgcctgacaggattcctcaggtagggggactgtcacctaagccaagttatcgtggacaacagcaaggacctaggacctcagctcaggcacaggcaggctcacggagggttgcgcggcgggttctcgctgtgggccccccgagtccctcaccagcccggccctggaaaatcgggggtccccagagcaccgccagagtgaaaactcacctgcggcggcccaagctcctcgggaaaccgcccaacgccaggcacaggggattggcggagtggagatcccggcagcgaggaaggagggcctgacccagtccagcccactttgctctccgctcacggccccagtactgcccagttcaatcgtcaacaccacctgccggcgcggctcctgctcgccgagaatttgaagacaaacccgccagggtcacttccggtgccggggacgacctcggcgactctggcgcacgcggggcgtcgccccgggagcgaggtcgctgggcgggagcggcggaagagggtgtggccgggcccggggccgcgcgtgcgcattcttgcaccgcctcctcccggcggacgcagcggagaccagggatagtatagaccttggtgtagatggtattatggtactacctcgcgcgcctctgtaccttgttcaggtgcttgctcactttccctcccacttgattttcaccacactcacacacacaccgaggtcaggtgtctattttagaggtgaatgtccaggatcaagcaattcgtttatgacaaatcctgttttagaacctagtattcagaattccccagctgggctccatgtcatgacataacaatagggaggaggtaaacaaagattctcggacacactgctagtgggattttattttcttgattttttaatcaccgttttaatatgaccagacaaggaaaatgatgctatttcatgacttacagatatgtactgcacagggcttcctccagtctcaatctccaccctctgccatcacttgaggcagaatagggcacttctcacacattcctttaaaaacgcaaggtaattaagtttctaacattaaagcatcccgactgggcacagtggctcatccctgtaatcccagcactttgggaggctgaggcgggagaatagcttgagccgggagttcaagaccagcctgggcaatatagtgagaccccccgtctctacaaaaagtacaaaaattggctggacatggtggcgcacgcctgtagtcacaactactcaggaggctgacacaagaggatcacttgagcccaggagttggaggctgcagtgggccatgatggcgccattgcactccagtctgggagacaaagtgaggccctatctctaaaaaaataaaagcaccccagtcatctaacatagacatgtagaagcaattcaggggaaatacatccattcagtcaacaaatgtttactcagcaactactatgtgtgagacagtgttggcactgggtatacagtggtcacgaaatagaatgtttcatggggcttaaagtcttgtaacgtctcaactgagtggaaaatgatagtttcactgtagtaaatatgaactctattgtaatagggaacaggaaactatatttagtatatatttttggaatcaaaaccaattcagggaggtacagattaattaccctaattcaaccttcatcctttatgtgagttcaaaggtatgctaatttataaagccaatttacagttaaaaaacttctcaaaggccacaaaattaatacatattgtatgattccattgataagaaattctaggccaggcacggtggctcatacctgtaatcccagcactttgggaggccgagacgggtgggtcacttgaggtcaaggcgtttgagaccagcctggccaacatggtgaaaccccgtctctactaaaaatacaaatattagctgggtctggtggcgcacacctgtaatctcagctacttgggtggctgaggcacgagaatcgcttgaacccaggaggcagaggctgcagtgagccaagatcgcgccattgcactccagcctgggtgacagagcaagactctgtctcaaaaaaaaaaaaaagaaaaagaaaagaaattttagaacaggcaaaactaatctataataatagctgatcagtggttggctgcctgaggctgtattcaggaggagggggagaagaaatagattgctgaaagtccccaggaaatatttaaggtgatggaaaggaaatgttctgttagggtagtgcttacacaggtgtaaacatttattaaaattcatcaacagtacacaaactgggcacattttattacgtgtacgtacgcgtattatatatgaagattttttgggtttttgttgttgttttgagacagagtgtagctctgtcgcccaagctggagtgtagtggtgcgatctcggctcactgcaacctccacctcccaggttgaagcctcaccctccccgagtagctgggattacaggtgcccgccaccatgcccagctaatttttgtatttttagtagagacgggg

SEQ ID NO: 585353 - DNA, 4001 bp, Homo sapiens
gagttcaacaggaatgtgtcttcttccagaatctcaccccagtgttcttctgccacccagctcaactgcccctggcaaggaagggtctctcctgaggctgaggactctcagggaaagggatgtcctgtcttccctggggaggccccaggggctaatcagtggcaatcccttcggggctgcaatcaagcggatggcctcctttcgtcttggttagcagagcgagttaggttgcagctaccaacccttcccacgccctccagcttggctctcacctccaatgcagagctgagggaggagatttcagcttctccagggcctctgccttactcccagggttttgggaggcccctgaactgttctcaaccctgatgtggtactatggtcccccaactttgactaaccttatccatcagggagaagagagtaaaacctgaagctggaggcctcacttcctggtctctcacagctacagaatgttgtctgtgaccacccagcccacgcatcatcttctaggccagctgttctcagtcttcagggtcctcaacatcacctggagagcctgttgacacacagcctgcaggacccatccctagagttcctgagtcggcaggtgcggagtggggcttgacatctccagttctaacaggctcccaggtgatgctgattctggtcccgggactacactttgagaactgctgcttcaggttgcatcctgcccccagcacttatgctaatttgtgtggtgaagacccggggctccagagccagaggcctgggagtgaatgctgtctctaccagtagctgtgcagccttggtcaacatattctacctcagttcccatctacaaagtggagatagggattgtaataggtaattatgagaaaacacctgtaacacgctcagtgtcaggtgatgagtggatcatgattggattaagctggtcatgaccaccctgcttcccactgttttaggcacattgtgaatgctcagtaaatgccagttatcaaggtgatttggcacttggtctgttcctttgcaggggatgttgtcactcgctccagtgcctatttcagatgcattcacctccctccacaacacctggttttgtcttgtttctgggaaagaggaaaccagaaaggacccaggcagggggtgacccactctgttaccaagagagagccccatttgggtgcagtgctggcaagctcagtcaccttggccattgcccaccaaacccaactccaggtgcaaacaggccaggaaaggacagcttggtggtggctgctcctggcatttatctgtgtctcccacccgcagccgtctgcccagggatatgagctgggagagggcagaaggagctgcagccctggagttggggaaggggaagtatgaaagtgtgggaggaggaaatttggatagcgttgataacgctgacatatagttcccattcatccagcaagtgacagcttagagagtgcttttaatctgctgtcaaatgtctgcagtaccgatatggttattcttgttgccttatagatgaggctgtttgggtccagagaggttaagtgacctgttcaaggtcacacatcaatccagttgtagacctggggccagaatccaggattagatctcaccaggctctctgttcccaccacactcttcttccaaatggggcatcagctcctgggtgaggactgtggatctgccacaggaaccccattccaccaaccttcccaagcctctccatcccaatcccacatcgctccccttcacctgcacaaactgctccatggcccactggtccaggcaggtgtagttctccaggaagcgcagcttctccaactgaaactggtccctggactgagcctccgcctgcctctctagcagctggaagatagtggcaccgagcagcaggtagcagacataggccagcagcaggggcagcacccggccaccccagcagctgcagagcccagcactgggcatgctgtggccaggaccctgccagggccgtggggctggctatgggggagaggtgggaaacaggtgaggagtaagcacctaggggcctgtgcccaggctgccgcctgccctgccctcctcctcggcacaggtgtctggaggctggggagactgtttgaacagtgcggctcagcttggctgcactaagtgctatgctgtgagtgcaaacaggccggccacccccacccggcctttgtttccatggacagcagcaagtcagtgtcagggacccttcaaagagacctaccaggttctcctgagtgcttcatgtctctctctctgtctccaagttggatagatgtttctgggctaaatcggataggtgtgctcactctgtccaggccccagtgggctctctcggccgcccccagcgtcttcacccttgaaggctgtaagaccccagcttaggagctgggaagaggtcagaatgggtatgaataaaccttctactcagttgccttggctacaaaatggggcaggataattgaactgcctattgggggaacctcaggatgagtaaactgcgtgacaaatcagggcaaagtaaatagacaggtgattgtctcactcagcctgatggtaagagtatcagggttgattctgctgataagttggattcattggttttataactcttgctaatttgtcttgcatgaagccctctagtgggttaccttcagaggatatgtcggtgaaatatatgtgtgaattaaaaagaaactataagtatatcctgatcctgggatggtaagaggggctgtctctgagtggatggaattgagagtgctttcctttctctttgcctgtgtgtgtgtgtgtacacatgcttgtttatgtacatgtataacagctttatacagatataattcacatgctgtatcgtccacacatttaaagtgtgcaattcagtgggttttagtatattcacagggtcttcaagatccagccctgttgcaacatgtaacagtacttcttccttctttctggctgagtaatatttcattgtgtggctataacacatttgtttatccatttgatttctagttgatggacatttgggttgtccctgtttccttctattaagaacaaagcagctatgaacctctgtgtatgagttttttttgtggacatgtgtttgcattactcacaggtacatacctaggagtagaatttctggactatctggccactctgtattgaactttttgaggaactgccaggctattttccaaagtggctgaaccattttatattctcactagcccagggcgaggattccaatatctctgctgtgttttctgctgtttcctttaatgagctgtggctgcagacactgtgagttgcctgctgagtatcctttccctcctccccagctagcagaaccccggctttgtaagtgttaaccccaggtaattgagcataattggtctaagtcatagtgctaatcttgctcccctctgtctcagcccctgagagcagtgaagtcactgaagacccataagacagtgggcaagagggccaggctgaggagaaagccaaacaaggcaccacagtcccagcctcagcctggttcctgggagctctggcaggtgaagtgcaccccagtgagtcccagcaggggacctgggccttcatatccccacattagtccgtcactcatgcatttctggctttgcgcacgtgcaggaaagatggctccaggagcttgtggagagacccctgaaggagagctccaggtgcaggctaggccactgggagaaaaacacattaaagcctggggaggagaccccagggtcgaagcgtcccctgcacccactttcccaagctcccttgcagctggggctggccacgtgcccaggtccagccatgattgggcagagttggctgaggaggtttgggcaaaattgttgtctgttgaccaagggttcagctgcagctggccccgcatttctgcctctttctgtctggacctgctgagc

SEQ ID NO: 585354 - DNA, 4001 bp, Homo sapiens
cacactgaggcagtatttatgctggttaacagctccagctcctggctatgtagccatgcattcgtatgtaacctctctgagcctgtttcttcacctctgaaacaggatgataaaaacagtacccacctgtgagggtgaaacaggatgataaaaacagtacccacctgtgagggaggtgagacaaatgaatacgggtaaagtaccagcaacagtgcttggcacacgataagtgctgcacagaggcatttactgttattataatcaccatcatagccatctccctgggcccaggctgcttgtagtcgaagttcaccacctttgcaagggtaatggcaggcagcctcagcaccaggacccagcagtcgggctgtatttgcagaagtccgcaggtggggagctggaggaatcactttaggtccttagtagagataggcctggccctggctacctcctgacctcaccgaatcggcctagtccgagggttcagaacaccacttccgctccgcgctgggtcccttcccaccctggcacggttccctgccaccttccggggattggctttggactggagactctggacggataagccaccaggactgcaagacggggattctgggctggcgcgcagctgtctggactctgggctcttggacgaaggggtggggaaccaagccaggacccaggacatcaatgcctccgccaaatcgagcagctgccagtctggcgtcgcttcagtcctaagatgcgccacccctagaaccctccccggcctcctccgccctgctaggccccacccttgaggagcctctgctcagatttacctctgagtcctcccctgaaccctgccttcagcctttctgggcagccgcgcggcggcggcgcgcccagtccttgtgtccgaagactcggagtaaagcgggttcagccagagagcggccctgcgtccgccctcctctcgaacccgggtctgcgcacgtcgagccccctctctgcgttgagggtggccccgaccagcacgcctcgggcccaatccacccaccctccgggacaaacgcgccttcccccaggctcctacggccgcgccctcgctcctgcgcatccttagacccggcgcccctgccgtcccagctcccagttcgcaaacgtgcgcccgggttccccctctggaagcggccaggtgtggcgtttagctctttgccacgggtgcgggtgcgaccaacccccaagcaggctcaaacgcgccctttcccgggtcaggccgggcggggccggttacgcgcgcgccccctgccgtagtcgtcctcgcccccaaatttggatgtgtccccaggcatctgcctcctcaccgggccagcatgccctctcgcccccaagtaggactcagcccggcttctcgcagtcctctcgctagggcgagggtcttttcctccgaggtcccccaaccctctggtccccgcgcaggaacgcccacccccgttgtgcccgcgtctgcgttcccgacgtttccctgaacaggaaacacctgaccagggcctgaataggccccctcgccctcggcccgtacaccccgcggcccgctaccccatcccgccgcgcccaggccgacgccgctcgcccctgacccggatcagcgagtccagcgccgggcggtccagacacgtgaagttctgcaacagctcccacttgtcgcgctggaagctgcggctggagtcctgcgccgcgcggccctccagcgtccagaacacgccggtgcccagcgccaggtaagccaggtaggcgagcagcaggagcacggtgctgggcaccgcgcagccccggaccctgccctcgggagccgcccgggctcgcggtcggtacatagcgggagaggcggggagccggcgccgggagcggtggactaggacccggtgggagggaagggccaggcgtccagctcgtatctcctctcgcaaacgcctgctggtgcccggtttcgccggggaggaggagtgttggggaatgggacagcctggccccacccagccctgggatccaatccccgggacaaaaagaggctctgaactgtgggcatctggccccgcctcaaatgtgtgcggggtgcccacctgctaggcctaggccagggagaaggaggaagctgctgggtgaccgcaggcgctgagggaaggggcccagagccccctcacatttcctgaaatgaacaatgggagggacttctggaaaccgcactcagaggtaggagatagtagagaccaactttattgtcttggggcccctgcctaagttcttggactcgggggctatctccaaggacttgctgtctgtcaatctcaagaccaccttgggtctcccacacctctgtcctttcctttgtaccccaaaagagggaccccagctgattgccacttgtccatgagcttgggaggtaagaggagccttaaccaagaggcttgtccactccttgcttctgagaaggcccccgaaatccctctacctggagtggaggaagcgtctaggctgtgtgaagagtccgtgggtcctcagcttcccagtcctttcttggatatggggaagtcctggggtgtgacttggactcctcttgctgctgtagagcctctcctgggtctcctgcctggagccgccttggctccacagccttgcctcagacctgtgcagaggaacccagccacataggagcccacttgctgttggatgatgggagaggcaaaggccaaaatttccaggccccgggatggagtggtctaaatctctcctggtcagggatgttgcagtctggcaggggaaaggccagacctggagaatgcattcctgagagaggccagacgttcatggagctcactttctggaaggatcctgggatctgctggctctctggcttcccatggggtgtttggaaaggctcttgagaaggcaggagcccagagggagtgatgaagttaagggggtggcctgtgagggtcaggggaggccatgttcaggaaagtgggtaggacacccaagaggtcctaagctttgttcacagacagccctggacttctaggcaaggggagctggcgagctttgagaggcagctcgcctgcccctcggctgagagcttcctgagggcagagatcctcttttcactaagattgttccaaagtctctgcccaggtctcccctctctttgatgctccctgccagccattcccatgggctctcatcaaccctggggctattcccatcatagcattttgggcactgtgttggggctgcctctttgcttgcctagcaactaaaggcacatcaagggcaggcacttccactgctgtatccccagaccctggcacagaccctggcacagcacctggcacatagtaggggcttggcaaatgcactgtgcacatatcaaatgaggcaaaagtaaagtcatcctttgtttgtgtaaggtctcctggaagggggcatggggagggcagtggagatctggccactacctttgggtggaaggctgtggcaggggctctgggacaagggtacacctccccatccacacatgtctttaatcctatctcacgtctcctctctgttactttcttggatatacctgtctcctttctctcttgggagagctcctgagaccagccctggctgagaagtgagggggttgggagaggagaaagcagggctggaaatccagagagcagatagggtgggactggggaggatgaaaggggtttctgggccccccccgggggcctcatgcagagatggggatcttctgaggcctggggagcccactggggtcagaggctgccccatccttgacgccgaggcccctactgagcagccagagctggcagcatctgtgcagaagcagggggcccagtgggaggatcagcgccagccacgccaggcccaggaggatccagatggctgccaggctccgatacactgagatataatgcttgctggggtctgtgcctgccagggaagggaatggc

SEQ ID NO: 585355 - DNA, 4001 bp, Homo sapiens
ccacactgaggcagtatttatgctggttaacagctccagctcctggctatgtagccatgcattcgtatgtaacctctctgagcctgtttcttcacctctgaaacaggatgataaaaacagtacccacctgtgagggtgaaacaggatgataaaaacagtacccacctgtgagggaggtgagacaaatgaatacgggtaaagtaccagcaacagtgcttggcacacgataagtgctgcacagaggcatttactgttattataatcaccatcatagccatctccctgggcccaggctgcttgtagtcgaagttcaccacctttgcaagggtaatggcaggcagcctcagcaccaggacccagcagtcgggctgtatttgcagaagtccgcaggtggggagctggaggaatcactttaggtccttagtagagataggcctggccctggctacctcctgacctcaccgaatcggcctagtccgagggttcagaacaccacttccgctccgcgctgggtcccttcccaccctggcacggttccctgccaccttccggggattggctttggactggagactctggacggataagccaccaggactgcaagacggggattctgggctggcgcgcagctgtctggactctgggctcttggacgaaggggtggggaaccaagccaggacccaggacatcaatgcctccgccaaatcgagcagctgccagtctggcgtcgcttcagtcctaagatgcgccacccctagaaccctccccggcctcctccgccctgctaggccccacccttgaggagcctctgctcagatttacctctgagtcctcccctgaaccctgccttcagcctttctgggcagccgcgcggcggcggcgcgcccagtccttgtgtccgaagactcggagtaaagcgggttcagccagagagcggccctgcgtccgccctcctctcgaacccgggtctgcgcacgtcgagccccctctctgcgttgagggtggccccgaccagcacgcctcgggcccaatccacccaccctccgggacaaacgcgccttcccccaggctcctacggccgcgccctcgctcctgcgcatccttagacccggcgcccctgccgtcccagctcccagttcgcaaacgtgcgcccgggttccccctctggaagcggccaggtgtggcgtttagctctttgccacgggtgcgggtgcgaccaacccccaagcaggctcaaacgcgccctttcccgggtcaggccgggcggggccggttacgcgcgcgccccctgccgtagtcgtcctcgcccccaaatttggatgtgtccccaggcatctgcctcctcaccgggccagcatgccctctcgcccccaagtaggactcagcccggcttctcgcagtcctctcgctagggcgagggtcttttcctccgaggtcccccaaccctctggtccccgcgcaggaacgcccacccccgttgtgcccgcgtctgcgttcccgacgtttccctgaacaggaaacacctgaccagggcctgaataggccccctcgccctcggcccgtacaccccgcggcccgctaccccatcccgccgcgcccaggccgacgccgctcgcccctgacccggatcagcgagtccagcgccgggcggtccagacacgtgaagttctgcaacagctcccacttgtcgcgctggaagctgcggctggagtcctgcgccgcgcggccctccagcgtccagaacacgccggtgcccagcgccaggtaagccaggtaggcgagcagcaggagcacggtgctgggcaccgcgcagccccggaccctgccctcgggagccgcccgggctcgcggtcggtacatagcgggagaggcggggagccggcgccgggagcggtggactaggacccggtgggagggaagggccaggcgtccagctcgtatctcctctcgcaaacgcctgctggtgcccggtttcgccggggaggaggagtgttggggaatgggacagcctggccccacccagccctgggatccaatccccgggacaaaaagaggctctgaactgtgggcatctggccccgcctcaaatgtgtgcggggtgcccacctgctaggcctaggccagggagaaggaggaagctgctgggtgaccgcaggcgctgagggaaggggcccagagccccctcacatttcctgaaatgaacaatgggagggacttctggaaaccgcactcagaggtaggagatagtagagaccaactttattgtcttggggcccctgcctaagttcttggactcgggggctatctccaaggacttgctgtctgtcaatctcaagaccaccttgggtctcccacacctctgtcctttcctttgtaccccaaaagagggaccccagctgattgccacttgtccatgagcttgggaggtaagaggagccttaaccaagaggcttgtccactccttgcttctgagaaggcccccgaaatccctctacctggagtggaggaagcgtctaggctgtgtgaagagtccgtgggtcctcagcttcccagtcctttcttggatatggggaagtcctggggtgtgacttggactcctcttgctgctgtagagcctctcctgggtctcctgcctggagccgccttggctccacagccttgcctcagacctgtgcagaggaacccagccacataggagcccacttgctgttggatgatgggagaggcaaaggccaaaatttccaggccccgggatggagtggtctaaatctctcctggtcagggatgttgcagtctggcaggggaaaggccagacctggagaatgcattcctgagagaggccagacgttcatggagctcactttctggaaggatcctgggatctgctggctctctggcttcccatggggtgtttggaaaggctcttgagaaggcaggagcccagagggagtgatgaagttaagggggtggcctgtgagggtcaggggaggccatgttcaggaaagtgggtaggacacccaagaggtcctaagctttgttcacagacagccctggacttctaggcaaggggagctggcgagctttgagaggcagctcgcctgcccctcggctgagagcttcctgagggcagagatcctcttttcactaagattgttccaaagtctctgcccaggtctcccctctctttgatgctccctgccagccattcccatgggctctcatcaaccctggggctattcccatcatagcattttgggcactgtgttggggctgcctctttgcttgcctagcaactaaaggcacatcaagggcaggcacttccactgctgtatccccagaccctggcacagaccctggcacagcacctggcacatagtaggggcttggcaaatgcactgtgcacatatcaaatgaggcaaaagtaaagtcatcctttgtttgtgtaaggtctcctggaagggggcatggggagggcagtggagatctggccactacctttgggtggaaggctgtggcaggggctctgggacaagggtacacctccccatccacacatgtctttaatcctatctcacgtctcctctctgttactttcttggatatacctgtctcctttctctcttgggagagctcctgagaccagccctggctgagaagtgagggggttgggagaggagaaagcagggctggaaatccagagagcagatagggtgggactggggaggatgaaaggggtttctgggccccccccgggggcctcatgcagagatggggatcttctgaggcctggggagcccactggggtcagaggctgccccatccttgacgccgaggcccctactgagcagccagagctggcagcatctgtgcagaagcagggggcccagtgggaggatcagcgccagccacgccaggcccaggaggatccagatggctgccaggctccgatacactgagatataatgcttgctggggtctgtgcctgccagggaagggaatgg

SEQ ID NO: 585356 - DNA, 4001 bp, Homo sapiens
tactgaagcttatcctccccaccatcacctcccatctgcctctacccgggaaactgctacagggcaagagactctccactaaaatccaacactaagcctgctagactaaacctccccttctacaggaccccttggaggacaagtctccccacacacggctgccagcaaatacgtatatgcttatctgtgtgatgtccatcaatctggggacaagattttgatgttttccaaatgcttccaacctaacagtccgtggcagaaataaggaatgaggatgggctcattcccgtttctcacatggggaaacggaggctggaaaatgagcgacgactagataggcataaagtattgaggtgctgctgtagactaaacgttgcttctcatcagacctcctttctggcatctttcaccctgagagcaaggtaacaccctggacaatctacccctactccctacctgctgcaatctagaactttcacccaggtcctggtcattccactgggggagcaggccaagaagagttgatggttgaagctgagccctcgagaaactggggtagagggcctcggtccccaaatgggccccaaggtctcagccaggataggcagcccgtttatccaaagtgaggtcaatgccacccatcgggctgtgcaccagaaaataagcggttcccaatgtcagcacggagggaagtcccccacccaccccaattccgcacacactctcctcccccatcataaagggactacgcgggtattattcgtttgtgcaacctgctactttcacaaagttttactccaagcccttgaaggatgtctccgcgagataagccttcccggaagcctgagcgcgtccccagcattccaggcaccagccctcatcccgtgggttcgggccccacagagcctccagctcctctccggaactctgctgggggcggaagattttgcccaggctcgggctgagggaccctcccgccactctgccgggttcacgttccttaagaaaagcctggcaggcgtggcactggccctggagcggggaggtggagacacgaggggatggcaccaggcttggctcccagactccgggagcgtctccagggaaagataaacgcctttatccgtcccacagcctcttcccaaggagggaggtaccgtcacacccacactgaaacaccgtggagcctagttcacccgggaatcaactccaatttgtctccggccaaactaagttccaaagagtctccgcgcctgggggacccctgtgtccctcgggtgagcgacagatcctcgaagcctgacccatgatgagacacgctctctcatcaccccctggaccttccacagggactgagggtcacccaaagctgtgaaggggtcttcctttcagcgccccctaaagctcaagccagcttcagatgtatatgggggtacaggcggcgactgacctctaggatcttgtccaggccctcctgacccaggcacgggaactccttgagcagatgcagcttctgtgtgtagtagtttttcttggcctccttccagtgtggctcctccagcacttcgaagatcgccgccccgatggccaggtagaagatgatggccgaggtgagcagagggccccggtccaccatggctcccgagcggccgcctcctagagaaagcctctcctagccccagctgctaccagtccgcccgccctccagcctctgaaaacagctgtttgaatttggagctccgcatgcgcagtgcccggtactcaccccccgcaagcaccgctccccggacagagttgcttggccaagttggcccacggagtgcggggagctgcgtggggccccactcacgcggcccggggtgggcgaacaccagcggggctgaaagggcgccctggaccgcggatgcgtaaggagcgggaagaacacaggacttgactctgggcagacacgtgggccgcttctccacgcgtcgctcctccgcgcgccactagcagtatgcgccgcgcccgcctccgcacgcctctttaaccagcgcccggcgcgctctgcccccttgctccgggctccgaccggggaggagcccaggcgggccccgccccttccccgcacaagcagcccggcgagcgcaggagtgagcgcgaggtgagcgctagaagaggcttggcgctccccgcgctcccagggtcagccgccaggggaggctgcgccgcccgcccagacctgcacgccctgcggtgcccgaggggttgcggtctcagggactcgtgtttgttattaggactggcgtgttaactaaaatgattgtgactgaggtcaggagtttattgcttttgttatttttattgtaattccattttcatttactgatgtttcttccaaaaaagtctaatgctcagtctctccgtgtctctcttccacacactttcttgtaagcctgaggaagggggttagaacggggctgaagaagctgtagggaatcagaggacatcaggaactaatccagccacccacgcgtgattcctccccctcaccccgttctcacctacccgggtgagaaccctgcatctggaaggagtgggcagctcaattcgtggcacccctgtgcgcccccccaatacacagtatctctacgggaaacacttggcctcttttctttttttcttttctcttttcttttctcttctcctttcctctcctttcctcttttctttcagacggagtctcactctgtcgccaggctggagtgcagtggcactatctcggctcactgcaacccccgcctcccgagttcaagcagttcttctgcctcagcctctcaagaagctgggactacaggcgcacgccatcacgcccagctaatttttgtatttttagtagagacggggtttcaccgtgttggccaggctggtctcaattcctgacctcaggtgatccgcccgcctcagcctcccaaagtgctgggattacaggcgtgagccaccgcgcccggcccactttcatacatatgctccagctgatttaaaattccacccccgccaccttatctccctcgttggctttatgtccttcctagtactaaattccctctgctatattatataactttatttattgtttactctgtattgtgccctctccccgccacacacacacagacacacacacacacacacacacacacacacacacacggaaatgtctgctggggagatggagaatctgtcttgtgtaatgatgtatccacagtgcttgttacatacatagcagacactcaataaccatgtgtgcaatgaaggagtgaatgaatttgttaaaaacaggtgcccaggatgtttctaactcgccttgctgccattctctgagctcttgtaaaccccaggaagtactgaatcccttccatgcatcataagcaggccctgtcattcgacccactttgcagtgaggaaaaaagctcagtgggttagtttgttcagtctttcaaccagcaccagtcagaagttggagggggaacctcctttcagtgctctgtaccaggggctggccctgcccttctctggcctctgtaggggcaggtactggagtggccagagtccctgagcactgtcccctggccaaggccttttctttccatcgagaagaaggggagtcatttctcacctcctacccaccctgtacccaggctgtggcctgaaccccaaggtgtcaagagacactttacttggggaggggggtatctgtactatctccaaatctggctggaatggaggggttagggatacagttggaagcattgatctgattttgctgatgtttctgtctctccttatggcaacatgagcgtgtccagagaagaagaccagagcaggaagctggggagccccagatttcctgatactgcatccctgaggtgtgcagtgccagtcccctcaggacccccctggccaaggatcatcctggacaaggccctgggggtgcttctctgtagacaacccactcccag

SEQ ID NO: 585357 - DNA, 4001 bp, Homo sapiens
gatgacataacttatttctaaaagaaacctagtccgtgtgctcaaaacttattttactaggaaacaaggaatgtatcagcgagtatctgcaactttctctactggtcttctaaggttgatgtctttatatttcatcttaacaaaaaagaagcagaaataataatactaaaaaaagaggaagcaaaaggagaagaggaagaaaaaaagaattagacacgaggtaacattataaaaacaaccttaaaatgcccagataaacgtaactctaataggagactgaatgaatggactttgtgggaaaaacagtagtaaactttaaagccactgaaaggttttaaatgcctaagggaaaaataaacatttgcttccaatcattttctcattaagcattctctgctagatggagaaggcttactacacacacacacacacacacacacacacacacacactctttgactccgcgccacaaacggggacttaacccactgcccgatctctgtcagaggcgacccatttgcgcttctgctatcgcacctccgcccgcgttcctgcgccccaggttccccgctgcctccccgccccctgcagcgcgggagcgttgcttcgcctggcctgctggcctcctctagaccttggccaccttctccgtggcaggaagggctacatgcactgacagattttccgttggtggtggctgggtggtggcgaggcgtgtttccgggcgcgcttaaaacctagcagctctctccaagtagcagcttcccctactccgcccctaggactgaggacctagccctcgatgccccctcacttctccccgtcctaccccgccatcacctcctaacctctccagtatactctcaagcctcacacgggcgcctgtcctccctttgcattccctagctcccgggcgccccgttcggttgaagtttacgtatcttgggacctaattgctcccaattatccgcgcagcctaagtcccgcgtctgcctggctctcgccccgggagcctgaagctaccgggcagttcattgggtgtcctcggggaaaaggttcaagctgtagagatgagagaagtggggctgggggaggggagaggctccagaaggaagaccacgaacacgtgcgaagaaataaaagccaccacgtgtgcacgcgcgcgggggcccaagggcgcgagcgcggagcacgccccagggggccagggacagtggtcccctgcagcgggcatagcagggggcgcgggtactcacacgaaagcgtggtagatgaacgcccagccgcggggtctctccagcacgttgtacaggtagttctgcacccgccggtacttgacgttgcgccggcagctctggctactcgtgtaagagagcggcttccccagcaggctcatccgggccccctgcttgccccggcggctctccctcaggccaccgccgccgccaccgagcgtggccgcgcgggtgcccagcagtagcaggccgtcgcccctggcggctgccgagttcagcagcaccctgccccggccggactccacatccttcatgccgctgcccaagcgccccccgcccgccgccgccgccgctgcgccgctcttcacccagagcccggcggcgccgccctcctctcctcccgcgtggtggcggggcatggcatcaccacgggcaccgcgagggggccgccagcgcctgcggcgggggcagcggcctcatgtgcgccggcgggtttcaaggaggaagccggcggccgacggggcgcccgccagccagagacctctgagccgggggcggggaagcaggcagccagcaaaccgcccgggcttcggggcgggaaaggaggggctgcagaggaggccgaggagtcccaatttctaacagcctttagcttcgaattctaaatccggacctgtttggggcgtcactttgagagggtttctcttgctccctcattcccgcgactaccactccctccttcccaaactgcccccggggatagagtgggggagtgcggggcgctccgaggcgcgctcccacgcgcgcacacccagccccaggcttccccttccctctctccactccccacgccctgcagcgaaacggccccagaagcccctctccgaggcgcgagttcggtttggttctggcaggggctttgcagctgtccggaaggtgaagtcagccttgtgtcctgaggagaaactggagatgcaggtcgctgtgccctcccgctgctacgtcgctgcgccggatcctgccatccttccgcaaggggtgagagcgggaacagccctgccctgccttccaggtattatctagcctggaggctggagcgcaaggtaacgctccgggaagtggcactcgggtccccgcacacgggcgagtcctcagcagttcagtggacagacccgcaggacgcggctgccaagtccgcgaggcaaggaccaggcatcttcccgcgcctcactccagcctgcggactgtgactttccatcccagtatcagacaagctcgcgagtaactgaacatcctttccagtccatgggtggggtgtggaaagggcgtaaaactccaaagtggctcctccgcggtgagcgagctgccccggggctctgcctgactgcagcgcgaagcctgggagaacaaacccagttccctccgtcaagaaatttccatttaagtccgagaaagtcatatgattgagaagttcagcagcggcggcgaggacccagtgtctgggaaagaacacctggaggatggggtgtccaggacgccggcttttcggggttccgaccccacccaccttatgttgtaacatacaagcttagagacctgttgcaaggaacaactgactgggtcttccaccacccctggcacccgggtggcccaaagcctatgcgcccttggcggagagagaggccacggtgccactggccgcagcctctggccttcagaaacagtgtattacaaagaaaaggcagtttaaatctcacattcagcatagggaaaactgaagggtgccaggctcggggacttcttccaacagagtggctcttccccaaatatgaaagaaaatcatcaaattaaattgaaggcaaaactaagcttccaccacaaagacatagcagatagttgcaaggtggattccttcgggccttttcctttcctaaggctaaaacaatgctaagacaaaagtcttcttgcagctgtctccgcccctccgagataaatactttcccaattctcccccaccctgtacacacacccacgcccgcggcagctgatttctgtcttctgcaatagctcgatttaaatgctttgcttttactctttattatcactattatttgtgtgaagccctctcgcctgctcctggtcaccagcaggagcctgcttccctccctccttccccccaagcctctgggcagcagaagctagctgggagctctgtgcagctggcggcgacgccatgtgactgtgagccgagcaccatcacccagagtcactctctagctttcccctaatacacttcacacccacgcactgtggaggtgcgagagaggttgctccgtgcggtgctattcgaggcagatgcagagagcgccctggagtaagctctccaatcctagagctgcgcgggaccctgactgaaggcggagggggcgggagggggtgctgttgctatatttagactccctatggagtttctgtgcagggactttcagggtgaaagatctagagacttaaaatgactcgtgtgcccgctttaaacgtcaaaatcttggcctttctgcaagcagtaaaatgaaaaccacttcctcttaacttagctgttttccttgttgcagactgctactttcgctgggtaggtaaagtcacttccatctctctggcgcggctgggccccgcgtgcaggcaagaagtctcaggaaggcaggacacagggacacgtttccctggaagacagccagctgtttaatttctaagtgatgcttttctggg

SEQ ID NO: 585358 - DNA, 4001 bp, Homo sapiens
gtgccagaaatatgtgtctatattgcaatgctgttgataaaacagcctactacagtgctttgaggaaaataggcattacgcaggtatttgatgactaaattaacgtccagctgaactgaaagccctcataatgctactagtactgctacataccagataatatgacagtcaaggccatgggaattatatggcattggctgccctggttccatggggagacttgagtgagctgggcggaggagatttggcctaatggcattaagctctgatgatactagaagcagccctcagaaggaaaagattaatgggctatctctaaaccatcagagcaatatcggaatatgcatgaaaatcatttcctaccccgtgtcagggtcaaaaaaagcactatcttttctcatattggcttctggagagtcagggcttcttgtcctacgactggtttagggcaggggaggaaaacatcgacaaagggttaaggctgttgggcagtttttaaaattcccagcccagcctaaaggtggtgtctgtcaacgtgtggtcggtccctggatcatcagtaacagaccaagagtgcaggtgcttgcttaaatcccagactcagggacccatcacaaatctctagaatcaaatttatggaagaggtgctagggtactgcaaccttattactaaggaacaatcttctgtttcagaactatggcctaggaattggggtttcaggtgggggccttgagcggaagtcctctgactctggattcatcacatccgacagacactactacaacactttgttttgaagaccattaaaaaactacctcaacttctcgcacagcgaacaggaacaaaactaaggactctgggacatattttcataagctggttaaacagttccttcacagccttgtttatcatgttagtttgttcactagattcttatttaaaaataaatctcttcaactgaggaattttcagaaagaatcacaaactccaaaatagaagagttttctcatagtgcagaactgggcttctaaacctgaagacactgctataaaaagcaaagttttatttaaaagaaaattgctggttaaggctttccccagctcttttgcactcagagccacggatgaaagctggcaatttgcgggtggcagggaaggaagacgcggaaacagggctgaaaagaccgagcaaaatgcgctcggctccagagttcaggaggaagtccccaccaactacctaatttttaatggagccaattaattgccagaaaaaccgcgtctgcaaatgttttgccagtcaacactccaggttctcgccattcctctccggcgggatgaaccacccgaggcctgcaaaaagcagtcaagcagtcaagttacacttcagctgtgcccaccacctgggcgcagcgtcgcctccctccccaggatcaccagactctgccctccgcgcggaaacaggagcccatcaagccgctgcccacaggttcctcgcgcccagctcagccccgcggcctttcgactcgggggtccgaaccgccgccgcgtccggaggagacgccccctcggccacaaagggaagactcgggccacgcccgccgccacactctccctgcccggtcttcgcgcccgaaaccgtaccgcgccgccacttactcgtcgctccccgccgcgctgtcccgctcggggctggaatccgcccgggaggcgcgcgcaggccgcgcagccagaagccgcagccgggaccggctgtgccgcagcggcgcgcgccccccgccccggaccgcgcggccacgcggctgagtcacccagcgcttcacgttaagagtcccctccgcgcgtggcacgccgggaaggccgtgtctggggaccccgtccggggccgcaccgtaaatgggtgtcgcctttcctccagtccactctgcacccaacctcagcgggcgcacttttctgagttgcgcataccctctcaattattaaaggttgcagacggaaaagttagtagttttcggaattgtagaatacgctcgtgcagcgccaggacggctaatgcttacccgaaaatgtggaaccctgatctccccatgcgtggagcgaggttggaggtagcgtagtaagaatactggagttgcttaaacgcatttgctcgaaagtcactaccctggatatacattctggccaaaagaaagggggaaaaactccacatttttctcaaatactgagtttcatgaaggtacctgctattacaaaggtgtattacaaattttaaatcaaccggaagcaagttactgggaaaactgtgttatgagtaaaagatttcagcattcaaaaaacatctatatatggtccatgtcctatgaaccaaatgctggaaaacccaaaaggaagttcttattgtcacggtttctagtggcttttgtacttttaaaaattacactaggccgggcttggtggctcacgcctgtaatccttgcactttgggaggccgaggcgggcagatcacctgaggttgggcattccagaccagcctggccaacatgatgaaaccctgtctctgctaaaaatacaaaaattagccgggcgtggtggtgggcgcctataaccctagctgtttgggaggctgaggcaggagaatcacttgaacccaggaggcaactgggaggttgcagtgaagttccctctcaaatatatatatatatgtctatatatactaattaaatatactgattatgcaaactatttgtaaattgttgaaagctctataaactaataatagcacaaattttaaaattcgaagtcgattctccttttccttacaagagactctctgaaaactaatttggaattggattagaattggtgttgaagtggaaggaatgtaagaaaatagtttgactcagtaggtttcacacggttaacggatacttgtatagcaaatttgttttatcagggtcaaaaaatttaattttcaaaactgaagacataaattttttcattataatttggtcttagaggcctagagggtcattttccatttctattctccctcgtttatgactataaagtatgcaggactgtattgtgtttatctcaacatggactaggctgtgaggctgcactcgtcatctgtaagtcagtctcacgtccccatggtgactcagcttccctgctgcttgcgtcagtggctctgccctcccagcacttccgggctggcagaagagctagattggagaatcctgtaagggctctcctttgcctctgccagaagtgagtggccttttcacttctgctgacgtttcactgtcctgaactagtcaccaggctcaacctgactgactctaagaaggctgtgagatataaattcctgtatgcctggagaaaaggaatatgaaaaaagatttagtaaacacatggctataaaccaatttgagtgagttataggctccaaactttacaacagtagcagcatagaggattgttcaaactaatgcctttatttccatttttataaagtacagtgttacagcctttgagtcaaagaaaaataaaaaaccttctgatattcctgcaaaacagttcttgaaacaaattcttcctttctggaaagattccttcccgtagatttgtatattgtctttctttttttttttttttttctttttgtggagaatggagttcttattctgttgcccaggcaggtcttgaactcctaggctcaagctatcctcctgcttctgcctccctaagtttggggattacaggcatgagccactgcactggctgcagatttgtggtatacaaaaatctggcctgaagtttggagaatcaggctaactaccgagtcttattattattttttaaacactttcattttggaaattaaagcatacagaaagatataataaacacccgttatccatcatccaaaataaataagtgataacatgacttttaatagttaatggttcaacttttggctaaaatttcatataatgaacagc

SEQ ID NO: 585359 - DNA, 4001 bp, Homo sapiens
aattcaagaaatggttaacaaggaaatgaaaacatgagctataaaagccattattaaatcttatcgagggtttttatgatagcatattttcaactttatacaattgagggttatatgaatccattctcagaacttttggcacttgatgtaatttatatatctccacttgctgggtccttaggtcttaaaatgaagaaaaaatttttagtatactaaaatgtcttccttcttgatttttcaaattaataaacacacctaaatataaccaattggtttcatgctcaacattatacatatatttctaatttttaattcaagcatttaaaatttggctttggttttcttttaatgtgataaaaaagtgggattttttggtaaatatataagtggatatatcaatatgtagatttcattataataatccctaggtttttctgaagcagcttattcaaaaagattttttcttttttttgagacggagtcttcctccgtggctcaggctggagtacagtggtgcgatctcggctcactacaacatccacctcctgggttcaagcgattcttctgcctcagcctcccgagtagctgggattacaggtgtgtgccaccacgtccggctaatttttgtatttttagtagagaccaggtttcaccaccttggccaggctggtcttgaagtactcctgacctcaagtgatcgcccacctcggcctcccaatattgaataattcaatattgaattattcaatattcaacatgcagttcaatgattcaatattaaatccccaattgcctagatatcttttgttgattctcccagcaaggcaaataattattgatggtaattttctcatgtacctcctgaagaagccttctctcccactcgcctttctgccactaaaatagatttaaaaacacaaaacaaaactggtcaaagccttgagttatgtgtgtatacgtggtgtgggggattccccaactggagtggactggggagtcctgcaggcttacccaagggaagactggacttctatgtggctggtttccacatcactgaaccccaactttctacagctgggtcggcctcttccttcctctttcacctgtcagctgcccggccgttgactaacagctaccctaatcgggccacccctcctccaggtctccaatcccagaggagttaccccagcaacctggcaatgctcatcaagtctcaacgcgtggtggctgtgccagagaattactacaacacctgcaaggctgtgcgggctcctggccgcaccctatcggccgggaagaacaagcgagggagttcctactccaggaccgtggggttctcccgcggctctgacagtccccaggagggagccccaaactcccggtgccagctgcagccgcctcgctttccgagaagctttcggaagcttttcgaagtcggagaagcaactgccccggggctcacctttgcgctgaagaggtgccgggagtctcggggaaaaggcaccgctgtacagaaaggaaacattgtaggggggttagccgaccggcaacatcgcgacgaacccggcgaccccacgccccaacaccctagcccgggaattcccccttcttcagacagatacccaccccgcaccctcttttaatccggggcaggaggtatccgtccctggggcacccgcccacctcccaccacggcgaggggcgctgcacagggggaaagggagggcttgcaccccaaccaagctgctttgtgcaacgctgtcacccgaaatccgccacggcccccacgcacgcccccggagtggggagcctcccacctctgagcgccagcgaggcggtgcgcgccgccctggactgcgggcgcctctccggagccgcgcgccgcgcgcacaggacggctgcagccgcgccgcgagccccagcctcttctcggccgccgccgccgccgccgcttccgcccctgtcacggcgtgacccggggtgggaggagccgacaggactagggatgggtagggtccccgccttcgctttagccgcagcgctcgctccgccctgcccatttccgccgctgcgcaaaccccggcgcttggggaagtgggtggagtctgtgcaacgaggtacggggcgggagtggagacggggcgccgggagagggggcgggaactgaggcggggcgcgggaaagaggcggggcgcgggaaagaggcggggcgcgggcggaggcggggcgcgggcggaggcggggcgcgggcggaggcggggcgcggagaagtggcggaggtggaagcggaggcgtacccgcccctggggacgtcattggtggcggaggcaatggccggcaaccagctgtaagcgaggtaggctcactcgggcgcggagggtgcgggtgagaaagggaacgatttgctaggagtgtatgcgcccgtgctagggctcccaggaattcttacaagcgtagacagcctagcaatcagccctgtgaagtggggttcagggcagaagcggaaactgggaataacgaggtcggacagtaaatgacctgaatccaatgtccaggatttaaagtgcttccaaagcactggtgtgttttaattatttttttttcttttttcttttagagacagggtctccctctgtcgcccatgctagcgtgcagtggcacaatcatagctcactgtaacctggaactcctgggctcaagtgatcttcccgccccagcctcctcggtaactgggactacaggctcgctgcaccacgcttggctaatttttcaaatttttttttatagaaacggactctcggttttttccccagcctggtgtattagtgatttttgggaaaaaataagtactgccaaatagtgagtgatccctggtgatgtgggaaactggggtgctgtaaatattctgtcttgctctgcggtggttacacaggtgtatgtatatgtaaaaaattcaccgagtcatactcttttaagatgtgtgcaccttaggaaagtttcttctcaattttatgaaatttaaaaacaaaactatagcagaagcttttgaaaaggtgagaatggagactagaacaacttgaggactttgtttgtgggcagaaatttttgtgaaatttcccttccttaattcttgtaatgtgcactttttttgtattatagaaataaactttatttctctagaaatgatgtatacaagtggagtccatgctgagaaactgttagaacagctaagacgttgagcccaggagtttgagaccagcctgggtaacatagcaagaccctgtctctacaaaatatttaaaaattagccaggcatggtggtgcacccttatagtcccaggtactcaggaggttgaagtgagaggatcgcttgagccccagtgttggagacggaagtgtcattacaccactgcactccagcctgggggatagagagagaccctgtctcaaaaacaaacaactaagacatgattaagttatgtgcatgattttgttagacagttcaagtttgtgtgaaaggaatagagttgtgctactccaggctgctgtggaactctgataaagattatgcttctcttttaagtagagaactgctttatgaagccttgaatttaggttccagagtttctgaatgaaaatgagaaaactgcaacattcttttgcttttctgtacccaatataaatcagatactttctactgacctctcagaaaactcagagtcacctcctgataccatcagggtcttgcagaagccatttgtcaacaaatatttgctaagaagtgaattcatgttcccaggtaatgagagaaatgcctcctccctatatcctaagcatactgaggccaaatttggcaacaaaaggggaaatttgcctgaaatacatgcttttatgcaatgtttgctatttcacagattaatcattaaattagaaccaccaataatagcatgctagtataatccaaactagtttcactaatgatttaaagggaatgttagaat

SEQ ID NO: 585360 - DNA, 4001 bp, Homo sapiens
aggtgcctgccaccacgcccggctaattttttgtatttttagtagagacagggtttcaccgtgttagccagggtggtcttgatcccctgacctcatgatccgccctcctcggcctcccgaagtgctgggattacaggcgtgagccaccacgccctgctgcaatttttgtatttttagtagagatggggtttcactatgttgaccaggctggtcttgagctcctgacctcgggtgatccacctgcctcagcctcccaaagtgttgggattacaggagtgaaccaccgcgtccggcttttttttttttctttttggacagggtctcactccgattgcccaggctggagtgcagtgtcacgattttggctcactgcagcctcgacctccccgggctcaggtgatcctcccgagtagctggaacttcagatgggtgccacatagcccagctaatttttcatatttttttgtagagacggggtttcaccatattgcccaggctgtgacttctgggctcaagcgatcctcccacctcggcctcccaaagtactgggattgcaggtgtcagccaccgcacccggtagagttttttgctgttgttttttgttggtttgttttttgtttttttgttttttcttgagacggagtctcgctctgttgcccagcctggagagcagtggcgccatctcggctcactccaacctccttctcccaggatcaagcgattctcctgcctccgcctccctagtacctgggattacaggcacgcgcgccaggctaatttttgtatttttagtagagatgggtttcaccatgttggccaggcgggtctgaaactcctgacctcaagtgatgggccttggcctcccaaagtgcagggattacaggcgtgagccaacgcgcctggcagtttgcatttttaaggagttctcaggtgatgctgattctgctgatcgcgggactccgctttgagatcagctctcctagggtatctaagtgacggggcagacccgcaaaagagatttagtggaagatggccccctagaggagctggcctgggattcctgggacttctaaacctacagtgcacaaatgtcctagattttccacctttggttgcttctagccacaatcttccttcccaaccacatcttgccctttctactcacaaaccaggaggcacacccagggttttttttaacatggtgatttgcagaactgtcctaggccttcagactaaggagctggagtgatcctgaaagatcccggaagcgaaactcgcctttccgggcacctgggtgaaggaagcttttcctaccagggcccctaaagccactcacctcgatttctgcggatccaaaggtggaaagacactgtcccgatcaggagcatcgcaagggtctggagaaagggccatccataaatgaagatcaggactccgtattctgagactgtttcaatcacaaataagactcggaacagcctctggaaggccgacagcatttcgcgtttctggcctgggaaagtaagggtgcgctaaggcacgagtagtacagctcctcccgccaccgcagagcccgccggcgggaagagaccagacaccgacggagaagcgaagttcaggacgcgaaggaaagggccacttcgggtcggggtcaacccagactggaccaatgcacagtctaggtggattaacgcgccaccgcgagaagtgggcacgggaccacatgcggctggcaagacgtcccagggctcaagctccaggctcggtcaccaaacaacggtgataacatccacaacgccacgtaaaccatctttgggccttgatcgttttccaataaccgactgaactgagggcgtgaccaaacgacaagaaccggaggagaggacccggagaacggagcagcatcccgccgcccgcctccaggaaagcccgaggcactgtagcaggagggtctgggctccgcgccttaattacaccgccctggacccgcctcttccgccgctcgctcctctgaccggcacccgaaggtgctgtcccgcccacggactcgctcacactccgtttcttcgatcctttagacgactttttaccgttcagggatgctctccgttaccgcctctgccatttggttgccctccctgcggtccaagggcctggaacactccccagggctgccaggccagcgctttccaggggctccagcctacagcgccgccacctggggctggagccagaaacgcaggggccgggggctcaccggctgccaagtagagggcgtcgaaaatggggctgggtgtgtaagaatgcttgtgatttttgcacactgattttgtatcccgagactttgctgaagttgcttatcagcctaaggagatttcgggctgagaagatgaggttttctaaatatacaatcatgtcatctgcaaacggacaatttgacttcctcttttcctaattgaatattctttatttctttctcctgcctgattgccctggccagaacttccaacactatgttgaatagcagtggtgagagaggacatccctgtcttgtgccagttttctaagggaatgcttccagtttttgcctattcagtacgatattggctgtgggtttgtcataaacagctgttattatttttagatacgtcccatcaatacctaatttattgagtgtttttagcatgaagcgctgttgaattttgtcaaaggccttttctgcatctattgagataatcatgtggttttttttctttggttctgtttatatgatggattatgtttattgatttgcatatgttgaaccagccttgcatcccagggatgaagcccacttgatcatggtggataagctttttgatgtgctgctggatttggtttgccagtattttattgaggatttttgcatcgatgttcatcagggatattggtctaaaattctctttttttgttgtgtctctgccaggctttggtatcaggatgatgctggcctcataaaatgagttagggaggattccctctttttctattgattggaatagtttcagaaggactagtaccagctcttccttgtacctctggtagaattcggctgtgaatccttctggtcctggacttttttggttggtaggctattaattattggctcaatttcagagcctgttattggtctattcagggattcagttttttcctggtttagtcttgggagggtgtatgtgtccaggaatttatccatttcttctcgattttctagtttatttgcatagaggtgtttataatattctctgatggtagtttgtatttctgtgggatcagtggtgatatcccctttatcattttttattgcgtctatttgattcttctctcttttcttctttattagtcttgctagctatcaattttgttgatcttttcaaaaaagcagctcctggattcattgattttttgaagggtttttgtgtctctatctccttcagttctgctctgatcttagttatttattgccttctgctagcttttgaatgtgtttgctcttgcttctctagtttttttaattgtgatgttagggtgtcaattttagatctttcctgctttctcttgtgggtatttagtgctataaatttccctctacacactgctttaaatgtgtcccagagattctggtatgttgtgtctttgttctcattggtttcaaataacatctttatttctgccttcatttcattatgtacccagtagtcattcaggggcaggttgttcagtttccatgtagttgagcagttatgagtgagtttcttaatcctgagttccagtttgattgcactgtggtctgagagacagtttgttataatttctgttcttttacatttgctgaggagtgctttacttccaactatgtggtcaattttggaataagtgcggtgtggtgctgagaagaatgtatattatgttgatttggggtggagagttctgtagacgtctgttaggtctgcttggtg

SEQ ID NO: 585361 - DNA, 4001 bp, Homo sapiens
ttttgggaggccaaggtgagcagattacctgaggtcaggagtttgagaccagcctggccaacatggtgaaaccccgtctttactaaaaatacaaaaattagctgggcatggtggcgcatgcctgtaatcccagctacttgagaggctgaggcacgagaatggcttgaacccagaaggcggggattgcagtgagctaagatcacgccactgcctggtgacagagctagactctgtctcaaaaaataaataaataaataaaattttttttaaaaaaataagcatagactctaggaccaggcacagtggctcacacctgtaatcccaacactttgggaggtcgaggcgggcggaccccttgagcccaggaatttgagacccgcctgggcaatatggtgaaaccctgtcactataaaaaaaataccaaaaaaaaaaataggctgggagtggtggctcacgcctgtaatcccagcactttgggaggccaaggcgggtggatcatgaggtcaggagtttgaaaccagcctggccaaggtggtgaaaccccgtctctgctaaaaatacaaaaattagctgggcatggtggcaggcacctgtaatcccagctactcgggaggctgaggcaggagaatcacttgaacccgggagatagaggttgcagtgagccaagatcgcaccactgcactccagcctgggtgacagagcaagactccatctcaaaaaaaaaaaaaaaagcctagctgggcaaggtggtatgtgcctgcggtctcagctactcaggaggctgaggtgagagaattcattgagcccggcaggttggagctgcagtgagccatgatggtgccacagccctccagcctaggcagcaggaaagaggcccttctcaaaaaaaaaaaagcatagactctagggccaaattgatgtgctcaagcaaaggttttgccacttacggtgtaaccttgggccagttgcttaacctctcttgacctcacttgccttctttgtaaaccagaggtgataatagtatacccatttcatagggctgtggtgagaactagaggagttaatacatttaaagagcttaaaagtgtctggtgcatagcaagtgctacgtaaatgttaaacctttcctgcccttttcctctgctcctcctttcccttgtttcctgttacagcattccttctttttttcttactatttcctcactatgcctttgcttgaatactaaaaagaaactactggtccaacagcaggcaacacctcatgcgattactttaaatgacttcaaaataatacaaacatatccagcacaatagtttacattttaaaggtgttacacccattttgttttgagatgtgtcaacaaaacccgtgtttcttttctttctataagtttaaaatgtccccaaatcaattaacaatagaggaaagtcacacgatctgttttaatttttctctttatactgctatctcctgtttcccctgtttttacacttctttgcagctcactttccttatctgtaagatattcttaggatgaacttagtaagaaatgtgcaagatctagatgaagacccaccagataggatgctctcttgcagacacgcaactcactgactcaaccaatgaggaaattatcccacaaagcagataatcctaatggagggcagaattcaggactgagcatctcagtgatgccgccgggaacccaggcttctctgtcccttcaccggactaaccgagttcgagaccacaggggggtcaggtagccaaggctgggctttgacggtaggaatgaaggaggtgagggtggcgcgccgcaggcctgggccactccctgagtagggcggcggcggcggcggcggcggcggcggcagcggcggcagcggctgcaggcctggccgattgtgaggagacagcggtacctcctgggccgcgcacccgacccttccaggggtcccggctcgcgccgcggccgcgcgaggcgcgctcgagcggaagtggcggcgaccccgccggaagcgcgcggctgcggcgcgggaagcaacccagagccctcctcccgcctgctctgtgtaggagacagcctgcggagcccactgccggcgcgcagagagcccagcagctcttgagtccaggaagcaagggtgggaggagggacgagccagtggcaatgacccagacccggacgacccccattgctgagccagcggagctgcttggtgagtggcctccaggcggcatctcttgctctcagcccggagggggttttggggacccaggctgtggggctgcctcttcccatgccttcagttcaccccgatatggggtgaaaaaccctagagaccctcgggtgtcggtccaccaagggaggtccagactccccaggaatgttgcctggggaggggtgtcgcggtgggggggggggtgacccaggcccaccctctgcagggcacttaaaatgctccacatccccagtggatgcctcctgtcacgcatcacaccgtggtgtatttgagatcccatctgccacttgggctggagggaaatgaatgtttttgggtttcttgtcattgcttcctgcggattccattttactcctgttcgtttatggcctcaaacatgaatttgaagaattttgccctccctggcagtattgggaagaagattcttttgttcaagtccgtttggacaattagatgggagtattaacaaaaggtcgggctgggcacagtggctcacacctgtaatcccaacactttgggaggccaaagagcaaggatcgcttgagcccaggagttcgaaaccagctggggcaacagagggagaacttgtctctacaaaaaatttaaaaatcagctgggcatggtggtgcacgcctgtagcccaagctatatgggaagctgaggtgggaggattgcttgagcccgagagtttgaggctgctgtgagctgagatcacgccactgcattccagcctgggcaacaaagcaagaccctgtctgaggtcaactctgcccccaggaaggtatgggaccttgcaatcttatctaggttgcgtctttttcattgaaatcacgaaatcattaaggtaagtagggaagggtcaagatagctaagatgagtgaggggacacagacaccaataaaagttctaactttgaggactcctccagtattcttttcatcctaaagcttctggcctatcagctagttcagacacagcctaggagtctcaagccagtacaggaacaaggaggcaggttgccctcttggggcaaagctgtggccccacccttgatgaagaacgcctgtaggaacccaggacctgtgagcaggtagagtcctgaaggtttaagattctgtggagcaggtatgtgcagtgccagtgcgcaaccagcaactgatggacaggaataggtagagctgctctgagtgcattcctttggcaagcctgggccagaggcacacaggaaggaattagtcatgtggtatcataggccaggtgtggaagcaaatgagccagagtggaaccaggaccagccagggccaaggcagggagaagagttcctctagctgacattgacaggaaagcagagtcaaaaacctggaatggtttgcttcaaagactggatgctgcctaatgacctcgaaggccagtgatacctggactcttgagtgagcaaggcagattttggaatgagcacacaacttcaagtaagcccggagatgattacctgtagtttctgctgctcttagaggcagaatcatctgagaactgattgaggagtgcatgtataccccagagactagtgcactctaggataaaaggagtcattcagcccttacttttggttggatgcagggtgtagtttcaataaaatgtcacagaacaaatttctaagacctttaggttgagtgagtgttagagtttgtctagtagtatatttctcatcagttacctatttagctgttctgcataggcctttgagataaggaaataag

SEQ ID NO: 585362 - DNA, 4001 bp, Homo sapiens
tgggctgggcctccccagacctcagcacttgcccagagaatccccttcagggctgaataatttcatcctaagaggacagcacatcgaaggctttgcatcataggtagcttattttattggattgctttgccaataacacttctaacactcaggagacttccctcagacacatgcctagaaggcctgagaggggcaggtctggccacaaattcaaactttcttcagtgtttttcatgtctttctcaccaaaagcgaagccaagacttctcctctcatcccctcttcccaggggagatcagtctccggtgtacggtggcaggctaacggaggtgaccaggtcatcattggtcaggggctggcttcggacacgctctagcatcttcagacctgcaaaagaattgcctggagctgaagaaccagagtcccattactggggcccttagtaggcccagactccaccaggaaggttccagagaggatgtcaccccagcccaggtcttccaaggtaacccatttactcctccctgctaccctctcctccctgagcaatcgcatgccacaaaaatgagcccttcccttcccaatggactctgggaagcacctggattccccagccacacaagggattcttcacgaatccaagatgccacacaacacagccagaactccaccatcaagccctccacctccacagttcggccaaggatacctacctcgagcgtgacacttggagtcctggctccccacgcaatggaacatgagcagcagccactgctttgccattggtggtccgactacagtcacacgtgtctggcctgtagctgtgaaacacctctccagctgaataagggtgtggctgtgcagctcaatgcagcgaaggtacgtgtcatcaagtcctgtaagcacaagaagtgagaagagaaactgtcagccaccagtccttggggagtgaggaggtggccttgagggtagggatgtgtgactcatgaaggtgggaggagaggggaagattgaaaatcgagaaggggatgaaggaggccggcctagcgcagtgactcatgcctgtaatcccagcaatttgggaggccgaggcaggtagatcagttgaggtcaggagttccacacacgcctggctaacatggtgaaaccccgtctctactaaaaatacaaaaaattagccgggcgtggtggcaggcgcctgtagtcccagctcctcgggaggctgcggcaggagaatggcgtgaacccgggaggcggagcttgcagtgagccgagatcgcgccactgcactccagcctgggcgacagagattccatatcaaaaaaaaaaaaaaaaaaaaaaacacgaggccgggcgcagtggctcacacttgtattcccagcagtttgggaggccgaggccggcagatcaggaggtgaggaaatcgagaccatcctggctaacacggtgaaaccccatctctactaaaaatacaaaaaaaattagccgggcgtgatggcgggcgcctgtagtcccagctgttctggaggctgaggtgagagaatggcgtgaacccgggaggcagagcttgcagtgagccgagatcgcgccactgcactccagcctgggcggcagagcaagactccgtctcgagtctcaaaaaaaaaaaaaaaaaaagtacaaaaactagttaggcgtggtggcaggcgcctgtaatcccaggtactctgcaggctgaagcaggagaatcacttgaacccaaaaggcagacgttgcagtgagccaagatcacgagcgagaatctgtctcaaaaaaataaaaataaaaaacagatgaaggaggggacgtgggcaaaggccactcaccgaagatgagctcctcctggtcctcttccatgtggaacaccattggagaatgaaagttttcgggcagggtccaccacggctccttgctgagagcactcgttcccacggccatgctgtgctcccacctgattcagaataggggaaagtctaacaaactggttggcaaaagacttggaaaagcgaggaagggcctaggctctgtccttaaaaagggttgtccttaataagggttgttggaatccaaacaacccgccccttgatccaccttagggtggatgtccaatccccggaggtcttcccaagataattcattccaagtaattatctgctctgagcttaattctttcaagtcaaacttaatcatctgataagtgcttggctttctgatgtcctggaatcagaaatttttcttcactctaaattcaaagaattttggagcagggggttgagggtatggaggtgcaggaaggctccaaatgggctccctagatttgcacaggtgtcggcagccacccagtgaccacacagtgtattccaacacgacttggtttatttggtgtgttgcgtcaagggagagcaaacaatagaggaaaataaacttgataggatagtgtcatagggagcccattgtaggagttgactagggcagtccaaggcgtgtttaaggagtaggagccagttctctaaaatggtgcaatttgatgattattctggtaaatttatctaggaagttgagagactaatgtggtcttcactgcagaatgttatctctctctggtttcaaatatagttacagaatagactttctatatcttgttgcatgacaatcactgagcaaacttgactgcttaaaatattcttcggccgggtgcagtggctcatgcctgtaatcccagcactttgggaggctgaggtgggcggatcaggagggcaggagttcaagaccagcctgaccaacatgctgaaaccctgtctctactaaaaatacaaatacattagccggagtgtggtggtgcacacctgtaattccagttactcaggaggctgcagcaggagaatcgcttgaagccgggaggcagaggttgcagtgagccgagatcgcaccactgcactccagcctgagtgacagagcgagaccccgtctcaaaaaaaaaaaaaattttgcaggagatgtttgtgtgtggtagggaagattcagcttggcctgtcagcttcccactgcaagttcctgggtgatttttcacttttcatcctcctcttttgaccaaagacaaagtcagccatcaggactttcatctgtgaggttcagatctacaccactgtctgagtccacagatcacaaggttatcgggagaacattctctgcatccacatacatttggtctctcatatacatttagtacaaaatatacaagtgaaaatataatgactgcacagtagcatttaagactgaacaggaggccaggcgctgtggctcacgcctgtaatcccagccctttgggaggccgaggcacgtggaccacctgaggtcagcagttcaccgccagcctggccaacatggtgaaacctcgtctctactaaagatacacaaattacctgggcgtggttgcgggcgcctgtaatgccagctactcaggaggctgaggcaagagaatcacttgaacccaggaggcacaggttgcaatgagccgagatcatgccattgcagtccagccttgggggcaagagcgaaactccgtctcaaaaaaaaaaaagaaaaagaaaaagaaaaagaaagactgaacaggatgtactagtcaaatgcaggtaattactagaaacaaaatgattattagtcctagtaataggttgcaaagacaaaggccgatttcaaaaccagaccatgaaatcatgtcccaacttcatctgaatctgttctagagagacaggtagtcttttaaccttgccacaaaactcttctgcctcagcagtaatgttttagggaggtgctgcaaacagtgtttgctatcaaataaaagctgtccttggctggccaagaagaaaccaaaaactatgaaatcattcataaccaccatgaaactttaatttaagctagtttgctggacctccagaaaagaagttagtgtcatctattgatttctgctaggaccagagaca

SEQ ID NO: 585363 - DNA, 4001 bp, Homo sapiens
aactgaggaaagagtagccgatgcctgtatcttgctggtgtccacgaccttcgtggaaggtgggtgacccaagcaagacctgaagactgcaacagtgcagcccaagagtgcagctcgggtctcttcgtttcccccttccccgatgtcattttccccagctgagaaagtgttctgtgacagagtagcaatacacccagggccttccaaatccagctggcccccaagcgacccagttttctcatcccaagtcaccttgagtagaacgacagcgggcttggagagatttcctagtgggccagagaggcttctcacctgttaaagccagatgcgcgcggttaaggagtacaaggggcacaccggaccacagccggggaagatggccacctcgggcggctaggaaccacaggccccacctgcctcgaggtagagggctgcgcagggcagaactgggctgttggaggaatgcgcctttccctcccctctaccttccaaaatacagacgttagggaaatgcaattatttattagaactcaagtttgtgttggcaaccattcaacagaaggtgtaaaacaaaaacaatccacatcatccttcctcgccaccccagcttcctggacttaagtgaggcgggggggaggcggggggcgggcttccactttgcaattctttattagaactcaagtttgtgtttgcaaccatgcaacagaaagggtaaaacaaaaaatccacatcctctccccaaccccagcttctgggcggaaatacgggctttcactttaacccctgactggctctggctccagggcctgagatgccttcataatctagtaactgggtcccgggcatcctcgcgaaaccgctgggtcactgccttgctggcagcttcgggggatcgctgggtccccgacttgttggcagcctggagagactgctgggtcccggcctcctgcacctccaccggagaaccctgtgtcccgacctcctggacttccaccgaacgctgggtcccggcctcccggacctccaccgaacgctgcgtcccggcctcccggacttctattgaagaccgctgggtctcggccttctgagtggcgacatcctgggcgagggcctttcctgagcctggaagaagagcagtgtgcagaggccacagctgtgtctctatatcctctccaaaaaaggacagtcacccaagcggcctgcgggagtaggagccagaaatcccagaacgagggttcaatttggccttctggatccgtggcagcgagaaccgccccctcccccacccaccaaccgcaggccgactgggagggcgagactgccgccccagcagccaggaaaccccaggatcactcctacggagccagggtttgctccaggtagccctattcccagccccgtacctttcgcctggagctggcggtgatagtcagccaggttcatgatcatcttgattgtgtcctcctggtaagaaggcctcccaaataccaagatctcagcctcgccgttagggtccaatcgattcacgtgaatcaagatttgggacataccctggacgtgcgggatgcgttctccgccccggcctgcgcgggtagcagagaggctgtgagggaccggtggctcccgggggtcttgggaggggaaggtggaaggaggagacagccagagggcattggctactggtgaggatcgccctggaacgcagccagaatatgtgggctgtgggtatgggtggcagaaagaagccgcatgggggctgccccttcttggtccactcaccgaagatcttttccaccagccaaacctcaaggcgaactaccttcggattcttcaggaactcagagtggaaccaggagaaccgcttagggaggtgaccgagcacctccactggcattgcttttggctgcatcagttgcacgagcgtcggaaaccgcctgggagcgtccatgctgcggccggtcctgcaggagacaaggacaccacagcaaacccaaaggccgagctggagctgggagactagaaccgcggttctgcctgggccttatttcaagggcttttggccagcccctcctctctagccgcgcccttcttattgggtcccaggcctcgcctccgcctccaggagccccggcttcttccgaggccgcccaagtgcaccggttcctgggctgctcttagagtgtcccttctgtcaggagcagcccttttcccagcgcacccggtaggaggaaccgggctctgggcaccaggaatccgctggtgcccagcgggagtcttaaccatggactcaggaaggcgtgggcaagcccagtatctctcccagaggaaagaactaatacttgcagaatgaatacttcataggtccctcacgcgcttctgatccctggccactacgtttcctccctctggaccaggttttcagattattctgtcacttgcctgagactgctgagtacagagcagaataagcgcccgccttttttctttctttttcttttttttttctgttatagggtctgtgtagtgagatttgcatagtaaaaaaaaaaaatggatagaaaaaaagttatggggcctggctatgttgcccaggttggcttcgaactccagggctcaaaaaaatcctccctctttagcctccccagtagtgggactatagcacgcttttaattaatgcagccatgaacacacctaaccacagatagttctcgtggtttggacacaagatgagattccttgaaaatttttgacatctctattctcttttttatttttaatttttaaaatttgctgcagggtctctctgtgtcacccaggctagggggcggtggtgtgattatagctcactgcagcctccatctcctgggctcaagagatcctccctcctcagctcccccagtagctgggactacaagctcccgacaccatgcccagtgatgcctctgttctctaaataacacaattatatttgtctctttcttccttcctttcttttttcctttcccttttcctttcctttcttttccccttccctttctgacaagggttcgttatgttgcccaagctggtctcaagcaatccttctggcctgggcaaaatgataaaaccctatccctacaaaaaatacaaaaattagctggactaggtggcacgcacctgtagtcccagctactcggaaggctgaggtgggacaatcccttgatcccagagaggctgagtctacagtaagcagtgatggtgcctctgcactcccccctgggtgacagagtgagaccctgtctcaaaaataataataataataactgttttagatgtgttgctataagacaaattataatttataatttatttttattcagtattgaaacactgaagagaacttcaggtttgccacattaataggccgaatgtatatattcagaccatgcccaaccggctgaatatatttcatatgtaggaatgatttagtagttgggaaattcttacttgctaattgagatgattaaagtactttgcaaaacaacaagaaaaaaaaaaaccattaaaaatggggcaaagccgggcacagtggctcacgccaggagttctagaccagcctggccaacatggcgaaatcctgtctctattaaaaatacaaaaattagccgggcatggtgacgggcacctgtaatcccagctactcaggaagctgaggcatgagaatcgcttgaactcctgaggcggaggttgcaatgagccgatatcaggctactgaactgcagcctgctggatagagcgagactgtctccacaaaacaaacaaacaaaactgggcaaggagcatgaagagatatttctcaaaagaagaaatacaggcagcctacaaacacatgaaaaaatgctccgcatcactaatcagaagaggaatgcaaattaaaatcacaccgatataccatcatacaccagtcacaatgacttttattaaaaactcaaaaaacagggcgggcatggtggctcatgcct

SEQ ID NO: 585364 - DNA, 4001 bp, Homo sapiens
cttggccgtcttcaagtacaataactcatattaatgactgatgaattaatctttgagccacttgtctcaaatagaactccaattagcgggtcagagagaatgatcaatttgtaacttttttttcactttaaagacatattataagctacataaagaaaattctggaaaatatattgaagactattcaaaatatattaaagatactgaagactggtaagacttgccttttaaatcatttcaaacaatcttaaacatctattaacacattattttgctattatttttatgtagttgtcttttttgggaaagtaaaaaaagttcgtttttattgactttacttttccactttaatttatattttttttcattcagtaaccaagaaagtagtaggcataattgtatttcaccttcccacttatctataaaactagctttttccctgaaaacagtttagttatttcacatgttccatgttttgaatataaatcttttcctaattgtttagtatttaaacatagaaaaataccttacacttcattgttaatataaataacaattcataaattaaaaaatatagctaatgcctatttaaatcatatattgaggagcagaatttattcttccttggtacaactaagtctcaaaaaaatcttttaatactgaggagcttgggtagaggaagttatccgttttagttttttgctgtatgtaagtccataacaaacttagctacaaaactgcattgtaaccaatttgatgatgaagcaattcattattaatgaagcattcatctaaaaaaaatctgcagatgttttaaaaaggcatgggtaagtaactacagataccataggtgtctttagtatttagatggcattattataacataaatggagtaattcggttaataaagttcatgtgtcttttttcaaaaaaaaacctttcaaagcaatgcaaaaaacaagacatatgtgttcctctaggaatgaaatcccctttaacattacaggtacacaaaagaaaatgcacacttggtaaaacagttgatcaattatagagtgttcccagggaccaatatctcacagagtacccaatcatcacacttcaaataaatgtataagcactttagcctttacttaccacattaacatacatataagaacatgcatagtttaatgcataggttaattctaacactttccataggatagactttgattaaagggtatcaaaaatcacttcctaaatgcagcaaaaaataaaaataaaaataccgatctgtagctacgaagctcttagaacactacattgatcaccatttacttccaaactgctttcccttccctctgcgaagtgaaaatgtccctgtagaccgcgttacatacactttatggtttctctatcaatgatcctaacaggtcacatcgccactgccattagatctccgtagctttggtcttctccaaattaagacgtggagaaggagcactgctgtccgccccaagaacggggtctgtccgcccgagctctaaggcgagcatcttcagggggacagtttctgcgaaggcggggagaggagtccctccccaacttcactcccctaatcaagccgcgggtgagataggcagccggcggtttgtgcccatctgtgggggcaagtcctaccttctgccaaaaggcgcgacgcatgcacaaaagatggatccaggctatctttctctgccatcagctcaggcaaatatttctcctcttccatagcgcggacttcggattgtccccgggcgaagcgcgaggttccgctcgctcggacgcaggcagggtcttggggcagcgcctggctcccgcgctgctcctcctccgcgcggcgagggatctctgtgcgtcctcactggcccatgcacccagcacctgcgactcccgccgtcgggctgcgtggccccgcgcccacacctgcccgtcccttccgtcgtccctcgctcgcgcagagccccggctcacaccagcggccttaactggagaggcgggaacaggacgcggcccacctccgccaaccactcattggtggtggtgccaggagaggcggggcgctggcagaaggccgcgggctctcattgggcggtagcgcaagtcgggtggcctgactggcaggaggcagctgcagaggggaagggagctcggaagatgcaaacgctttcttcttgcgcccaagccttccctggctattaggcatgcccagttttgtggagttctctgtgtcttcagctaaggcgcagaggagagagagcgcgggaaaagcgcaggttaaagagagaggtctgagtacaagtggacaggggagatggagatgagaagtgagccacccgagagggtggaaaagcgccagggaaagtctcaggaaggtagatgggacttcacctgcgtccctaaggcacaggtgtctcctttccctcacacagctcaggcgcactccagttgtgcaggaatcagcagcgcactgggtctggaaatacaatgaagactgcatgtgatcggcagctggtatttccgatgacctacatctcagggacgcagtaggatgttcattgataaacaaataaagcggctcgaagaaatattgtgcagagacatgattgaggtgtacaatcattaggatattgaattagttctggtaacctatccgtgcctcctttccccagaccctatctgtggaagggaggttgggaggggctgaatttaaaaaccaaaaacaatatgattcattagtcacagtttgtgaaagaattgggaagacatgtagaagaaagaagagactagaaaataggtaaccacgtttgctctaattttcccctttctcctagttttagatgtgccagtctctttcaccaggtactgttgctgagctactttgtattatcccacctctatttaaaggaaagttaaaccctcatgatatcaccaagcgtggaggcaaagcccatccttcttttaccaatgcggctataaaatgtaacttgcatgcctcaatcgctaggaaacaatctttccccaagtcttgggttctcgtttcataagtagtcatttcctgattcttctctcccccattatttttggtgtggaagaatgagggccaactttgctacaaataaaatgtgctgaaatttttccaacttatcttactgtatttaaatattttccttttaatttttagataaattcgggagattaacttttatttgtataatgtttaaataacgtaacgtgcctcacattgattatttcaatacgtcctcacagaagcactctgaaaaatgccagccaagtattactttctctgtttgtataaatatggaaactgaggcaaaacagagaaatcgtctcatgtctagttaatgctgaagttgagattaaaattcaattctatattagcaccatttatatccagaatatactgcttcaacctacctttctgtgtgttatatatttaatttatttgtgcatgtgtgcattcaacaaatgtttattggatactgaaaagagtctagggacagtacttaaaattggagaaacattggtgaataagatacatacacattcattccttgtcatcacaaagatgttttctaatgggagaagataaataaaaccaagtatacaagaggaatggtaattgttgactgcaataaaggtcaagaatgaaccaaggagttaagaaagagaatacaagggaagacattagtttctttatttttgactagggtaaacatacaatctcgataagcagctgatatttacggtgaaaactcatggaaaagaatgaaccaagtgagtacaatgtgcaaagaaagacattccaagcaggggaacttgcccctgaaaaagccctgtggtggaaagaactgtgctgtcttttggaattgactgaggtcaatgtgactactgtaatatgggaaagaatggaatcaataagggaggggggattgatgtgtacaaacactgaagatttg

SEQ ID NO: 585365 - DNA, 4001 bp, Homo sapiens
tgtgcatatgtctacatggtccccgtctgagtgagtgggtgtgtctgtgaaagtgcaccctgtgatgggatagcttcctggacaggggagaggggggggttcccactctgaaccagggagactctggctacccatgaccttgaactgtaataattgggtaaataatgatcttgtttttactaatccttcttaactgtatgtatagatcccatttatttctatgtttaatattagaagtgttgtggtctttatttagaagtttggtgatttttttatgaccagaaatatgctgtaggaacttaactcttgtttatatcaattagcctgtggtaaaattggtttccttatacctcgttgtgcttaaaggttcacagtttccaagaacgtatcaagaatgttaagtgaggacttactgtatttatttaaagagaatgcttcctatctattggctagggaaaaaaaaaaagtcaagaaaatttaacagcaactctattcttttacattcatacattaccaaagctctcttttggctatttttaattcataaagattttggctgaattattttcattatttcgaaacaaaaattaagttcttgcctcggcattttgcattacaaatgcaaatgcattacaaatggttaatacaaataaatcagagtacttaggtaatatgtttacatttccctttttcaaattacagaggaattcacctttctctgtgactcctacgtctataactgaactgacacctccagttttcctcatctgaattaaaaataatactaaaaaaagcacaaaataaaagtttagatttggcataactttagtagtctctacaattgtggtcttcttataataaattgaagcatttggaaagtgagcatgtatttcaggaataaagaaataaataccaacatttacttccaaaattcttgtgtgtgggggggaacattgtctacaatttattttttctgttactatcaaaaacatcattcaacttttcaattcaagcagtggaaaaaatactaacatttcaccgacaaacaaaaatgttttgatgaacaaaccagcaataaaagtgcacatgagtatgtatatcatatttttcctccttgtatttaattaacaaatgaccttaagatgataactctcaaaatttcaggtttatcctcccgattaatttgtgacattccttggagggaattcaaagggaagaagagaaagattttaagcttcaggttatggtaaggaacagagacaaaatgcatttagcaaataataggaaagatcacataaatagttctgaatgaagtttaaagaaaacgattccttacttctaaaaaaatgcaattcgtgaggttgggaaaagacactcaaatttccccgactccaccctactagtcaacaatcagtgcagcaatcaaaaaatgccctttcctgaatgcccagaagaatcttaagaaactcaccttctgaactcagggcgtctcgattctacttttgttgggtattggcctgcctactggctgccctctttcctatttctcggccaggcgctctgggaagtagataccgtacctgtggtcactgctggcgacactgaagctcgccccatgcgttgctgctggccctgagcatcactcgccgtcccacttgttcctcctcgtcgtcatcgcaggtcttacacacacacacacacacacacacacacacacacacacacacacacacgttcacaccctcgcgcgcgcacctgctgttaagaggtacagccccaccccagcaaaatcctcgcttcctcttccccgggacgtagccccagaggagcgaatctggaccaagcccaagacaggctgaagctactgctgcgctctcacctccggcagtgacagcgagcgccgccgccgctctgcgcggggccagccaggcccgccgagggcagcacaggtggagcaaggttgcacccccgggggatccccgcccaccgcccgcggcagcttctgcaggctcggggaaagcgcgcgccagtgattcagcgcctttccgccgccgcggttaccacggcgacgcgcgcgcacgcgcacacacgccctcagggatgtggggcgcggcagccgcccctgcccagctcccctgctcagctcccctgctcagctccccggttgcgctctaagtacccgcaccggggcgacacactcccaccccgcaggggaccaagcaaaagtctttcgtgaacctgagcggccttcataccctacctgctttccttcaccaagcccttccctgtcaccgtggccctaaacagtctgggggatgaacactccttccaaataaacacccgggccagggtggctcaagggagccgtgggtgcactgcctgggtcaaacacccttcgcgaatgtgtcccccagcttgtccccagcttgtgtcaccccagctacacaagttccattcttccagtgggagtctctttggcccctactctgtaattatctttctattttgagcaggtgctttctgactgagactgggaacctgtgctaggaggggctcccatcacctccaggccttgcaggttaactggatgcccagtatagtttgacatttgcatcttgaggaacgtgataatctaaaccacagaaaacttgggtggaagactcttgcatttttactgttttaataaagatgcgaaagcatctagggataatatcatgagcagaaaaggtagccagggcattcctcgcacatctcattactaggaggtataagtgcagtgcttagggctgagtcacacactgttgatgaataagcttcttggctactcgtatttaccgaagagcctcagacaagttacctaatctagataaacctgtttcctcaattataaaatgaagataatagcattcatataggatgattctgggaatcaaataagataatgcacatttaaagagtaaaaaccagctgggtgcggtggctcacgcctgtaatcctagcactttggcaggccgaggcgggcggatcacgaggtcaggagatcgagaccattctggctaacacggtgaaacccccgtctctactaaaaatacaaaaaattaaccgggagtggtggcccgcgcctgtagttccagctacttgagaggctgaggcaggagaatcgcttgaatccaggaggcggaggttgcagtgagccgagatcgtgccactgcactccagcctgggcgacagagcaagactccgtctcaaaataaataaataaataaataaataaataaataaataaataaataaataaataaaaactaaagagtaaaaacctgtccaggactcaaagagtgaaaatcagcttggacttggaaaagttagtactgccaatgatcaatgatcaggctgagaggacaaagtcagaagcaaaattaacaggcaatgttgtttcctctgaagtcacgcagcaggtacaaaacaacacaactccttgtgttccatttttgaatgactactactttctacctttgctttactattcccatccataactggggatacccaattgctaaactcccttcacctcctgacagcacccaatccctcattaatccccctttctctcaatctgcctcagaaacagcaaccaactggatcccagctctgattccaagactctccctggaatcctttaataggaagccaaatctttacaaaagacacttcctcctttctgtgctcacatggcattccacaggtactctttcaatgcatcaagccaatgaatctgattttgtccccaacgatccttggctgattagcctttaaagaaacatatttttagcacatacacacacacacaggcttagcccagaatgtttaactataccatctttttaactcagagacactgtaatgaatatctattttcatttttaatgaatatatctattttggtattgtatgaaaatgttagtctccttctttaggacacagatgtgaggctactacct

SEQ ID NO: 585366 - DNA, 4001 bp, Homo sapiens
caataacatagtttcattcaacgttggtgacaaaaaaattcctggccagggccactgtctatgtggagtctgctcattctcctcatgtctgcgtgggttttctctgggcttcggtttccttcacatcccaaagctgtgcatatgtctacatggtccccgtctgagtgagtgggtgtgtctgtgaaagtgcaccctgtgatgggatagcttcctggacaggggagaggggggggttcccactctgaaccagggagactctggctacccatgaccttgaactgtaataattgggtaaataatgatcttgtttttactaatccttcttaactgtatgtatagatcccatttatttctatgtttaatattagaagtgttgtggtctttatttagaagtttggtgatttttttatgaccagaaatatgctgtaggaacttaactcttgtttatatcaattagcctgtggtaaaattggtttccttatacctcgttgtgcttaaaggttcacagtttccaagaacgtatcaagaatgttaagtgaggacttactgtatttatttaaagagaatgcttcctatctattggctagggaaaaaaaaaaagtcaagaaaatttaacagcaactctattcttttacattcatacattaccaaagctctcttttggctatttttaattcataaagattttggctgaattattttcattatttcgaaacaaaaattaagttcttgcctcggcattttgcattacaaatgcaaatgcattacaaatggttaatacaaataaatcagagtacttaggtaatatgtttacatttccctttttcaaattacagaggaattcacctttctctgtgactcctacgtctataactgaactgacacctccagttttcctcatctgaattaaaaataatactaaaaaaagcacaaaataaaagtttagatttggcataactttagtagtctctacaattgtggtcttcttataataaattgaagcatttggaaagtgagcatgtatttcaggaataaagaaataaataccaacatttacttccaaaattcttgtgtgtgggggggaacattgtctacaatttattttttctgttactatcaaaaacatcattcaacttttcaattcaagcagtggaaaaaatactaacatttcaccgacaaacaaaaatgttttgatgaacaaaccagcaataaaagtgcacatgagtatgtatatcatatttttcctccttgtatttaattaacaaatgaccttaagatgataactctcaaaatttcaggtttatcctcccgattaatttgtgacattccttggagggaattcaaagggaagaagagaaagattttaagcttcaggttatggtaaggaacagagacaaaatgcatttagcaaataataggaaagatcacataaatagttctgaatgaagtttaaagaaaacgattccttacttctaaaaaaatgcaattcgtgaggttgggaaaagacactcaaatttccccgactccaccctactagtcaacaatcagtgcagcaatcaaaaaatgccctttcctgaatgcccagaagaatcttaagaaactcaccttctgaactcagggcgtctcgattctacttttgttgggtattggcctgcctactggctgccctctttcctatttctcggccaggcgctctgggaagtagataccgtacctgtggtcactgctggcgacactgaagctcgccccatgcgttgctgctggccctgagcatcactcgccgtcccacttgttcctcctcgtcgtcatcgcaggtcttacacacacacacacacacacacacacacacacacacacacacacacacgttcacaccctcgcgcgcgcacctgctgttaagaggtacagccccaccccagcaaaatcctcgcttcctcttccccgggacgtagccccagaggagcgaatctggaccaagcccaagacaggctgaagctactgctgcgctctcacctccggcagtgacagcgagcgccgccgccgctctgcgcggggccagccaggcccgccgagggcagcacaggtggagcaaggttgcacccccgggggatccccgcccaccgcccgcggcagcttctgcaggctcggggaaagcgcgcgccagtgattcagcgcctttccgccgccgcggttaccacggcgacgcgcgcgcacgcgcacacacgccctcagggatgtggggcgcggcagccgcccctgcccagctcccctgctcagctcccctgctcagctccccggttgcgctctaagtacccgcaccggggcgacacactcccaccccgcaggggaccaagcaaaagtctttcgtgaacctgagcggccttcataccctacctgctttccttcaccaagcccttccctgtcaccgtggccctaaacagtctgggggatgaacactccttccaaataaacacccgggccagggtggctcaagggagccgtgggtgcactgcctgggtcaaacacccttcgcgaatgtgtcccccagcttgtccccagcttgtgtcaccccagctacacaagttccattcttccagtgggagtctctttggcccctactctgtaattatctttctattttgagcaggtgctttctgactgagactgggaacctgtgctaggaggggctcccatcacctccaggccttgcaggttaactggatgcccagtatagtttgacatttgcatcttgaggaacgtgataatctaaaccacagaaaacttgggtggaagactcttgcatttttactgttttaataaagatgcgaaagcatctagggataatatcatgagcagaaaaggtagccagggcattcctcgcacatctcattactaggaggtataagtgcagtgcttagggctgagtcacacactgttgatgaataagcttcttggctactcgtatttaccgaagagcctcagacaagttacctaatctagataaacctgtttcctcaattataaaatgaagataatagcattcatataggatgattctgggaatcaaataagataatgcacatttaaagagtaaaaaccagctgggtgcggtggctcacgcctgtaatcctagcactttggcaggccgaggcgggcggatcacgaggtcaggagatcgagaccattctggctaacacggtgaaacccccgtctctactaaaaatacaaaaaattaaccgggagtggtggcccgcgcctgtagttccagctacttgagaggctgaggcaggagaatcgcttgaatccaggaggcggaggttgcagtgagccgagatcgtgccactgcactccagcctgggcgacagagcaagactccgtctcaaaataaataaataaataaataaataaataaataaataaataaataaataaataaaaactaaagagtaaaaacctgtccaggactcaaagagtgaaaatcagcttggacttggaaaagttagtactgccaatgatcaatgatcaggctgagaggacaaagtcagaagcaaaattaacaggcaatgttgtttcctctgaagtcacgcagcaggtacaaaacaacacaactccttgtgttccatttttgaatgactactactttctacctttgctttactattcccatccataactggggatacccaattgctaaactcccttcacctcctgacagcacccaatccctcattaatccccctttctctcaatctgcctcagaaacagcaaccaactggatcccagctctgattccaagactctccctggaatcctttaataggaagccaaatctttacaaaagacacttcctcctttctgtgctcacatggcattccacaggtactctttcaatgcatcaagccaatgaatctgattttgtccccaacgatccttggctgattagcctttaaagaaacatatttttagcacatacacacacacacaggcttagcccagaatgt

SEQ ID NO: 585367 - DNA, 4001 bp, Homo sapiens
gctgcagagggcttcaaagaggcctgggtgagatggaccagcagagggcagcagttctcaaatgtgtgtatggaaccatgcatttttaccacctagctctggtgcattggttgccggtggtctggatgccacactttgagaaacacagctccatgacatgagggtgatgcaagtctgtgttgtaccattagctgtgtggtcccaggagatgaagtcaacataatcatctggtaggagactagatctctagtcgctaagtcggtttatatatcctcctaggccagaaagagggcatgtttcttgtgagtgcttgtatcatagaacaatatgtgatagggcaaattgtgacctggaatggaattattggcaactctagagatgtgccggactgagaaccagagataagtagaatgtccttaacactgcaaggagagcaagagttacaacaggtttttaacctctctgcaatgcttgtgggacaaccaggctcttttccccaaactgagatatactaagtaacccaaataaagaaacgccatccaaagcctcttaaccatctgcctgcctacttgcatgcctgaaactttattcattcatatcctacttttgatcttaccatgagaaagatgtttgcagctgggcgtggtggctcatgcctgtaatcccaacactttgggaggccaaggagggcagatcacttgaggtcaggaattcaaaaccagcctggccaacatggcgaaaccccacctctacaaaaaatacaaaaaaattagccgggtgtggtgacgtgcacctgtaatcccagctactcaggaggctgaggcaggagaatcacttgaacccgggaggcagaggttgcagtgagctgtaattgcgctactgcactccagcctgggcaacagagcaagactctgtccccaaaaagaagaaagacgtttgggttcagtagctaagaaggtattaactgagctctatgccgttacgctgtgctgttagacacaaccagtctccagttacttacttgagagaggttaagagtttgcttgtgtccttgttttatttcaccttggtagtctgtggggtggcttattaaattccattcatagttgtaggttgtttctgagagcaaaaaataaatatgagtagttataaattctgagaggacactagataacctgggcagagggaagatgacagcctttaaaccaccagtgcagattaccttagatatactcaactcagctttcttttttttttttaacttatatatatattttttgtttatttgtttttatcccctcactcttgttatcatcttatgaacttgactttcaactatcagccaagataacatgtatcttcttaatgtaacatttctttttttgttataaaaacatacgtcttacaggaaatttttaaaatgtataaagttaaaaaaaaaaaaacctccctaacttaaccattagtatgtgatgagttttttcctagggggctacatctgactatccatatcagttttaacatagtataatacattgtgcttttctctttttaacaaaaggcaaggagatttcaattcatttgatctgttgtaggggtttatttaaggacacaaaaacagtataaacatgtctatgttaagatgaaactgtctcccagctgcagatattagtagttaaaatataaggtacctcacctcaaaggattaaaatgcaaatgccaaatattatcatctctgtgtataaaattttgaccaatatgtggtggagaaaaaaatgaattaaggaactaacctgaatgagaaatagtcaaacaccttaagaatgagtttaccttaaaaacaatgcatttgacaggccacaggtcccaggtcaaatgcttactgaatggtagagcactggacaagtagaagaaagagcattttgaataaatttttttgagcagctagtgtgaggcatcctgagaacctgagagccgtgattgtcaatgccacagtatctgcaaacaaacctatgggtgcacgccacttccctctcatcccggtggaatcttcccaggttctatgggttattacagttcaagaactggtacgtggcagcctctcctgatctgctttgcatcatcagaaatttatgactttccatcctgaccaattaaacgatatatactgtatttaatttcctagattcttactccatttgaaactatttcaacaaatgttgatgcttaagaataatcaaagccttgtcctccacctttgtttgtgacgtcgtgcaatactgtgaaaaagaatcggcgttgtaaatagcctgtaaggacctgctgaagaaaaacaccccagttcctagtggtcagggaggaaggttaaactctcacctacaggtggcgctggcgcaacaaaggccttcagttcaacttcattgtcgggtaaagttataattaggttatctccagccgataccgtaagttctttcactaaaagttaattagaaataatacgtgcaattatataatataatgtgttacattactgctctacactagatctgtttttggtatccataaattaaaataacatatgcttttgtaatagttcttcataagattttagctaaggcacgtttttcctctggctagaaattgaactgtacactatattatagtacagggttttaaaccacaaatatgagttggcactgtgacaaaaataatgattcaaattgactgagcaacgtattgagtgacaagagttgcgtgaaacaggtttcatgcaactgtgaattgggtccattttctcccttgctatcagcttttcttgacgccctggtgtgagctatttttagttataaaaagattgagtgtaatcctaagtgtttctgtctcattagtcacactccactcagttctgatagtagcctcatgaattactgctaatggccttgtacttggaacctttccaagacaaaatccagtcaccctcaatataaaaaacctattttaacttaagcagcaggaacattaactcttatcaaaagtgcttagccaccaagtaagcattcagaacaatacttgtttactttctctgtaaccagattacattgatatattcataaattctatcggtttggctccattggacattagtttcacttgtaaaatatattgcgatatgtccagatactacacagagaaaagcaaagatttaaaaaaaaaaaaaaaaaaaaaaaagctgagtgctccagagggatcagctgcaaggagatgtcagacaggttgttcatttaatccactcccctcctctcagtcctcagtccctcgagtgcctcctagatcagctgcagaggctctcagtggctttgctggctcctctcttgtcattttcactaactctttatcctgaaagtcagcaactgtagacctagaagggacattgatccaaacctatcatgttataggtggggaaattaaatcctagaaaagcaaagttgtccaaggctgtatggtaattagcaataggtccaccaatatttaatttaaatgtattcatttcaacaaacacttatataccggattaaactgtgccaggcattgccccaagggctttaaaatgatcaattcatttaatcctcattacaactgtatgcagtaggttctattaaaacccaaagatcctgggccaaactcccaggccagtttctttttccgtatactacacagcttctctcccactattatctttctctctatggaagctcaggctcaaagtaaatacaaaagttagagagagtaatctccaaaatacatggcccacagaaaagctcaggaaacatgacccttacgtctagcatattctaataacttccttattggaaaatctaatggaagctttgcaatcctcaccacagcctctgcgacacatggagctttgatacgtcttcccttttggaactacaggagaccagaacatgccaccccaaaatatgatttgtgaaagggaaata

SEQ ID NO: 585368 - DNA, 4001 bp, Homo sapiens
agatactggcatctatgtgggagagaaggaaggatttctgctatctgcatcccctaccccatatctctttggctctccagtttatgttcttccttctagaattccatttcagaataaaaatttattagagcaaatgtaagaggacagagtgagctgcattacttagtcacacaccccaactctaaaccagcattgcataatcccttttaacttacttcccctttccagggctgaaagccagaattataaagagttgtgagtgggttgcataagtatggtgatgggaggcaaatagttctgctagccttccggccctaccagtaagcaaagtttaagagtaacacacaagtctcacaagaaattattttcacccccaaattagcctcagtttggtcatggcagcaattctttctctgaggggtgctccattcttaggacacctgggtcactaccctttcaacctccaactcgcccattgaaaactggactgcatccaaacaaactaaacagcgttccttaggggcagctgctccattgctacttctctctttttagattattgtttagagtacttgtttcttgctgtccttatttccttttgctaaacatatcacttttcacataattaaagatttttcatttataagaggttacatattccaatagaaatgccacacacagtaggtactgctaatctcacaattcctagaagactcatttggcctgaagatgttttgcttctgcttaactttgatggattaggaattccccagcttataacctatcagagtaatgtaccatttacctcctaaattctctatccctttctccaggctattataatcacttgaattatttcaatgaattaataaatctcattcctctctattgttcacttgcaattgaatctttccaaagaccaccatgatttgattttgttagagtaaaagggaaatttttttcattgctgtgtattgctgatttagcacattcctcatgctccaacaaggtcaaagagacactaccacatgcaattccgaatgaatcaactttaccgtttcatttaattatcttcttccttgttttctttacagttatttactcaaattagaaaacatccaagctgtatgcacactgattttacttataaaatgcaaactttaaaagcaaacatttggtttgagtaaacaaatgtctaaaactaaccatcgtgaacaaaagacatagtggtaagtttccctcctaaacgtagattattcaattatgaatggcatagacttcagctcaaattacagaaacactaactctacagtgagtccaccaccaccttagataaaactaaaatttatttttcaccgcaattttcaaataccaagtctccaggattgtgacctttaatttgcaaatgttaaaagtctttatatgaataaaaaaaatcacatttgaataaatatacttagtgaaaatcaatgatgggcaaagtgcttttcaaacaactgagaagcagtgttggaaaaacagtctcaaagagcggatggtactgtcagtccacagttgggaaatccaccctgagcagctgaacagcctttttcctaggagtcagtacaatctgttatgcaccccgcccactgtttttaagcccagacacagacaacagcagagacagatgttgaaattacactccacttaaacagtatccatagtttaaaacatctcaacagcagcccctttgtatcctgccataattagtcacttgcttgtaaacttgccggaaagaaacatacctttcacactggggagaaatcctatggatgctcgaccactggtcaattagcagtggaagaaagtggatggctagctgtcttaaagagaaaagtctcagctcggtgaatctcgattctttacaagaaaaggggatgcaaaataagtccaaccattccacagagcagtactgacaagtccctttgaaaccttcaccacttttacaagtcaaaaagctgctcagcttagtgtcacagcagcagctgagactactgtgacgtcagttacttggaggcggccttcaagccacctcttccaaccagagctctgtaactttagagcagctcatgctctgggtaaacaactccaggtccaggacatttttagcttttataatggagcccagtattttcaaacttgccaaaagagctggttgttaacatcatacaatgacaatggccaattttagatttattttattaggaaagtaaactcatttttttataggcaagaattatctccctccttccataattctttctccttctcagctggtggcaggatgtactctgctgcacctttagaagtttgcatctggatgtggcagaacaatatgtgtagcataattatatatattatgcactctcaaaagatctgtgaaagttatcaaacttctatcttcaaataaaatagaaatggaacataaagtccaacctcttagctctctgtgattctgacagtgtgttgcttttatctacagtagtagcgatgtctttacgttagagaaaatcagagcccatgggaaaggatgagatttcttattgtgggaggacaaaacacacacacacacacaccccaaaaatgagatacctatgggcttattttccactaaagtgtgctgcagccataggaagagaaagcagcctaagtgtatggaaaagctctctaaatcatgatcaaatcagcctgttctgaaatgctaggagatcttgcctccccagcgacattttcaggtttattgtggctttgtacacacatgcatctgatgatatttggtttaatttagtcaaaaaagtctctagagcaattttttgcctaacttagcaaatacacaagtttaaacaataaggtcttatcttcaagtctgaagagcttccctggtgtggtctttaaagtaatacatattcactcacattattttcacctgcttccagataaacatttcatgaggagctaaagtttagtaatagtaacctgctcacagtaggactttaatacatgtaggacaatcaaatgaaaccatactctgtgtctggaaagcctgacatcataatctcaacagcaataacaacaataacagtgatagttatagtaataatagtgattattcactgaggggcaaccctctgcaaggttctgtgctaagtactttgaacagacctttatctgagttcaccctcagagcaattctgtctctagatactgataatctgatcttactgataaaacccaagcaaggctcattgtggtaaagcatcatgcaaaagttcatagaaatgcacccatgtggaggaaacgggtttgaactgttttgtctgattgcaaaccatggaattttgtcatagagatctaagtttcaattctgctgccaccacttatctgtgtgatcttgcagaccctgattcttccttaaagacataattatatttactttaagaggccataagaatatgagggaatatatatagcgccaagcacacaataaagggtagctcatgtctgcctccatgcttatgaggctaggaagaagattctttgagagagggaaagggaggagggagttgcacaaaaacatcaatacagaattgtcttaacattgtttctggccgggtgtggttgctcacacctgtaatcccagcacttctggaggcggaggcaggtggatcacatggggtcaggagttcgagacaagcctggccaacatggtgaaaccctgtgtctactaaaaataaaaaaattagccggctgtggtggctcaggcctgtaatcccagctactagggaggctgaggcaggagaattgcttgaacccgggaggcagaggttgtagtaagcagagatggcattcctgcactccagcctggttgacagagcaagactctgtctcagagaaacaaaacaaaaaacattgtttcctttaccttttcttctactccaaacttcttaacttctatgtatcac

SEQ ID NO: 585369 - DNA, 4001 bp, Homo sapiens
catggacaacacatttatcctcccttctttgacttgttttcctggtttgcccaatccaactgcacaatgaatgccctgcactattatttaactatttcatgcacttctgtcttgtcttgctaatgacagaacaatcactgggaaaggaagtacatccactcaggctggtttctttcagatttgactcgaaaaatttacctgcctcaatgctcagcctccccagtggctttaaaggacctaaactcagcaacgttgtggtttcacttaataagatgttgatgtcagtatttaaacttattaaaatactagattaatctcctcctccctgtttatctaaatctgcttaatttgcagcaaaataataacgaatactaggaatggcatgtttaaagcacaattgggccctgctttatcatgttacccagccatctgtgacccttcattagaggcattttggaatctagcttcgaatcacgctgctgaatgacaatggcaacggcaaaaatagtactgtggctttaagagccttgctgttctctcagatttctggtccatttttctttaacagtaagctagaatggtcaagtgctggttctacctacaagacaaacttcctagacaatattctagacaattttgtgatgataggcacaggtttaaaaaaagatgctgctataattacctgtacacacacccaaacatatgtgaattaagaccatctacatattaagagtcacctaaaccactctcaaaattttacatttagtggaaaacctgctaaaggctcttctctatctcaggctgcatcaaagcacacacagtgtcatgacagacagtgatggttcttggttgcaagggaaagggagtcaatttcatttttcaattgagtggcaactgaggcatcacatcaggctccagcaaggcagagagaggagcccatagagctagctgcgctggcttcttcttggcctttcctttctaaaaagcatcaccatcacccaaagtatgcttctgatctatttgcattaccatcctgaccattttgattgcccaaaccccgcctaactgaaatgtctttccgtttttttccgctgctgagttctgcaacctgagtctgatgagaaacacaaatttgctccctggaacttacttcaacgctagcacagctcacagccctaaaatcccacctgtctgaagggcagaccacaacagaattgcagaggtaacatgatccccgcccgtatgttatttttcatgtgcaataaccaggaaagctaacactaagcaagctgacctctatcaggaaaatcaaattaaacaagcctttccttcctggttccactcgccaaggattcgacatcggggttgttggtttaacttcccttttccccagaggcgcttcgctgtcaggccccaggattcgcaccggctccgggtcctgcctaactcggcgatggggaagcatcgtccccagcgccgggaccaggagaagggggccgccaggcagggaggacagcggttcccgaggaaggtttcggagagtgaaagagaccggaggggaggcggctgatgtccacgcccgagccaagactctcaaatcccacatcaatttcccgaggcgactctcgcaatcgccagaacggcacccatgaccgacgctccgcgaaagccccacgcgcggaggcgcgggttcagccccggccgcgcggccctcccgccgcggcgagcaggtgccggacgcttacccagggcccaggtgcagctctccttgatggctttgtacttgctcccggacgcctccttctgcagcttcctcaggatttcttccatcttgaccttccaggcgccgggccgccgcccacagggagagaagcgcgggcgagccgggccggggaagccgccgctgcctggccctgggcgcctaggcggccgccgcgcgcgcccccatgccgccccggcgcggatgctgatgaatcacgcccgctccatgccgcgggccacgtcagccccgcgccccgcccgccgccccgccccgcccgcctgggtcaggtgcgctccgctcggcggcggctgcgggctggggccggagagtgaggctggaggccgctgacctgaccgccgaggcaggccccgcgggcgccgcgcttagcggaaaggtggggacggatgtccggagctggctcgccagccgccgggagggagcgcctggtccgcggcgggcggcgggaggcaggcggggaggggcctcgccgcggtcttcgcaccccctgagccgacggtggccgcgggcggagtcggagcggcccagcccggacaccgggacccccagcgtggtgcaggcgccgcgcccgctgcatcccgtcgtctgctaaccggaaaattcttgcgttcagtcactaacagcttttttgggccactccctgtgccaggctcgggcgatgcagcgttgcacacactgtgcccctgcctgcagggaaactccagtcaagctttcaacacgcggcgggcggtgggctgcggtggggctggggtagagcttgatatgcccaaggaaaccaggcccagagaggctgggttacttcccagaccaacaagagttagactccaaacacgtcctgaatccaaagccccttctaaaaacccctatctcctccccttcccatcctctcttgcgctgaattgctgccctgtgaaaaatgtggtgcacaagggccgccgcagcagagggcttctcattggggtgaaaagggggagccccaggagactcacgcgggcggtggggaaggcagtgtgacagggcaccccgtgtttcctttttctttgaaaatgttcctgtggtggaagtgaggatgatggactgcagaggggcagactggcagctgggagaacaaaggttctgcaggaatctagaaaccaattaggccaagggtgggtagaaggggaataaaggaaagtatgtcaagagatattgaagggtagaaacaataggatttaatgacacaataggggagagacggtgtatatgggatggcttccaggttacttgtttaggaaattgggaggatggtggccccattctttaaagaagagaagataaaaagggtttggattaggggggatatatgagttcagttttgaacatgttcagattgaaatgataatgagatacttgtagattttttttatggacaggaactcaggatagagctctgggagggatgccagtatttgaagggtggtaaatataggagttgttgatgcctcgagtttgacaaaggttgcacaagagagggagtgacggcccccctaattctcaaatcatgggtacaggagcaagggcccagggaggaggctgagaggagcagtccgaaatccgaggtgtagggggtcagccaggggagggactgccattggagggtgtccaacacatggggatgtcagactactccttcggcgctcttggtactgaggaggcaaaacctacaaagtcccagcccccaaggatgcttctaccgctaccctcacgcccagtgaagccatcatttaaagaaaggtttaaaaaaaaaaaagtaaaaacgccgcagcagataatgtacttgggttaaagaaaattgttaactatttggaaaaatatatagatcacaactttatatcgtgtagcaaaataaattacaaatgtattaaaaattaaatttaagaattaaatgatgaaaagtttagaagaaagcataagtgaatatacttatcttaatgcattaagattatttctaacaaactaaggcagaaactgaaggaaaaaaggtcaatagatttgactatttgaatatttaagacctttatgccaaaagtttcatacaaaattaaaaagcaaatgatactctgagggatggattgaaggaagaaaagatgatacctctaaatcttaattatatgtggatttatatttttgaatctattttaaagtatttactagttttacaattaaaaacaatttcgtttaa

SEQ ID NO: 585370 - DNA, 4001 bp, Homo sapiens
ttggtatcatcaatatttagaaaggttccaaatgtcaggaacaaaatatacacacactattaattgggaaatatgtccagaaagtgacagggtaaagaacttatacacaaaacacgaaaaacaaacaacgatgttaacaaaacaatgtttagggaggaaattttaatttaaaaaacaagtgacttacaaagtcgccctaaacctacaaaaactaaaaaacacagaaacattagacagacactccattaaagaaaaattctacagcctgaataccaaactgcaactaactacggcattccaaaagacgagttggggacagaactgttttctgcctggcgagctgagataccactttacgcaaagcctttctaaaactccaacaattatggatgaaaatcaccccaaaatatatcataaaacactcccttctgctttagaaacccattctgtccaaagtgtgctcagaaatccttatgtccctgcacttgtctgaaaatgaagattcctaggcccccgcctggaaattctgattcggtaggtctgcagtggggcccaggaatctgcctgtttatacttactaaggcttgaaaactactgtctcaaagggaacaaactcagaaaaatagagcatgttcccagtgatgtaggattcttcattatgagcatcaactgtactatgccgtaacatgatgatctcagaggttagagaaatcttcaagctatttgccttcatgttagaagcaccataacgctaagattctgggctctcacaacccttcctgttttctacgtccttgctcatcattagcagctccttcctccgtgtcgcctttagaagttactcttgctccatttcaaaacagcgttttagacaccagcgtttttatcttaagtttaaatgaaaggcagggggcgagattaagtgtacagcacgttctttaggacgtgctctttgtgatggctacgggggtggctcagatagctcttttggtaaatttcccaatcctgcgccatgctccagtgtctagtatgtattagacactcatgaacattaaatgaccaggtgaggtaacattacataatggcccaccatagtcttttactctgggaaaaccccaatcatcattgctacttacactgacaaactgaatgtcgtcttcattttcatccgttgttgactcagatgcctcagggccagctggagggacagattctattatctataaaaacaagccaaaacatgcttatctgttcagccacattcgtgtaggaagagagcgtttccgaaaggaacaattaaagacagagagctcttgaggaaaacgaactgagcacaatttcacggaaacccgactaggaacggaactcgagctctggctcttgccacagagtgtgcggagctgcagggacccaacgctgaaaacgcgttagttaccagcctctcacaattccccttatctactccaggaggaacgcaagctcaacaccgaagggcaatcctgccttaaaacgtcgctcccactggcccagccgcggccacaacgaacgccagggcccgtgcggggggccgggcggccattgttgctgcgggttcctcgctcagacacgcaccaggccccagagctgggctcggcccaagacactgaagaggtatcgccccgaggctgcgacggagcaccaggcctcagaccgcagaaaacacaaacccttcgcggttcgcctctgagaacgccaggaccctcactcgactactcacttccgaccccgggtctcccatgtctccgacggccgcgctgacagcaccactgctcctgctgtccctactgccgcagccgccaccactccccttcccgccctgcaccgcctcgcgctaccgggacccgcccctgcgtgagctgggaggccactggcggaaagagacgaaaaccgcttcaaaagaggggcagccctcactggtccgctatctccccggagcctctttctctcattcccgggcttccttccccgcgccgcagaggatgctgggatggtagttcctacccgccgcgcgaccgcgccgcgcgactgccccgcgcgtgggtgaagaatggaaaaagactctgagctacagcgaagtcgtctcccttcggtgttgctctactataataaaatagccgagttctttctctcactttttcacaaccaaatattcgtctatgtaatagatcaatgggaatgaaaaaaaattgtgtgtgatttgctcagaaattgccttaccaaaatcgtggctcacctttttattttaacatttattcacaaatgattttaaacatgaaatttatgaaagcaaattttaacagagaatattcttttaaagcttttatttgtttacctctatcagcctaggaccacctgttattgacaagtctgtagtcccagaaaatcacctttatcattttgaccctgatctacaatgcacaaaattatacaacaaaggagctatgaggtatctgattagccaactgatcttcagcaaagcaaacaaaaacataaagtggggaaaggacacccttttcaacaaatggtgctgggataattggtgacccacatgtagaagaattaaactggatcctcatctctcaccttatacaaaaatcaactcaagatgcatcaaagacttaaatctaagacccgaagtcataaaaattgctcaagataacaccggaaaaataccttctagacattggcttaggcaaagacttcgcgatgaagaacccaaaagcaaatgcaacagaaacaaagataaatagactgaacttaattaaactaaaaagcttctgcacagcaaaaaaaataatcagcagagtaaacagacaacccacaaagtgggagaaaaggagaacataggaacaaaggaaaacatagacttactaggattttaaggagttggtgaaatttaagtgaagcagtgttttgataggttcaaaaccgtctagtgctgtgtgtaaagggttcaacatcacatacggactgcatagcgagcccagggtcttgttaacttcaaaactacaaagttaacacacacagagtattgtgctcagaaaccccttcctccgtgtagccatgccctaagtgtgtggatttatttctgggtactgtattctgttccatttgtctgtgtgtctgtttttataccagtaccatgctgttttggttactatagctctgtagtagaatttgaagtcatgtaatgtgattcctccagttttgttctttttgctcaggttagcttttgctattattctcggtcttttgtggttccacataaattttagaattgtttattctgcttctgtgaagaatgtcattggtattttgatggggattggattcaatctgtagattgttttgggtagtatgggtagtatggacattttttaaaaataaaaatgtattttttatttcaataggtttttaggaagcaggtggtgtttggttacatgcataagttctttagtggtggtttctgagattttggtgcacccataacccaagcagtgtatcctgtacccgatgtctttaatccctcaccccctcccaccctttcccgagtccctgaagtcctatgtgtcattcttatgcctttgtgtcctcatagcttagcttccacttatcagtgagaacatacaacatttggttttccattcctgagttacatcacttagaataatagtctccagttccatccagattgctgtgaataccagtatttgctcctttttatggctgagtactattccattgtgtgtgtgtgtgtgtgtgtgtgtgtatgtatgtgtatatacaccattttctttatcctcttgttgattgatgggcatttaggctggttctatatttttgcaattacgaattatgctcctataaatatgcatgtgcaaggatcttttttgtataatgacttatttttctgtggttattcctcttcctagtagtcagattgctggatcaaatggtagatc

SEQ ID NO: 585371 - DNA, 4001 bp, Homo sapiens
tacagatgcacaaaaaactcatcaagatcatctgtcccaatcattcctgtttttataccagttaagaggaaaccaaaattatttttcctaaagacccatgaactcctcttcccaaatgtttctcgttacaaaaacagaaaccattgctctttgatttcaagttacgttgcttactccataacaacagtgaaggcagagtcagcatacaatctcccttggtatcatcaatatttagaaaggttccaaatgtcaggaacaaaatatacacacactattaattgggaaatatgtccagaaagtgacagggtaaagaacttatacacaaaacacgaaaaacaaacaacgatgttaacaaaacaatgtttagggaggaaattttaatttaaaaaacaagtgacttacaaagtcgccctaaacctacaaaaactaaaaaacacagaaacattagacagacactccattaaagaaaaattctacagcctgaataccaaactgcaactaactacggcattccaaaagacgagttggggacagaactgttttctgcctggcgagctgagataccactttacgcaaagcctttctaaaactccaacaattatggatgaaaatcaccccaaaatatatcataaaacactcccttctgctttagaaacccattctgtccaaagtgtgctcagaaatccttatgtccctgcacttgtctgaaaatgaagattcctaggcccccgcctggaaattctgattcggtaggtctgcagtggggcccaggaatctgcctgtttatacttactaaggcttgaaaactactgtctcaaagggaacaaactcagaaaaatagagcatgttcccagtgatgtaggattcttcattatgagcatcaactgtactatgccgtaacatgatgatctcagaggttagagaaatcttcaagctatttgccttcatgttagaagcaccataacgctaagattctgggctctcacaacccttcctgttttctacgtccttgctcatcattagcagctccttcctccgtgtcgcctttagaagttactcttgctccatttcaaaacagcgttttagacaccagcgtttttatcttaagtttaaatgaaaggcagggggcgagattaagtgtacagcacgttctttaggacgtgctctttgtgatggctacgggggtggctcagatagctcttttggtaaatttcccaatcctgcgccatgctccagtgtctagtatgtattagacactcatgaacattaaatgaccaggtgaggtaacattacataatggcccaccatagtcttttactctgggaaaaccccaatcatcattgctacttacactgacaaactgaatgtcgtcttcattttcatccgttgttgactcagatgcctcagggccagctggagggacagattctattatctataaaaacaagccaaaacatgcttatctgttcagccacattcgtgtaggaagagagcgtttccgaaaggaacaattaaagacagagagctcttgaggaaaacgaactgagcacaatttcacggaaacccgactaggaacggaactcgagctctggctcttgccacagagtgtgcggagctgcagggacccaacgctgaaaacgcgttagttaccagcctctcacaattccccttatctactccaggaggaacgcaagctcaacaccgaagggcaatcctgccttaaaacgtcgctcccactggcccagccgcggccacaacgaacgccagggcccgtgcggggggccgggcggccattgttgctgcgggttcctcgctcagacacgcaccaggccccagagctgggctcggcccaagacactgaagaggtatcgccccgaggctgcgacggagcaccaggcctcagaccgcagaaaacacaaacccttcgcggttcgcctctgagaacgccaggaccctcactcgactactcacttccgaccccgggtctcccatgtctccgacggccgcgctgacagcaccactgctcctgctgtccctactgccgcagccgccaccactccccttcccgccctgcaccgcctcgcgctaccgggacccgcccctgcgtgagctgggaggccactggcggaaagagacgaaaaccgcttcaaaagaggggcagccctcactggtccgctatctccccggagcctctttctctcattcccgggcttccttccccgcgccgcagaggatgctgggatggtagttcctacccgccgcgcgaccgcgccgcgcgactgccccgcgcgtgggtgaagaatggaaaaagactctgagctacagcgaagtcgtctcccttcggtgttgctctactataataaaatagccgagttctttctctcactttttcacaaccaaatattcgtctatgtaatagatcaatgggaatgaaaaaaaattgtgtgtgatttgctcagaaattgccttaccaaaatcgtggctcacctttttattttaacatttattcacaaatgattttaaacatgaaatttatgaaagcaaattttaacagagaatattcttttaaagcttttatttgtttacctctatcagcctaggaccacctgttattgacaagtctgtagtcccagaaaatcacctttatcattttgaccctgatctacaatgcacaaaattatacaacaaaggagctatgaggtatctgattagccaactgatcttcagcaaagcaaacaaaaacataaagtggggaaaggacacccttttcaacaaatggtgctgggataattggtgacccacatgtagaagaattaaactggatcctcatctctcaccttatacaaaaatcaactcaagatgcatcaaagacttaaatctaagacccgaagtcataaaaattgctcaagataacaccggaaaaataccttctagacattggcttaggcaaagacttcgcgatgaagaacccaaaagcaaatgcaacagaaacaaagataaatagactgaacttaattaaactaaaaagcttctgcacagcaaaaaaaataatcagcagagtaaacagacaacccacaaagtgggagaaaaggagaacataggaacaaaggaaaacatagacttactaggattttaaggagttggtgaaatttaagtgaagcagtgttttgataggttcaaaaccgtctagtgctgtgtgtaaagggttcaacatcacatacggactgcatagcgagcccagggtcttgttaacttcaaaactacaaagttaacacacacagagtattgtgctcagaaaccccttcctccgtgtagccatgccctaagtgtgtggatttatttctgggtactgtattctgttccatttgtctgtgtgtctgtttttataccagtaccatgctgttttggttactatagctctgtagtagaatttgaagtcatgtaatgtgattcctccagttttgttctttttgctcaggttagcttttgctattattctcggtcttttgtggttccacataaattttagaattgtttattctgcttctgtgaagaatgtcattggtattttgatggggattggattcaatctgtagattgttttgggtagtatgggtagtatggacattttttaaaaataaaaatgtattttttatttcaataggtttttaggaagcaggtggtgtttggttacatgcataagttctttagtggtggtttctgagattttggtgcacccataacccaagcagtgtatcctgtacccgatgtctttaatccctcaccccctcccaccctttcccgagtccctgaagtcctatgtgtcattcttatgcctttgtgtcctcatagcttagcttccacttatcagtgagaacatacaacatttggttttccattcctgagttacatcacttagaataatagtctccagttccatccagattgctgtgaataccagtatttgctcctttttatggctgagtactattccattgtgt

SEQ ID NO: 585372 - DNA, 4001 bp, Homo sapiens
gcaatatttctggatgcacatggagtccttcccctgaactatacatataaaacatacaggagataaacaatttaaatgtttctaaatctacacttttcttccacgccatcagaattagtcagtaaaggttgcttaaaaaatattacacgcccaagtacagaatgactttaacaataaaactttactcaatgcagtgtcagcaagaggtaaggattacaattgactttcagaggaaattcattggacatttaaagaaaaaaatgtttccaatcagtctacatttccagaataactgattctaattgccctgctctgctctaaatgcatggggtgcgccccctgcccaactcgtaacagtccaagaccacggaccactatgggcccaggtgcacagcaagcacctcgtacttcgagagaagcctgagcacagaatctaatcaaattagttcatgtcttcaaaggatttacaacaggaccggacaagtcagtgacgactcaccaaaagtctgaagtgatttctttcttcacccctccccaccgcccccaatcaaaatactctaagaaacaactgtggctcagagtccctgagatggtaagtgaccacacatgactcttgggaggactcatcctctcaactcccccaggatcataattatcaagtgataaggaggaggtttccgaaaagtgaattgagtggcgacccaggggtttggcaaaaggcgcctctaggcttgccctttgctccaagaaaaacatttaagaatctaaaggttggttttattaataaataggatggtgggcagagtaaaagacatatttctggctctatcacttaaccagctgtgtgatccagaaagtcactttcccctccgggcctatttccttatctgcaaaattaagcggttggctgaatttggtcagatcaccaggaagaaattccagaaaagtagtttttctgtgtaataatttgggggttgagtgggtgggtgcggagagcagcggccaaagacctggtgaacccctcttgcaaccttcccatccgacgaaggagacgtaggaaggcttgccgggccgggcgccgtggctcacgccggtaatcccaatactttgggaggccgaggtgggcggatcacctgaggtcaggagtttgaaaccagcctggccaacatggcgaagccccgtctctactaaaaatacaaaaattagccgggcttagtggcaggcgcctgtaatcccagctactcgggaggctgacgcaggagaatcgcttgaaccctgggggcagaggttgcagtgagccgagatcgcaccactgcactccagcctgggcaacagagcgagactccgtcaaaaaaaaaaaaaaaaaaagcttgctggagctgaaagacgtattcagaaaatctatttcctccaagattagaattgtgcccattttctagatgatgaaactgaggcccagtcagattaggtaacgcgcccaaggtcagtttgcaagtggcgaaggcaagactcgaacgccccggcctgggagtgttgcagccccggctctcaccagccccaggaaggaggcacacagcatcaaggtggtgaaccaccgcagcttgctcccggtcccaccgctctgccaggagaccaccaccacctccggctccggctcattctccgccggggcctccgcctgcaggagccgctgccccgcagccgggggcccggccccacggagctccacctctaactccagctcggcggctccggagaagtcgtcttgctgccgccgcgcttctcagcagaacttctggagctccgagaagagcactggccccgaccccaggcacgggtgtccctccgggcgccacctcccagcggaccgcccggaaccggggcagagaagaggaacttcggcacgccgcaggtgttcgtggcaaaagacgctcgctctccagcaagcaggcgcatgcgcgggtcacgtggcggaaatgtggcctctcgccaaccgctatcgtgcctcaagccggaagttgatatggttgcctaggagaccggacgtagctctctagcctaggcatcatacttagctgagctcacagaggctggcggacgtgcgccccatggcggagcgagctgaagttgcagcctgggaccagggaaatcaagaggtaaaaatgcggccaaaccattatgaggaaaaggggccaagaattacactgtagcgcctcgcgccggctccccggtctcctggggagcgaagggagcctgaagagctggtccttatacagctttctgaaatccctgagatctgtcaatgaatcgcgcatctttcactccacaagtatttgttgaacgtcattgtgtaagttatcacgtatattatctcaaccctcacaacactccaaattccacgttatccccgttgtacagatagaaagattaagtcatagaaaataattaacaatctgcccaagctcagtcatcgaattagtggccgtatataaacagtgtaacagtagctcaagaaagaaatcgggatccaaagctgtggtttcaaacacaattcctgaaataattccaattcctgaaataattccatcgttgtaaagaagtggagcgtggcatcgatttgaggaattttttttatatactttaagttttagggtacatgtgcacaacgtgcaggttagttacatatgtatacatgtgccatgttggtgtgctgcacccattaactcgtcatttaacattaggtatatctcctaatgctatccctcccccctgatttgaggaattgttttccttttgctctttaacaaagcgtaccacagcctcaaaatgttatatacttttctttgtggtctatttgaaatgttcttttccacctgattcttccaactttcatccacttaggctcccagactacaaaccttagtctcatcatcccttgcaacccgtctctccagacttattcgtttagtcattaagtcttccccccacccgcacccccacttttttttttgtttgtttgttttcttttttgagacagagcctatgtcgcccgggctggagtgttgtggcgctttttggtagagacgagttttcaccatgtcggccaggctggtctcgaactcctgacctcaagtgattcgcctgcctttggccttccaaagtgctgagattacaggtatgagccaccatgccccgccaagcatttcttttttatttatttatttatttatttatttatttatttatttatttatttgagacggaatctcgctctgtcgcccaggctggagtgcaatggtgcgatctcggctcactgcaacctctgcctcctaggttcaagcgattctcctgcgtcagcctcctgagtagccgggattacaggcgcgtgccaccacgcacggctaatttttttatttagtagagacggggtttcaccatgttggtcaggctggtctcgaactcctgacctcatgatccgaccgcctcggcctcccaaagtgctgggattacaggcgtgggccaccgcgcccggcccgccaagcatttattttagagcaggtcagctggcattccttcatatgagaatgtctttatttcactttgattcctgaaaatattttcactgaaaatagagttctgggctaaccgttatttcctttcagcacagaaagatgagatttctattcgagttttagctacccatgccacccaacagttcccagctggggtctctcctcaggacaaaccacaagaaaagaagaaaaaagccaggaaattcatccccttgcaggtttctaagttttgactccctacctcaattctttatttacttttcagaggcggcaggtagttgccatttgtattttgtcatgagtctttcagtcgtaatcagtgagagaggggctgaagtagactaatgacgccaaaccaggacttttctacctatctttggagaatccatgttaaaacaaacaaacaaacaaacaaacaaacaaaaccta

SEQ ID NO: 585373 - DNA, 4001 bp, Homo sapiens
gcagtttgcgggggggtggggggaggggacattcgttggtgatatgggcatctaatttaatctgtaaatatttaatgtactcaatgagtttacttactatcaccatgaaatatgctatactatctacactgctataaatgcatctaaaaatacatccattactagacaacattcagtacaatgtacaataaacactacattcagtgttaaacacaacattttacatatagcttagctatttaatatcaccaccagaatctgctaaaggtagcagaatgtttgcaaactggataaaaactgctatgctcaacacgaaaagcaaagaatccccaatcttatcgcctcatgatttctttccccaaatttggcaaaactgagcttgaacaccacacattatagaatggaggcattgcttctctaagcaataatgtcacaaaccctgcttcagagtctctcttcagtgaaaatctctgaagaaggaaattcactaaattgtattccatcgatcaacaggtgattcgtggaaacacaaactcatattcatttccaatgaaaattaatattgtaaactctcccgttttttcacatatatatatttacaagctactgcattattatattgaatgaattccaaccgatttcttctcagaggcttactagaaaaatgccaaatattcaaattattttggggcgttaacccatactgttgcatggaacagaacggaattaataaggatccaacagttaccacttttcaaatgcaaatatgttgccatctagtaaatacagcccctttttaaacatccctcagtgtctatacagttcagggccctacttttgtttctttgaaaatcaaaattcgcgcattacattgaggcattatctcaactcagcaacaacaactaaaatagatactaactagtccagcctgagtctacatcgtacaagacttttgctttattttttcctcccattttagacacactgtccctaaacaattctgccaaaggaaacaaaccctgcagtgatgaaaagaatcacggacactgggttccacgaacaataaggtcgtgggctggtcacctgcccgcctcgggcctcagttttcctgtctgtaaaatgtggccgctggacgaatcacctatggggtcccatccggccctctccctcccgggtgcctcgcagcccgcccgggctcagctgactggtgctgtggccagggtgccctgcctgccgccgctctagatggaggagaaggggggcgagggaggagaggaacttggacttgcaacagcttcaaacaggagccggcgacaaacttgaagccgtcctcctaacaataggaaagagcactcccattttcctggctcaaacttgcgggaccccgcgaggctggatcctcccagccgccctctcggaacccgctttacctttctccctgtttggtgttagaaggaggagggtgcaggaccgtttgattcccttccatctccaccacgcacttggtgttcagttccagttctgaaagcagagagaaagggacgttgcaaagtccagcatccgcgcctccagcccgcccgcccgccagccgcgccgagcggggctccgtccctggaggcggccgagcctggagacggcgccccgggcaccacggccagcgcggacgccgcctccgccccggccccccggccccggccgcgctctcgccgtcccggccccgcagtttctaaagttgcccccgccctcagcccgagcagaaataaaaaagagcggaaagctcctcacctcgtcggttcatgggccggacccggacggcaacttttaccttggtatccgacatgttggctgcgctcgcccggccgctcgccgcgcccgctcggccttaggcggcccctcacgcgcggcgccgccgccgctgcagccgcgcgcccctcgagcgcggccgccgccgctccgccgtgagctccgagaggcagcgccgaggcgcgcgggccatcccgggggagcgcgacgcggggcacggccgcggcccggggaggggcgggcgcgcggggcggggcgcggcggcggcggcggcggcggcgggcggggaggaggcctcgccggcgggcccaggcgcagctctagccgcgccgccccagccgagaccgcagcgccgcggcccctcgcggctgcccggggccccgcgccgccatgttccgcgcccgtcacccgccggggctcgggagaggccggacacggccacgcgcggcgccccctggagcggcgggacggcagtgagaggagcggcgagcagcgcggcgcttaggggaggctggagtccggggcgggacgcattgtttccccaggggacctcccaggccaagcctgcaccggcgcccgcggggcccccccccggacaccgccgtgagctcgagccgccttctggggccgctgccacccggagccccgggacggcagcaaggaccacggctcgccgcgctgggtgcgcaggccttcccctccgagtcccggcacgccgccccctctgtcccacacggagcctgcagcggtattttaagatctctgtggtgaaccgagactagaaatgaatctgtgaatccaccaccgaaacagtgtatgtttgtaaatagtgctctcccttcctttcccggcctctcttgtctcgggagggatgtcaagtgggctgggagggccattaactcttacataagaatttaatagcaatggattctgtcatcctgccaaatgcagacctcgctgccagggcggaactgggcgaatccgatttattctgtttggttcaacaagtgcttaaggggcgctcaccgagtgccaggcattttgaagcgtacagaagtcaaaaatccagagtttagatccaggaatctttcgattttgcttaaatctagaaatccacttattggaagatgcattgaggttttactgtgtgcagggtgctgttgaggacacacagaaacatgaatagcatgatgcagaggcacacgctaaggtggaagagagggcgtggagacttattatgctagacagtgtacggcaggtgctaggagaggggtccgtccgcctccaaccgaggtgatgctacgcttgaccctcgaacaacacgggtttgaactgcacgagtccacttacacgtggctttttttcaaccaaaatctgattgaaaatacagtattcgtgctctggcacagtgccttacgcctgtaatcccaacactttgggaggccgaggcgggaggatcacttgaggccaggagttcgagaccagcctgggcaatgtaaagaaaccccatcttgccaaacataaaaatttaaaaaatagccgggcatggtggcaggtgcctgtagtcttagttactggagaggctgaggtgggaggatcacttgagcctggaaggttgaggctgcagtgagccatgttcgcaccactgcactccagcctaggcaacaaagcaagaccctgtctcaaaaaaaaaaagggagaaaaaagaaaagacagtatttggcaggttcaaaactgagagatccaacttttcctatttgtgggttctgcagagctgactgtgggacttgagtatgcatggttttggatgttcctggaaccagtcccctgtgtacactgaaggacaaatacttcagccccaccttattgtagagccagctatctcagtctacctctgaagggcctgttgcatctttcctcctctccattcctgctgctgcaatctcactttacctgtccattcacttgttcaacaaatgtgttctgagcgccctactatgttacaaacactgttgtaggctttaggctacaggctctcagctgctgctcagaaagaggtgaaatttccagccctctgaggctaagaatctaggtctgtgcttacctcttcacttttgggctgctgagacatcctgttaaccctcctagctttgcctcctctaatcactcctaaatccagcttccagactgatttttca

SEQ ID NO: 585374 - DNA, 4001 bp, Homo sapiens
cgtgagccaccgcgccccacctccggccgacttcttcaaatgttctctgagcgcccactcccgtcaccttttgggactgcaactcccgctgtatttggcttcttggaagccaatacatcatggtcccatggcgccatgatgctctgttcacttcctttttaattgtggtaaaaaaatacatataacaaaattgacattttcaccatttcaagtgtgccgtccaggggcctcaagctcattcgcactgtggggcttgcgtcagcccagccgtccccggagcccactctgtccactcgctatggagtctccctggtttcacgttggtcatttctgttgctgcggcctcaagctcacccgtctttctcctgcatcccaaccagtacgttcgcgtctcctctatggcatttttttcatctccagatgttttatttgggtctttttataatttttcatatctccactcaacgtgtttacattttcctctacttccttgaacacacagatttataacaactgttttcaccttctttactaattctatcatttgtgttatttctcgctctatttccgttgcctgagttttctcatcagaggtcatattttcctacttccttgaatcatgtctggtaatttttgatgtcagactttgctaattactcctaactgggtgcgccatgttttgaccctccaatcccagtaatttttcttcggctttattatgggatgccagcagttacttggaaacaacttgacccctcgaggcttgcatttaagttctgccgcatggcaccagcagcctttactccagggctaacttctcactctacccaaggccttgtgtatcacgaggtatttctgccccggcgggagcactcacaattcccaggcctgtgtgagctctgcagactttctcccgggctcctccccggtggttctttcctggcctcctccttcttaccgctcctgtgctggtcagtgctcagcggaggcttgaggggaaccctctgcccttctccagatgtgaccctatcgagcgacacaggctgctgccggggagaggaagaggcctcaggcactgacgtccttccgaggagcaggaggacagagcctgggagcaggaccactcagccagcccttggtagctgaaggaggatgagcagggctttccaaaggccacgcgcattgattctgagccttccggggctctcctaccaccctgggaatacaccacgacccagtgccgaggaaggcatctgacagaaagccctattgttagttgctatcatcacaacgaaattactatcaacaaactggatatataaaaaatgtctatttacttaaaacaatgaacatatggattacagatgtccctcgtcttatgatggggttgtgacctgagaaacccattgtaggttgaaaatattgcaagttgaaaatgcatttgatacacctaatttaccaagcattgtagctcagcctagcttgccttaagtgtgcccagaacacacacattagcctacaggtgggcaaaatcaccaaatggaaagcttgtacactaaagtgttgactgtttcacgtagtttactgagtactgtactgaaagcaaaaaccagaagggttgtaatgggcactcgagacatagtgtctactgaatgtgtatctctttcacaccttcctaaagttgaaaaatctacctcagggaccgtctgtatttataatcacaattagtcaaatgataggataaattacatatttcattactcaaaccccaatgcaaaatttgtatttttaatatggaagtttgctttataggacatcttgaaaagcacttacctttcaaaatgatatgtcttatcaatcagagggtggccaggacgatcacatttcaccagaattgtttcctgagagaaaagagtaaaacgacgtcataagactttgtgtgctgcgttaattaaacacaagccccaccaaccccagcctgccgcctgtttttgtaaacaacaaagtttgcctggaacacagccccgtcctttgtttacagactgtgtatggctgcttcttcctcaagggcaaagctggatgattgagttggagaccacgtggccttcaacgacgaaaatattaactccctggccctttcccaaaaaggtttgccgacccccataaagagaagaagaaagtcgcatctactggggaacacacaacagagctcctcaatctgccacaggctgagggttcaacacccaaattactgactctaagggcccttgacagttcgcaggagaggttttcaaatggcaaaaaaatcacatctcagacatcattatattccatcgtaaccagtggaactaacatgtctgtttcaaaaacaaatttcgatcttgctggactgtattcttaaattatatcctgtgtaagggaagcaaaggcatttttcagcaagaaatctgaaattagtttagtttcacttaagcaaagaaaagatgaacctggattggttccagttctaaaacaaaatgtgtattcatgaaatagcaggggtgatagggagaatgaaaaccacaactgcagtggcgaataacccagaggcactggattttttccataacagtgtttagcggatgctaggatgatacctccacaccttcttcttagtagtgtgtgtgtctgtgtgtgtgtgtctgcaataacatgtcaaagaagtggcctattttataaagacaaaagctgtgagattcaacagctgtttgtggttgttgttgctgtttgttactcgcttactgctggacgggcagtcgtgggcagctgccggactattgctgcctctggattctgtgaggtctccgatgtgaaatgctgagataatcaaatagtgaacctgtcctgtcttgccagaggtgagaggccgtgggaatccccggcgtgtctctcagtggggcagctcaggaagcaatgacggaacgccagcctcagccccgcgctgcctggggacagagcctcggctgtgcctcgtaggcagccttgggttgctccctgccccatgcccactgctattgtccagtgtaatgaaacagcgccctggctatcccctaactggcctctgcctccagtccagcacccctcccacctgtcctttatgttgttgctgtagaaatctttctcaaatgcaaattagaaaagaagaaagcagatgaagtcaccgaagccaaagaaagaaagttaagagggagggagtgggtgacgcagaatgccacctgttggggagaggtcgcttgggtccttgtttaaaactctttattggatttggtagactgggaggtcacttgctaccgtgatttgtatccaatttcctgggatgacttttgggagagtgggtggggatgcaggccccaccacagtgactctggcaatgccgggaggagcagccggtggctggggcggtccgtggtctccatcgcagcacagaaacgaccaccaggatgtggaggttgcgcgtgctcgtgctccggcacggctttcacagaagaagcttatgtctctgctgagtatttactgggcagtcactgtgtaccagaaactgtttcggaacctgcatgttcttacatgataatgtcacatcccctaagccagaagcagctcttcagttcccttcacgctcaaaacaccgaagcaaaactccgacacccgccaggaccaagcccctggcctcgccataagaacagacctcccagtccctaatccaaccgccagcctaggccctttgctcctttctcgcggcatattttcatttttctgctgtccacttcggggaccgttcctttgatgctatgccagaatgtaatcctagtgctccagtatgaaccgtacaggaacacacaccccagagtgttttactgctgtcttcaaatgtccaagctttaaccataaagaaaagcaaacgaaaaccacaaaggtctacagtgtctaacccgaaagctcaagggacaccatacaagaaacgt

SEQ ID NO: 585375 - DNA, 4001 bp, Homo sapiens
gaaaaggggatagctttgaaatcaaaaatccttaattaaaattacagctctgctgttcacaatagcaaagacatagaaccaatctaaatgcccatcagtgatagactggttaaagaaaatgtggtacatatatatacaccatggaatactatgcagccataaaaaaggatgagttcatgtcgtttgcagggacatggatgaagctggaaaccatcattctcagcaaactaaaacaagaacagaaagccaaacaccacatgttctcactcataagtgggagctgaacaatgagaacgcatgcacacagggaggggaacatcacaccctggggcctgtcgtggggtgggaggctacgggagggatagcattaggagaaatacctaatgtagatgacagattggtgggtgcagcaaaccaccacggcacgtgtatacctacgtgagaaacctgtacgttctgcacatgcaccccaggacttaaagtataataacgaataaaataaatgttctaaaattgaaaaaaaaaattacagctatgccactccccagctgggtgccttggtcacattatttaacctgagactcagtttcctaatctgtaaaatgcggaaaatgacaccaaccttgcagggttcttgtgagaatgagagataatgcagataaagcacctgtcaggtggccatttctcaagatacataagaatgactatgctcccttctaggcagaagagaggatgttttgaaatatttaagaagcataaaaagtgctgggcgcggtggctcacgcctgtaatcccagcactttgggaggccgaggcgggcggatcacaagatcaggaggagatcgagaccatcctagctaacagggtgaaacccggtctcttctaaaaccacaaaaaattaaccgggcgtggtggcgggcacctgtagtcccagctacttgagaggttgaggcaggagaatggcgtgaatccaagaggcagagcttgcagtgagccgagatcgcgccactgcacttcagtctgggtggcagagcgagactccgtctcaaaaaaaaaaaaaaaaaaaaaaggtgcatacaaagtatcattgctcagagtcagggcaatgtcttaaccttctttatacctttctgaatttagcacactagaggaagcacctggtaaatatttagttaattgtttctgaatgaagtacacatgcgtattctttgggtcaggatgcttaagcatctacctatatctattaatacaaggagtatatgtaaaggttcacgtttatgttggagaataacaacagtcaactaattactgaggccccactgggtgcaaagtactacatatgtgtatgctttgtgcatttgtgtctatctatatttgtattatttcagaggtacataaacacgcatctcttgcttgcacgttttgcccgagtgccaaaatgtacctttgagtgtatctgcatgtgcggtgctgcgtgagtttcccagaaaggtgcaataagtgcttatgtgtagttgaagcgcacactatacaggcatactgaacatgcactagtctgcccccgcgtgaacacgtgtgcctgggtgcaaaaaaaatggctctctgccgggtctgcgctgtgccaggtaggagtggcctggctgtcggtcgcgtagctgacagcagtgcgcgggggtcttcgcggctgcagggctcctcggtcagtgtgtgcgggattccgggcggcctcggcgcccaccagcaagcccctcacctccgcccagccccttcgcgtgccgccgcccgaccccagcccaagaggccccgccgcgccggcgccccggaggctccagcccgtaccccttgttggtgcttccggacagggggcttcaccctcgcgaatatctggatagtctgcttcaccatctcctccctggctctgcaatgacccttgacctctctcaggcccgggctgccaaaactaactcccaccacctccggcgacccacagtcttagcaacagtagctagggacactacccagtgagcaccttggcagccaggatcccgcctcctccctctaattggtcgcgaccggaaggaggccactacggggcggggctagggaggggagggcgggggtggagaggagagcgctgcgcatgcgcatgagcgagtgtctgggctctgggtttagcgccggacccggcctggaccgtgtggttaaaggggaacaaccaccatgccttgccccgccccgctcattcacccattttattctccatgcccttgcctttaaaaaaaaatacagcactgggccgggcgtggtggctcatgcttgtaatcccagcagtttttgggaagccgaggtggtaggatcgcttagagcccaggaatttgagaccagcctgggcagcatagtgagactccgtctctacaaaaaatacaaaagttagccaagcgtggtggcgcgcctgtatcccagctactcgggaggttgaggcaggaggatcgcttgagcccgggaggtcgaagctgtagtgagccaagattgcagaactgctccagcccacttggagatcacagtctgaagaaggagacagattttttttttccttcacaaggtctctcaagtgacaaggagacagattttcaacaggaaatcaaaaccaaggaatacaaactatgccatgatggaattagaagtggggctagctctgttttggaaaaggataaaactggatgaaggggactgtttcccacacaatggtcacggcaagaaaggatgagctcttcaaacactgttagcacatgaaaagatagtcaacattattatccacgtgggaaatataagttaaaaccacaatgaggcatcactattcatctatcagaatggcttaaaaaaaaaaaaaaaaaaaaaaagtggcaacaccagatgctagcaaagatgtggagaaactgaatcagttgcactttactggtaggaatgtataatgtaaaacatacactgtataaaggtacagccactctggaaaatagtttgacagtttcttacaaaactaaaggtgcaactactctaagacacagcaattgcactcttgggcatttatctcagatgaatgaaaacgtgtgttcacacaaaaacctgcgcatgtgtgtttatagttttagcacctttatttgtaatagccccaaactggaaaaaaaacccagatgttcttcagctgatagtttaaaataactggaataccattcagcaattaagaaggaaggaagtgttgatacacgtaacaaattggttgaattttcggggaattatgtttcatgaaagaagccagactcgaaagctaactaccgtatggttctattactattgccagggaggtgtgcagggtatggttataaaagaaatccttgtgatgggctgttctgtatcttgactgtgatggtgatcacagaaatctacacatgtgatagcattgcatagaacaaattacacacatgttcaaataagcacatgtaaaactggcaaaagtcacataaaattgaataagattgatggattgtatcaatgtcaattccctgatttttatattgtactatagttatgcaaaacattaccactggggaaaactgggagatgggtatacgagttctctctgtattattttttacaaaacaaaaagtttattaaagacacccttttttctttctttcttttttgagacaaggtcttgctctgtaccccaggctggagtgcagtggcatgaacacggctcactgcagcctcaacctcctgggctcaagcgattctcctgcctcagccccacaagtagctgggcttatagacatgtgccatcacactcagctaatttttgtattttttgcagagacaggatttcatcatcttgcccaggctggtcttgaactcctgaggtcaagcaatccacccacctcagcctcccaaagtgcagggattacagccatgaaccactgcacccagctgaaagacacttaagaaaa

SEQ ID NO: 585376 - DNA, 4001 bp, Homo sapiens
ccaatgtcagccccatcttgatttgtttttccattcttgctcccttccagggctaacctccactgagcttttattccctaccttcctgtcttccaggagccttgctgtgtcagcttttcctgttgtttctctacctttctcttaccattagcttattctgtggcctataatattagccaattctttcccatcctgaaaccaacttcccttttacttaagctacctctctttgttctttctaaaaatgtttttaggccaggcgcagtggctcatgcctgtaatcccagcactttgggaggccaaggtgggcggaacacgaggtcagcagatgagaccatcgtggctaacacagtgaaaccccgtctctactaaaaatacaaaaaattagccaggtgtggtggcgggtgcctgtagtcccagctacttgggaggctgaggcaggagaatcgcttgaacccgggaggtggaggttgcagtgagccaagatcacaccactgcactccaggctgggcaacagagtgagactctgtctcaaaaaaaaaaaatgattttcatctatcaccaactttttgaaggcaatgacatttcttctcactcgctcctccatgcccggcagtccagccaatggccttctagttgcaaaatctctgtacacttcccagttccctcctgcttatttctctgtcgcatctgacactactgacagtctgcttcttcttggagccggctctcctcttgacttggctatcaggacattattttctcctggttcgccccctcttctttatgcttcttctcagtctccattatggcctcctttctctctaccttcccttcaaactcctttcccttatggctcccctctttaggcctcagcactgccacatgttctcctgagagctcatctacttcttaggcttcctgagttgtcatatgattctcaaactcagatctcattttaattcaacaaatagttcttgaaaacttactgtgtgctaggatccacagtctcatgtgacatatgagagttcaccctttcttctgagctctagacccctacatctgatagagtttgtttgctacagtttgaggatatgcatatacctcacagactagctaaaagaaattatatacctctaagtaagcttcttttgaaggggtccagagcacagccccatctgacaacatgtcagcagataatcctgcctgctctaattttggcctggagaagacaccaaaggcttctgggtcacaagatgtgcacatattttctttgactaagacaggactgctctccagaacagctggagtgcctgcagttctaagaatataatttggtccatagactttttcccccctcctttgcaacagtaagacatggatagagtacaggctgatgagaatgaatgtatgatgtgagaattgtaaatcacgttgatactgtcagtaacagaccctgccctaaagttgcttaccccagtagtactgggatggtgaggctcacacatgaaggagaattgtaccaggctggacataattaaatgtgaaactgaataaacattatgcttttcttgtaatagttatgttgggcagattaggaaggacagagtaagcaaatctcttctaggctggcctggctgagcctcggaggaccagctgctctctgagacagccttacctctgtttcagaatctgtttgttgtcatcgatggtaacgctgtcagcgtggtccctcttgaagatttcaaaagcctcctggcatcctaatgacatttcctctctcattcctgtttggagacacagggaaatggcctcagtcacagcatcaggatcctattaatttcattgtcacttcagtcagaccacaaaaccagccctggctccaagaggcccacagcagagagactctgaccagacaggtggccccaggctcttccagctggctgacaacctgctgaggaggcccttccagtgccacccgctgcacccctcaggactgtgcctgcacagccatgtgactcgtggggggcggggtttggaatgcctgctcgggggaaatgaaaaccacagcgccaagccctggactgccgaggatgtctgcaaatgccttttcttaccatcgttcagtgccacatttctccctggtatgccctattttgtttttctgttaaatttccaggcatttagttaaaggaattataatccaaactgaaagatagcatctagaaaattctgctcttagtctctgtataacaattcattcttgtttcctgtggttagtgagggggtctcggctcttcttcaggagttaggtcctcagttacaagactcatgagctggccatggcaggggtccctaggtcatctctaacttcaatatcctgtatcgcctttgccaataaaggccaaccctcactgctgggcgctgttcagagttcaacttctgggacccacggtcagtacagccaggaccaggctctcctcctcaccacctcccggagtgagggtcagcgcagatgtatgcctgggacccctcagtgagagctgaattcaccgctggattttggatgcatctatagagccatttttttttttttaatgcttctgcccttggttcctttgcctgggaggccttttctcatgttttcctccagtaactctacctccgtggagctttcgtcaaagcccaggcagaacaaaccctcttttcaccatgttccttatcaatacacctataatatgcacagcccagtggacactgccacttcacatggcaatcctttctggtgaaatgtaagtttctcagggggtagagataatagttttttgtttgtttgttttgtgaatccttgtgtcttgttcaaagtctggcatttagaaggtgctcagcatacatctgttaaatgaatcaggttgagaatgaagctgggtggtgctgagccttgctgttattgctgcgggaacacagtccagggttagtgaggctcactctgaggccaagggttccgcagaggctttcatatgggccacataccacgtctcctcttgcctggaaaaaactctctgagtcccatcacccatcctaagggtgagtaactggactagcccatctgacaccaatttaatgattactcttgataaaaatagcaccgtgaagaatgtctaaatggtgaggcacaaaaatacaccccacccttttctgatcagaagcaaatgggcacgactcagctttgtctccacatctgccttgcacactctagaattgggtaggcctgggaatccgcttgtgtgagacgcagaaagatgatccctgatgcatgagagacattgaggggcacgtttcaccagcagagcccattaggagccagcggattcattccatacctttcccctgtccgggtctgcacccagttctaacagtgcatgccttttgctacataataaaataataacagacagtagagggcatgagactttggactggagatgggaagagaaaagctccacagagaccacactggagcctgcttgggggatctccaaattgctcccccccgcaggggagctgatgagcagccttccaccaacagaggtgtgggggtggtgggtgaaaggggtgtggggtgggagtgaaagcttgcttaagctgcagggaagaagggttcacagcctcttccctcccaggctctgctttttctgcagagctgactgtgaatggacagctgggtggaaaggaccactccagagcccacggcactgtggcggcagccactcctgggagaacttacaatgcactgagcaaccattgggactaactatattcccaacaacgaacaacacaaaagtaagtgacaatatgaaaacacgaaacaacatgaaacacaccttccctgaggtgcactggggcctgggccgtgggagcagaaaggacgtggagggcacagaggagacaagcgcaggcagtttgggatcgttgtgtacggtcttgaaggtcctactaag

SEQ ID NO: 585377 - DNA, 4001 bp, Homo sapiens
cccaggaagttaaggctccagtgagccatgatcatgccactgcactccagcctgggaacagagaaagagaacctgtctcaaaaaaaaaaaaaaaaaaaaaaaggcaatggtgctatggttacgaaaatctggtggacccaacaaatcttatctctctgcttaaaatcatccaatgattccccatctcactcagagtaaaagtcctcacaacgacccccacaaggacaaactgtgatcagcaaccccactacccattacctgacttcctttcccacaacttttccccttgctcacttcattccagccacacttccctccttacaactctttagggactctgctctagcagattccctctgcctgaaatgttcttccctcactatctgcttgtctgtctccctcacttccttcaagtctttattcaactcatcttttccatgggggttactgagaccaccctatttaatactctaacccgccagttggcctcccctatgtcctcaaccttgaatttctccttttctccacagcacttacggccttctggcagttatataattcatttattacatttattgtctgtatccccatagaatggcagctccacgatggcaacgatttgtcccttgttcactgctgcatcctaagtacctacaaccacgcctagcatgtagtaggtgctcaataaatacttgattaatagatctgagaaggcttttactacttcttactgtcacataatactactctgctctctggttgtcacgagagaaagaatctctcttaaggctgaatcctaacttcagggaaacctgaacgtgaaatactagtaaacaaaggattcaggcagacctttcctggcaccagagataagtacactccagctgtcacacacattcatctctcttcactggagacaggaagctgcatatggttgtggggtgcagcagggcaccatttaagagaaagaactaaatcaatcagtttcattgggcaggaatctgcacaatttgggaaaggagagagagaatgagaagtcttttggcccagattaccctactctccttctccctttcctacactccgaagcagcagtgataaggagaggcgattaacacaaaaggacctcagcaaggatgtggcctcagacaccatgtccccaaaaggaagaagtcatatcagaactctcccttcttacacactgcaatcacaccctgagtaggaataaagaagtggaaatgtgtcagacgagcctgagaattcgaaatgagaaatctcggagacatgaaagttaagggaggggctccagaaacttgaagctaggggagggcagacagacgtgccttccgacctccccgggtgctctaagccgtctccactcctgcctccgcccctttccacttgtgcgggggcgcacggaccttcgctctcccggtagacatgacaaaggccgaccgggagccgggggcgcgacagcatcggagcggtcagccttcgtccccatccccagggcaggacacctgcgccgcccctactcacctgcggatccatgtccacctcggtcccacacgcgccgggggaatgcagtggaagagaactgggtgccggggatcctgggactcgcgttctctcgcccgctcgcgaagcagggtagagaactcgcacggctccggccgctaccagccccgcgccacacccgccacttttgaattccaacggccaccacccactctcaccgcgctctgcacgcagggaccaatcgtcgctgtcgccacagccgagggccaatcgcagcgttctccgccacccgaagccacaccccgcccgacaggcgccttgtcttttctgtttcgcaggcgcaggagaggtaggcggattaattccacttccggtgccacttatgcttctcacccctcccctcctctagcggcaatagtgctggacttccgctcggctccccgccgtcgctcgctacgtcagaaaatgcgtggacgtcgccgcacgaacgcaactggccaagcgaaactggtggcggccggaggagaaggggcggggacgctggaggaaagaaatgacgcgtgcgcaaacgaggacccgtgccgggagacaggcgggactagcgcctcctggtgactgcagtagggagcgcacttgttttccgtcgacgtgattgaggctccagcgctgcctctcctggtcgtggttgactgggcccggaagtggctcctggagccctcacgtggatgtgagtggcctggtctgttcattccctggtaatgttgccatttctcaccaaatttaggaatttttgcgctccattgaagcctgacagtggggattcaaagctcaggaaagaacttttctttatagccctcttctctcagccagcctacttacctgggtgctgttactggtactgggctcagggcctttggagtctcgagctcggggaagatttactgcttccatttatggagtattttatgttttgcagattgtgcacctgtattatctcgtcttttaatcacgaaaattcactgagttcctacattgtgccacattctttgtagagatggatggagacaggttcagaaagattacacaataaggtcacactgctggttaggaatggatctagattccattagcttcaaaatccaagctatttctgttaactcacgttgcctctaacagtctcggtgacaagagcaaccccttacgtgtgaatagggtgctagtttgcaaagtcgttctaccatatttactcatccgagtttccatccaatcctggaggtagtcaggacagggttttatttatgaaaccgaaaggcaggggcctcaagcatatgttcggggatttggtgtgcagttggaaattggcaggtctgacacccgcgctgccgtcttctatccattgctttaacttggcttcaaacaagcttgtagagagaagcagattgtggggagacacactgtctgaaaaccatgttgccatccccccaacctttgatatcctgggaaaactccaaaaagcaagagcttgaagagaacacagtaaaaagaaaaggaagaaactagagaaaaccaacaatggaaggtaaagggggataactgagaagggagacctgagaagaaacatatagcaaaagatatttatcaaattaaaaaaaaatttaaatggaatggagaaatatagacccattagcagattaaagggggaaaatgtattcatctcaattgatgcagcaaagtcactcaaaatattcaacacccgttgatattttttttaaaactccagaagctgataaaggacatcttcaaaaatttcgcaaaacacatcaccataatggggaaatgttgaaagcgttcctttcaagatggggaacaaggcaaggatgcctgctctcaataatcctcatcaataaaacaatggaagttgtagccagtccaataagcaacaaatatataaggactacaagaaacattaatgttaatattcgcagatgaaattattgcatgtgcagcatccctaaaataaaattcagatagaattgataaataagtttagcaaggttgatggataaaaaatcagtaagaggaaaaaatcaattttcaaaatcaattgcatttccgtcttcagcaacactagttacaaagtgtaactgtaaaaattacactatttggtggccgggcgcgttggctcatacctgtaatcctagcactttgggaggccgaggcgggcggatcacgaggtcaggagatcgagaccatcctggctaacatggtgaaaaactctctgtactaaaaatacaaaaaaaattagccgggcgtggtggcgggcgcctgtagtcccagctactcaggaggctgaggcaggagaatggcgtgaacccggcaggcggagcttgcagtgagcggagatcgcgccactgcactacagcctggaagacagagcgagactccatctcaaaaaaaaaaaaaaaaaaaaaaaaccaaaaaag

SEQ ID NO: 585378 - DNA, 4001 bp, Homo sapiens
ccgaatcattatttatttatgtattgtctgtcttcccaagctagaaggtaacctccaagatggcaaagatttttacagttttgttcaatgatgtatctcttcagtgcccaaaagcattctggcacacagtagggacttaatacatatttaatgaatgaatgcaaacgtctagagtgaggtgatcccaagcagccccaaacctttaatcagataactgctcctccatccaccctggaccacttggcaccacctttgccctctcacctgggcctcactcagcccgagctcaatgttttccatagaacggcgaagctgccgggccttctcatgcaccagcccttcctcatggcctccctgctgcagacactcaatggtctgggacaggctttgcagcacggcctggtgttcactgcgtagggcctctagcccttggctgaccagccgtgtgctccccaggatctcctcttggctgagccggtggcctgcaggctcatcccgctgccccaacaccaggcctgacatcctggcctgggggaccttgcccggtctagggagaaacaacagagttcagctggtgtaaagatgagacagagaagctgagcaactttctcagagagtggtgggaatccaagtgaagggacaaaagtaagagtgaccctgtggcttagctggagagagagagtgaccagcaggcagggagcttagatcactaaactcaaagctaaggttgtgggcaaagcgagagggagatgaactgacttaaataaaggaagactatagtaggaacaaaggtgcttagaactagcagaaggatttaggacttaggaaaagaacaaaaaagcagttacagcctgagttaggaaaaggaatcaagggatgagagacagcactatggggatcacagaaggtctgtgggagagctgcaaatggcacagggttaaagtgggagatatgcagaaaataatgcaggggtctagaaaaaacggaaggaatctctgcaaagttaaatcagggaagaaagggaaaagaagaaaacaagagccttccttgcaggatccacattacagggtcccagaaagctcaaggtcttcaggctgcatcacctgcagaactaagcccagcatctccaaacctggtcagccctgcatattttcccactaaccttcaacccatacttcccaccccccaggactcagactgtgttcccacttcctcagaggggtcttgtttctcatctttgaagccttcttacctgtgtacagagcagaggccctggctgtggcactcaggccagagcacggaagaaactgttctgcagccagagagtcagaggatctgccctgcccaaagtccagaagtccagcgttcccaccccttctttcaccacttcacagctacccagaggacctggcccagagccccacccaggacaaacaccctccctccctccctctgcccacaggtcttcaaagacgcccaattcccgtctccttccccaagccagcctccctcattgcaggcctagggagctactgtctcccaggaagggaatgagagagagagacttaaccagagacctacagcaagaggcgtgtctgggaaaggggagggaggaacacctggtcactccaaacccagtcacttccatggttttgtctctgtcacggtcacctacaaacaggctctgagaggaatcaccgtagggtgcctccacaatgcccgatgatgcaggaaagaatgggaggtctgctgaacggctgccgggtcgcaaggaaccgcggcgctggagtgggtctcctgggcctggaaacgcagtagaggagtgcctcgggctgtcgacctgccctggtgcccagggttgggagagtgagatgggcgggggcggcaggggggaggtgtggatggacgactgaggtccgcagctccagcgaggacgtggaggcctaacgaccccgaggtcactgagtcagtcggtggcgcagggggcggggcaggtcgtctgtctatctgtctggacgccgaggggcggggaagaatcgcgaagggcggagttttggaggctggagttttgtaaggttggttggagggggtttgttcatctttctggtagtgcgagaataagagatggcagagaccttaaccttcagccccaggataccctcaaagactcacctgcaatctgccggtgtggctgccgctcttgccggtactgcccctttaaatccatgatggctgccgctcgaggcaattgttttgacgggtctgggggggcggggcctgtttcctagtcacgcgacattagagctgcccgcggattggctctcacggcgttcaggtaggaaaggaggtgtgtatccagcttgggctccagttttctgcccgcctccttttacgttattgcggagcgacggcgccggacagtcaacgtcatctaggagcaccgagcagcttggctaaaagtaagggtgtcgtgctgatggccctgtgcgcactgacccgcgctctgcgctctctgaacctggcgcccccgaccgtcgccgcccctgccccgagtctgttccccgccgcccaggtaatccatcttacccgggaagaaggctgcttccattcgggctgccggagatggggtctgcgggcatgcgaggcgggagttgcgagtctggtcaggagtcatgcaggtccgtgaccttggataaggcacacttagcctcagctttttcctctacaagtgttgctttctcatagggcgaaattcttcagacgagatacttaaggtgaaagtgctttgcagatcaccggttgtgcaggtttcagtaataacgtttcgagtgcctatgataagccaggtataggtaatagacgtttcaaataaatgaactcctttcaaatactctataaggcagttactattcccattttatagatgaggaaaataaggagtccaaggtcacacaccaactatcagagctaaacagtctgtctttcagagcctgtgctcttaaccattatgatatgatgcctgcaaggatgagttactgctgatattagagaatgcagggcaagataccaagaacagtggcctcaggggaaggtatcctgaggtcctagtgggtgactggtgagtcacacaaaagagaagtaagtcctgctcctctggagctttcaggctgcttatggtacagtttgggagatgcatgtttaaaattcaaatccaaatcaacctactccgaaatgctgggaatacatcaaggaacaagagtgaaatgacccctcccctccattcatatgtgaagaattcccagaaacaatgcagagggcaaaaggaattggcactgatggtggtacatggatgtgtggaagctaccagctctggagaagggaattgtttaggtaaaaacagattcctggagatggagagttctgagccaaatttggaaggagatcaccaaggagagaacattactgtgcaagctgtgaagggtggagtttttggatagctggtttgggatacatccaggaggaagtgggctacaagctaaaattgatctgtgccctctgccttggttctctgatgctttgccttcaattagctttcaaatgaaagagatgtctttttatccctagatgatgaacaatggcctcctccaacagccctctgccttgatgttgctcccctgccgcccagttcttacttctgtggcccttaatgccaactttgtgtcctggaagagtcgtaccaagtacaccattacaccagtgaagatgaggaagtctgggggccgagaccacacaggtgggaacaaggacagggggatttaagcagtcaaaaggaaaaacatgttaagaccctagacttgtatattgacacacttgtaccttgtaaggcagaggaatgtaattaaaaagcacttatttggctccttttgcatgtagtatgtgtacaggagtcagagagtagaatacaaagcaataggtaattggtctatgcttctaaagacaat

SEQ ID NO: 585379 - DNA, 4001 bp, Homo sapiens
cctgggcctcactcagcccgagctcaatgttttccatagaacggcgaagctgccgggccttctcatgcaccagcccttcctcatggcctccctgctgcagacactcaatggtctgggacaggctttgcagcacggcctggtgttcactgcgtagggcctctagcccttggctgaccagccgtgtgctccccaggatctcctcttggctgagccggtggcctgcaggctcatcccgctgccccaacaccaggcctgacatcctggcctgggggaccttgcccggtctagggagaaacaacagagttcagctggtgtaaagatgagacagagaagctgagcaactttctcagagagtggtgggaatccaagtgaagggacaaaagtaagagtgaccctgtggcttagctggagagagagagtgaccagcaggcagggagcttagatcactaaactcaaagctaaggttgtgggcaaagcgagagggagatgaactgacttaaataaaggaagactatagtaggaacaaaggtgcttagaactagcagaaggatttaggacttaggaaaagaacaaaaaagcagttacagcctgagttaggaaaaggaatcaagggatgagagacagcactatggggatcacagaaggtctgtgggagagctgcaaatggcacagggttaaagtgggagatatgcagaaaataatgcaggggtctagaaaaaacggaaggaatctctgcaaagttaaatcagggaagaaagggaaaagaagaaaacaagagccttccttgcaggatccacattacagggtcccagaaagctcaaggtcttcaggctgcatcacctgcagaactaagcccagcatctccaaacctggtcagccctgcatattttcccactaaccttcaacccatacttcccaccccccaggactcagactgtgttcccacttcctcagaggggtcttgtttctcatctttgaagccttcttacctgtgtacagagcagaggccctggctgtggcactcaggccagagcacggaagaaactgttctgcagccagagagtcagaggatctgccctgcccaaagtccagaagtccagcgttcccaccccttctttcaccacttcacagctacccagaggacctggcccagagccccacccaggacaaacaccctccctccctccctctgcccacaggtcttcaaagacgcccaattcccgtctccttccccaagccagcctccctcattgcaggcctagggagctactgtctcccaggaagggaatgagagagagagacttaaccagagacctacagcaagaggcgtgtctgggaaaggggagggaggaacacctggtcactccaaacccagtcacttccatggttttgtctctgtcacggtcacctacaaacaggctctgagaggaatcaccgtagggtgcctccacaatgcccgatgatgcaggaaagaatgggaggtctgctgaacggctgccgggtcgcaaggaaccgcggcgctggagtgggtctcctgggcctggaaacgcagtagaggagtgcctcgggctgtcgacctgccctggtgcccagggttgggagagtgagatgggcgggggcggcaggggggaggtgtggatggacgactgaggtccgcagctccagcgaggacgtggaggcctaacgaccccgaggtcactgagtcagtcggtggcgcagggggcggggcaggtcgtctgtctatctgtctggacgccgaggggcggggaagaatcgcgaagggcggagttttggaggctggagttttgtaaggttggttggagggggtttgttcatctttctggtagtgcgagaataagagatggcagagaccttaaccttcagccccaggataccctcaaagactcacctgcaatctgccggtgtggctgccgctcttgccggtactgcccctttaaatccatgatggctgccgctcgaggcaattgttttgacgggtctgggggggcggggcctgtttcctagtcacgcgacattagagctgcccgcggattggctctcacggcgttcaggtaggaaaggaggtgtgtatccagcttgggctccagttttctgcccgcctccttttacgttattgcggagcgacggcgccggacagtcaacgtcatctaggagcaccgagcagcttggctaaaagtaagggtgtcgtgctgatggccctgtgcgcactgacccgcgctctgcgctctctgaacctggcgcccccgaccgtcgccgcccctgccccgagtctgttccccgccgcccaggtaatccatcttacccgggaagaaggctgcttccattcgggctgccggagatggggtctgcgggcatgcgaggcgggagttgcgagtctggtcaggagtcatgcaggtccgtgaccttggataaggcacacttagcctcagctttttcctctacaagtgttgctttctcatagggcgaaattcttcagacgagatacttaaggtgaaagtgctttgcagatcaccggttgtgcaggtttcagtaataacgtttcgagtgcctatgataagccaggtataggtaatagacgtttcaaataaatgaactcctttcaaatactctataaggcagttactattcccattttatagatgaggaaaataaggagtccaaggtcacacaccaactatcagagctaaacagtctgtctttcagagcctgtgctcttaaccattatgatatgatgcctgcaaggatgagttactgctgatattagagaatgcagggcaagataccaagaacagtggcctcaggggaaggtatcctgaggtcctagtgggtgactggtgagtcacacaaaagagaagtaagtcctgctcctctggagctttcaggctgcttatggtacagtttgggagatgcatgtttaaaattcaaatccaaatcaacctactccgaaatgctgggaatacatcaaggaacaagagtgaaatgacccctcccctccattcatatgtgaagaattcccagaaacaatgcagagggcaaaaggaattggcactgatggtggtacatggatgtgtggaagctaccagctctggagaagggaattgtttaggtaaaaacagattcctggagatggagagttctgagccaaatttggaaggagatcaccaaggagagaacattactgtgcaagctgtgaagggtggagtttttggatagctggtttgggatacatccaggaggaagtgggctacaagctaaaattgatctgtgccctctgccttggttctctgatgctttgccttcaattagctttcaaatgaaagagatgtctttttatccctagatgatgaacaatggcctcctccaacagccctctgccttgatgttgctcccctgccgcccagttcttacttctgtggcccttaatgccaactttgtgtcctggaagagtcgtaccaagtacaccattacaccagtgaagatgaggaagtctgggggccgagaccacacaggtgggaacaaggacagggggatttaagcagtcaaaaggaaaaacatgttaagaccctagacttgtatattgacacacttgtaccttgtaaggcagaggaatgtaattaaaaagcacttatttggctccttttgcatgtagtatgtgtacaggagtcagagagtagaatacaaagcaataggtaattggtctatgcttctaaagacaatttgggtaattgaagaaaatgggccatacacaggaagtgccatgacattttccttcatacccttcaaaaatttataacaggctgggtaaggtggctcacgactgtaatcccagcattttgggaggccgaggcgggcagatcacctgacgtcacaagtttaagaccaggctggccaacatggcaaaacctcatctctactaaaactttaaaaattggtcaggcgcagtggctcacgcctgtaatcccaacactttgagaggccaa

SEQ ID NO: 585380 - DNA, 4001 bp, Homo sapiens
attagctgggcacggtggcgcgcacctgtagtcccagctactcaggaggctgaggcaggagaattgcttgcactcgggtggcggaggttggagtgagccgagatcacaccactgcactccagtctggcgacagagcgagactctgtctcaaaacaaaaaaaaaggggaagggaggcaaaaaatgcccttgggcaggacaagagaaagatccagcatgagaagtcatggtctttttttttttttttttttttagatgaagtctcgctcttgcccccaggctggagcgcaatggtgcaatctcagctcactgcaaactctgcctccctcccgggttcaagcgattctcctgcctcagcctcccaagtagctgggattacaggcgcctgccaccatgcccagctaatttttgtatttttagtagagatggggtctcactatgttggccaggctggtctcaaactcctgacctcaggtgatccaccgtcctcggtctcctgaagtgctgggattacaggcgtgagccaccatgcccagctggtcatggtctcttaaacacaacctgtcaacctagtggcacgtacacctgggtacatctgaggttttttcaggcaaatccttgcaactgacaatgcttttgctggcaagcatctcctgagtttgggtgtatcatcatctgctccctgtttaagaagccctggcagaggaaagggccaggcaaaacctcaggcactaaaacagctcaaataagggaggccccttgcaggaaagagacatggctttcagctggcttgctagtcccacccacccaacctcccccaactccacaccctaagctttaaatagccatgggacccatcctgaaatagccccagcaggaagctactctcacttcattactcccgctctccaaaatatcttgggtctgggcttgtggagactgttaggaggtcgatgggcttaagaatggaagtcttccatcctcccttatattctctattcttcccttcagatatgtcaaggtaaagtaaaatatgcacaggagaggagataagcaattccagccaaaggtggagaaaaaaaattttagtttctctgccatataaacaactcaaattcaaggagaacaagcccccaggcgctcaggggctcctcttatccctgggtctccccagtcctccatcaccaccaagcattttcaaacttcttctattcccttaatgtatctacccgcctggtctcttgcattttttattccccatttctcgcccttcttgatctcgtgagagctttgcagttttctcatttttccttctcctaccattccaagctccacccaacagccctccattttcccacctccactaaggaaagaaaaattagcatgcactgaccacgatacccctctctgcatatgactctatccctgtcttcttccagacattccggcctcccctagcccaccacgccagacacccctccccttccattatgctcagcttccctgttttcatggcccagtcttccttcccatttccttcattgcttcctccagacaccaggtctctcctacccatctcctcgccatcctcccctagccctgctttccccattaacactctcctttcccatcatccccctagctccctccccacccccacctcatcactctcaggcccctcccccgccactccagctccagacagcacgtcctaagccccctaattctcccttgcccttctacccatcccaggctacctgccaggccgagccggggcggggccgcgggtcctcgagctgcctgcagcctagaacccgttgcgcgccaaccgacgccttagtccccaacgagataaacacagccaagctcggttcttccggcgggcagctgtgcgcgcacgtgcagtcgtagctaagtgccggaggcatttcgggacttgtagtccatacgtttcctgagggacgagagggctgaggagtgggcaggggcgtaggagagattctgcgcatgtgcaaatatgtgtcgagaccgaggaggccactgggtaatgcagtcctttgttttttgggctgggaatgacggaggcggggcaaggggcggactcctcgtcctcgccagcgtcaatcatggatatggggcggggctggaggactaggcacctctgcacgtcctgccccgccggaagtggaggccgcgggctctgagcgggtgaggcgcgcgggaacaccggcgccgggattcggatgggggcgggtgggggacgctgcagctggggccatttgaggggagcccatggggcctgaaaggcatctgtcaggcggtacagagggggtcctctaggagaggggagaagggggcgggtacgccgacctgtttaggggagtctgatgacccagagttcccaagtcgcgggggaggcgtggcgcggggagccggggttctggaaggggtgtcttttaggaggtggcagggcctccggttgggcgtttaactaggaagtggcggagcaagttggtggggcctggttcaagataagaaccccgacttaggagggggaggaacgagaggctggaattggggcggaggggtggaggatgcaggagcctcggggaggagctggttttttgcacgcaggagactacaaggagatgatgagaggatgaagatgggcctggtttcatccgatccctgtcctaccgcctccctgttcttgcagcccctgcccggatggcaacagtagttctaggaggagacaccatgggccctgagcgtatcttccccaatcagactgaggaactgggacatcagggcccttcagaaggcactggggattggagcagtgaggagcctgaggaagagcaggaggaaacggggtcgggcccagctggctactcctaccagcccctgaaccaagatcctgaacaagaggaggtggaactggcaccagtgggggatggagatgtagttgctgacatccaggatcgaatccaggtagggtggaggagggatggttcctgaacaggtgaagctgggctccctgaaagcctagacccaaacggtcttctgtggctctgcaggccctggggcttcatttgccagacccaccattagagagtgaagatgaagatgaggagggagctacagcgttgaacaaccacagctctattcccatggacccaggtaaaagatcattctttcattctggaataattactaaggaaatgaactggcatgagtcagtagaaggaagtttcagaggaagaccctatcctaaaaagatagtttgtaaactaagattttgtagacttcagagtccaagtgaaatgctcttttgctagctttggggatgggcaggcttgccttaaagtaacaaggtggatttggtgaccctagcagcccaagggctctgggttgattcggggattggggaggggagctggtcccattatttctatgcctgaatggcctctggctctgatttcagaacatgtagagctggtgaaaaggacaatggctggagtaagcctgcctgcgccaggggttcctgcctgggctcgggagatatcggatgcccagtgggaagatgtggtacagaaagccctccaagcccggcaggcatcccctgcctggaagtgaccacagtgagagctgccttatattcctacattccaggccagaaccagcacaggactgaacacatccctggttgtaatgtccatttccatcttccccgtctccctttccacatcaaggcacatcagacttctcagagacccactttattcagttctgtacatatggggacatcggtccaagcccaacccaccttagcatgtatcactctgtggagaataaagcaccctatgtacacagccaaaagccgcactgcctgcgcccctggaacctgggtccggccttcctcagcccctggcccctccaaggtacctataagggacaagagaaggcctgcccagcatagcacaaacaaggaaataaataggtg

SEQ ID NO: 585381 - DNA, 4001 bp, Homo sapiens
tttgtttgggttttgttgaaaactttagtaaactggctctttttctttcctagtattttgtgtgttggagggagaggaggttagaaattgagttttaagactgatgcctttttgattatcatagaactgaaaattgggtttcggtgttcattctgctctaaccacttgatagacctatagcagaacgtccaacctatcaggatttcagtataatcaactgtcaaacaaggagatgcattacttttgcttctataattttgcagacagttatgaatacacagctgacttttgctgtcagaattgtcaaaatctgttcctacattaaatctccctgtaatatggccttccatatctttagaatctactcattatcagatagggatgaacgaactgagacaaggtttctttacatgggatctatatgtctgggtctgaacagctagatttagcaaataaaaatacaagatgtcaagttgcatttgcatttcagataaactatgaatcatactttagtataagtatgtcccaggcagtgttgaggacatacttatgctaaaagttgatttgtagcttacctgaaattcaaatgtagctggatgacctgacttgtatctggcattcctgatcagggctgggtatcaggtgagtccatgagtcctgcggaatagtctgaaacatactgtgtgcatatgtttatgtgtactttccacacactgggctcagcgttttcatgagatccataacccgaaatagatccaaaatgactggactgagaataatgctgccaagcaatggtacataattggacccttgtctgtaagtgggcaagtccatgtgaaagtattgcacttaaattcttcctggccccagctgatcccagatgaagacccccagaactggttatagaaaagagttgttacttcatatttgagaacattttccttcccactgccctgcacccatgcttcctgggagtccacaacagggtaaactggaaagccatgtgtgctaaagtgtcactgtcactctcatgccagtatgaactgggatcccagaatgtctttttgccaaaggggcgaatcagctgcgcctgctccctgtcctggccacattcctatcgctgcatctgtcggggctcatcagccctacctccaggaatagaaaccctcctggcttctgtggcttgccattttaagtccaacctcggggtggggtgtaggggggtggtttccacttcaccattacacttccaacatgatttttaatataaaatatatgtcagcataatgatatgtgcacatttaagacaaaaacctattttttagccaaataacaaatttttttttttttttaggaaggatatttccatttcatcaataggttatatttctgggaattcagagttgtctgagttttgtgctacagatttagttaaaactggtaacatttcatccaaactgatcagtaacaaatgttaaaatgattcttgataaaaataaaggtagaattctaaactttgtgaacaaagcctaagaattttctctccttctccttctctataaagtagtgaaagaaaaatatatcttaagctttagagatttagaatttttgttagaaattacaggtggttttacatttgtagggcatcattgtcatgcattttgttaccgtgaagttctcctaacacgttacatttctcagatttcaaaaaaatgttttctgtctcccaacttcagattagggacatgaaccacctgacccagctgtagactcccttcagtaaaatagctctacaaccacaaacactcagcccaccctctcccacccacacatccacacacaccccaggatctagaaggcaggaattggcgactctggtcccagctccttaccctccttgggtgaagtggcaggtcaacttgagatgatgaagttttagcaggagactcctcttgggaagggatctgtggagatagagagagggagaaggaaaatccggtggggagccaccagcagccacctgacaagacccggctgcagcaatttttagagtgaccctttgccgtcccactggataaggcaggccgagcctgcgctttggcccgggagcagagcagcgagcgccctcctctccgtctttggccttcaactctccagccagccgggggcagggggcggggctccggttggtggagaggggttgggtttcttgaactgaccagctgctcaaaatgaaaaagaaaagaaaagaaaagaaaagaaagaaagaaggaaagaaagaaagaaagaaagaaagaaagaaagaaagaaagaaggaaggaaggaaggaaggaaggaaggaaggaaggaaggaaggaaagaaagaaagagaaagaaagaaagaaagaaagaaagtcaagagctcaatcaacctgtgtgagaggaaagaaaattaattcgatggatgtttaattgttggaagcagggattctagtagagtaaggagaagggaaggctgtggattaaaaattagtttttggaaaggtaattagcctggtcacctacggtcttttgagaagatagtggttataaatagcctattctttataagaggagcacgtatctaccagatatggtactttctacagcacctcacatgtggttctaacattattaggctcattttagagtttaataaagtgaggtttatggccagcgattttccagtgatcacagagaggtctgagattaacacacactctagcacacatgcaggttgggaaatatctactttggcaacacttcatgagaaaaaaaattcaatgattataattgactacaaattttaatgggcaccaagagtgtgaaatggttgcttaaaaagttaacatgatattaagctacaataatagaaaaatagatcatggaaaataaatgttctaattattcttcattagtcagatgatgtgttaagcatcactttgctatcttggcactctgagaacttactcttcatcctacagagatggctggaacaaaaaaacttcagaggcggtgcatgttggaaacatctgaagagaagtatgacaaagagaggacttttaagataagtgagacacctgagagcaagtgttgtgggggctgttgtacagcaagaggattcagtcaaaatttctgtagcctaaaatgtcaaaaattttaatgtgcagtaattccggggaaataccttaaaataaagaagaagagtgcagataacagctgggctctaatgatgaaaatggcagccttgtaaaagagccagttctctataattagaagggtggaagtaaaagaagttgcaggactggtgtgacattgaagggactctgtctatggctgggggcttgcactgcatcatctctgaaatctttccaactctaaggctctgattctatatgtgccagtctccagttcacctgagactctcaattcactggatagcatctgtctattgactacttctgctggaattcccaccaattttttagtaggaaaaactatttggattttttttttaattctttgcttctacccatagatctccagcacagaaagcgccaggagcaaatcaaagaagcttctattatggtttgcttctaagaaattctacttggtcccacctccttgactcaggtaaagggtcagaaccttccatctttgtttgtttgtttgtttgttttttgtagagacaggatctcagtatgttgtccaagctggtctcaaattcctggtctcaagtgatctttctgccttggccttcaatcccgttttaattgtaataaaagtcagccttatatcagtatttatgataatgatgatataatgatggaaagggccttcaagaagatgttggtaccaatattatcttcttcaagggttcaagactattaattccagttttactggaacatcactgagatgctcctttcaatataatataatgttaagatatgaacacaagtggaagaataaaaggcaaaaaa

SEQ ID NO: 585382 - DNA, 4001 bp, Homo sapiens
ccctgcacacatctgaaacgcacacacaacttttttttaaaggcaaggagactggatccagaaagggcttccccattcactagctgtgaccttcagcaaggtttgagtcttgggttcctcagctttaaatggaaggtaatttattggcctcaaagggttgttgtgaggattaaaaaagaagtatatgaaaagtgctttctacactgtaatgtaaaatgtttgtcatcattcatctcccaaagctctgtgaattgcataaatcccctctatctacctctgtcattatttggcttacttgctcctcacattatttattacactctctatgacagagtttaaaatctaaattagaagaatttgacttatttccttgggtcatttaacaagaagtagaaaagatgaacaaatatccaaggaaaacaaaattaattcttgaatgccagtggatctttactgggccatttgtttgtgatggaggcatgaaattcgtgcaaagtgtaattactggattgctgatgccttcaagtactgtgttacaagttcacccaatagacacccgagacctcaaaataaaacaaaactgacagcccaggtattaggctgacctgttccattggcctatcagtgttccagtagaggacccagtcccatcagaaaaaaaacaaaaagcaaaaaccactgcactttcatataagctctagtaagccatggcacacattttatatctatctctatctgtgtatagagatagatctaaaaataatcaataagagattttttaaaaaacagaatcttctcagaaatgagcagaggtgcaaaaaactgcgcttcaatactgatgcaggggatataaaaatgctagcaaagatgtatgtcatgaatgctaccttcttacgttacgaattcacaaacgtattcctgttctggtcaatttacaatagaagctcattcttgtgtggggaaacacaattaaatcatctgcttttaatttaaaataatcacgactaagtgaactgcaaaataaaactggaaatagaggggaagaagggatctaaactgcagtcatctttctttataagatcaccaaaatgggagtaaattatgattcaagacacaatccgttgaaaaattcatctgacgaatcctttttaaagcataccatatagtgcaattacggcttttcttgaagttgaatgaaaccgccacctgaatacagattaacaaatgccaaattacgaaaggtcctcagtgtatattttattttaaatatcaaaataaataacggcatcatttaagaaaccagttctttcaatagatgtcccacggctgatgtttaagcaagtctccttggcaaccaaggagcacagtacatattgggctcagggggagggaagaaagggggagcgactccagggctggcagcataagtaacctgagtagtggctgctcccgttagacgacacgggcagaggctgcatgggctgcaagcccctgaaatgtcaactccgggtctgcccccacttggcgcaccagcagcctcccaccctcttcctcaggtctgcagaacaggttacaaggagagagactggcttacccgatggggtgagcggtctgctgggttaggtgccagagacggcagcgcaggcaccggcctctccttgatgcacaatggctctgcttcgccccacgatgctgaggttaacagaacccgcagtagcttcgctctgctggttcggggatgcagtagcgaagacgagcgtcctagcgtgtttgtgtgtgcgaaagtgtgtgtgtgtgtgtgtgtgtgtgtgtgtgtgtgcctgcgtgcgtgtgtgcgcgcgactgcctgcgcgctcccgaactgtcgcgcggggaaactgctccctagtaaataaaaagccctagccagcactgcaggtggcacgtcccgctgactccgccccaggcggtcgcgtcagactggagacgcaccttggcacccccggggcgggttcagacgccacagggctccgccccctcccgcctccagctagcccgcgcgctccctccccctcccccgcgatcccgcgcacatcctttcgccaccccgcgcgcaacgccaccgcccgccgccagcgcgctcgctcccctgccgccccccgcccccgcccccgccgtcggcgagctgccagcgcgcgcccgccggtcccggaagtaccctcctccacgccgccctcctcctcgctctccggcacctgcgtcgccggcccctgggtcacatgcgcagtctgtagccaccactgcggcgactgagacccgggaacccagcctgctcgcccccagactcctttcccagggctggcgggcaatctgagcaaacagaccccgtggccctaactcggtgttccagggagtccttgctctgctaacttgtgaagttcaagttgcctctagtcctagcggccctacagtggccctccttaggataatacactctatggtactgaccagaacaaattcacagtaactttaagaaacgtcaggggaaccaacccgccagaggtggacgaaatccccaagcctgagaaatgagaaagggtgtgattactgtggttactactaattcagcaataaaaccgcaaacagacaacaaccacagaaccataccattaaattccagggcctggcacactcaagtgccacttccgagtcattcaggtcactcctgtgtaaaacatgctgagaaactcacactaaagcaaagtgggtaattttaataggtaagtattccaccaccgaattgaaaaccttagtccaacgtggaggtaagacaccagaagcaggaagagtgtaactaaattggagtaaactgtattttgtagaagttcaggatttaacttactgcaaagatagtatgttaatcctatttcttgcaggtttatgttctgccacagagttgggctaggaacagtgccctgatctattttgaggtgtccttaatgttctcattggtctcaaatcagtggttcagcgattattttctacttctagatccacaggatttgggggtttattcgtttgctccctctggaggttatctgtctggcttgtagtgcttcattttcatggttttgatatctggacgctaggatgctgggtacctacttatctagcagtcctggacacagcataggacaagggaaagaatgacaaacaactgactacaaacattaggtgcagtgtcatcctaagaatttttcataagcaacttgatagttttcattgcgttgtcttctatcagaaaatcgaatatgaaagcgtctttgaaccaaaaatattgacagtgactggtatcaataaataaaacagtcctttaagatccccaaggtgtttgtcactaaagtgagaatacttaaaattttaagcccatctatattgattggattatctgtttagaataaatagcagctatttatttagtataattaaatagagcaaagactataattgcatttacacaggaaaagaatatttacaccaccaactcaccatctgtgtgactatggaagagtctcttactgcccaagctgagtgtctcagggtatctcctggccctagcacaatgtctgccacatagtatcggctcactaaatattgttcattgacacatggcgttgaggtttaaatggtaaatgcctagtaaaatgtctagttcagagagggcaagattttcctaaatggctccttagtattgatttaaagtttatattttgtcttaagtattttatttctctaaaataagagacattagtttattcaatagccaccaaaattcaacacaaacatatgttgcagtttactccactcctagaggagcaactaggtgttaggcaccatttctctcttaggtaccattatatatagtctttctccttattaagaaaatgacttaaaataatacttcccaaaagctgttttttggaatacttattatttgttcagcaattttttgagctcctaga

SEQ ID NO: 585383 - DNA, 4001 bp, Homo sapiens
acatctttggccagggggtctattattttgcctaccataatgctcaatagctaatggcagacatgaacagggagtactcagttccacacagcttggtataatggaaaatggagggggtttggaggcatgtttgcctaggctagggtttagactctagcattcagcagttacgtgattgattacaaattaattcaatgtttagcaaactttaattcatcatctgtaaagttgttgtaatatctacatttaaggattattggggggattaaacaaagtaacaaatgtgaatacaactaggactgaggttagcaaacaaataaagaaagatttttaataaacgccagtttaccttcctttccatgtttaggttttgcagcttgaataacaatcattatttccttagtaagaagtgtattcattttctggcctatccttgcatcattaatatccttttctactcagaagttttaaatacttttatgtcagcatgtccataagcaggagataagtttgtaatgactcggatgcttaattttaattcaagataaatgatcactctgaatatgtatctatttttcacactacagtgaattggggttttagatgagtttatagagtttctaaaggttgtgacaagaaattcaacaattttataatttaatagttttctttgctcttttaaagagacttttctcattcattatgcaaaaaggcacaaatttccttttattatagctttgagattcactcccaccacacacatacttgtgattagtaattaataattgtcatcactattagaaaacttgtctcattccaaccattagggcataattcactggcttctctaggtgatttatcacaaagcttcttaaaagtgacttttgcctaaaatatgaagatatggttcctattattttcagcaaccacctcttgcaggattcaaagaagaacatgtctcccattcttaataaacagcagttttgttaaatgacctcaagtgctaacctagtagaatttaacgtgaacttggctagacaagagataaatgacctagcaatgatatgatggcatacatgataattccctcatgtccaaacgctgtccctcctcccactaccactcatgataaaataatggtccactgggaagctctcatttaccatctagaaatagaaccttcttctgagcaggctgttaggtatagcaggtgtacgtgttaaagatcagaaaatgcttccacacatccactggtatttgctttcctctgctggacaatctccagtaaagaatagtaaacttggtacttcaaatttctaatatgctgtccaaaatactcagtgaaactaatgattgttttactacttaggaaaaaaagaaagcctaataagatacataaaggaatgtgccttttattcttctaggtacttttttatattcaaaagttcttgatttcccaaaagccactatttccttccctaggtagcaagatttgaggtcatttgaggatatttgtttttcaacattaggaccaaaatacaacacacagcagaatattagcaagtatttttttaggaaaacacttttgtggttcctcactcatacacacacaaaattgaggaaacatgagggataaattcttcaatatctaaaataacaagatgatatataatcagaaatagttaaggggaacaatgcactatataggattcaatttataaacttttgtaataatttaaatgatgctgataaatgttttaaaaaatatttgctacacttattatctgcaaagtccagggctgggtattcagctatgatctgggggagagggagagacagacatatgaacaagtcctgactcttctaatacagcaaccctgctccaccagccctaccagagccaagcaccactgctgctgcaactgctgtcttacctctatacccattctgctgatccattgcttctatcactttccactgattgataatctgcagtgaaccaggagcatggcatagagtgtcctataaatatttttctgtatgctcactttttttttttttttttttttttttgtcaaatcagtgcctgatccttttccttaccctaagtctagggaaaaacccagtagcttgtttgggccatttcagtttgtttattctgccttcctctgtgtgaggctaaacagaagtcttcatagttctccaggctgcaggctggagacatagaagcctctgtgtggggccctctcactgacaatgcccctcagtccccagagctggtatcaaagctttttcaaggggaatgcaaattacctcccttcttgaccttaattatagtgtctcaaaaacatataatctccacatacattttttaagacactagaattaagattaagaagaccctcacgtgctttttaaactgctcttaaatatgaaacagtctgatgctttagtaggtatgagcatgaaatacaggcagtctttccttctactgtccagcaagatcacatttcacttccatcaaatagggaattcaaagtagtaaacaaattatgttcaaaacagtaaactagcgtatgtaacaacaacaacaaagcatgtacaaatcctccctttcacaatatacaaagcaaaggaacatctcgcatgcatttttccagtccatacacaactttccaaacatttcaaagtacatttatacaagtgctctattgcaaattaaaacagaagcaacagcatggccagtaaatcctaaagtgtcgatagtgaagagagttttaggtgcccagagagccaatgtgtttaaaagattaaacatttacatttgaaaagcaaagccttgcgaaaaattatttcaaaataaaagaaacatttaaatttaaaatatagatgaaattggtaaaaattgtctctgctgaatagccttaaaaatactgtttcttaacagaattttggtttataaaccaaaattccactctattgtgcttgaaaactagataccatcaccaatactagtaaaccatcagtttaacatctagtatgtttcagacccttggtttgcaactgacatttatcttatttaatttctacattagccccattaagtgacaactcacctgcttttacaattggagaagaatataaaacttaatgatataaagccacttgcccaaggatatacacagccagaaagtatgtgaacagagatgttataaattagactggtctcagtctaaaactatactgcccttctaattaattatcctataaaaatgcggctggggagccaagacggccggctaagcacagccaggaggaacatctcccatcaagagacagggacatagggaagaatgaaatactctctgagcagatctttggagagaaggcaatgagtggatggaaggaagacatagaggccaggctggagggaaaggatgctaggaaccctgcacagggctgctgagcaaagggactcattcctgggctccagcgtctcctggggaaggagtgagatgaacagccaaggtatggcctgctctcaccttggatctccagaatcctatcagcaggagaccccatgacctccacaaacacttaccctggcagggagagctgccaggagaggtggcaggagcaggactccagccagtgcacagctcagagagtttggcatgggagtggctgcaatggagcacagccagggacacctacgctcctctaggagacattagcctaggggtgactgtcatacctggacacagcagggtggtcttccttgtgagatggggctagtctgatctgagcactaccctgtcttctggcctctcctagggctccagactggttgcacccacttgcagtgcagcctcagatgcccaaacagggtgcttcctggaaaactttaccatagctcctttgctggcagactgcacctgactgtcagagagttccagtgcactggaaccggctgaaacacacagggctgccacggtcttccc

SEQ ID NO: 585384 - DNA, 4001 bp, Homo sapiens
acaaaaaacagaaatttttaagaatgaaagttttaaaaggtaaacaaatagaagttctaatattttcttaccacatctgactggatcaccttgtgccccaccacgcacacatacaaaggcgctacttatgagaccattaatccaagcaaccacattgtaactgttcagcataaattttagccaaataaaatacagcaccaacaactcagatatcacttgttcctttttcttcaatagtactgacttccggcttcagatttaacactgcatccatcctcactgcagttgctttaaaggggacaataaaccaagggaaattatctctaaaggggccccatccaatgggattgtttcgttcactgaaaaataaatttaaaggctgcacttcaaaggctgaggtctcataaaaattaaatatttttatttagaaatgttattccagcactttaaagttacagaatagaggaatttttttcattcataagctttcaacggctcttagaaaaaccatgtttaagttgggcaaataactggaatctgaacttatgattttctttaatatcaatcgacattatttcttatgccagtaaagccttcatttccatggggctgggcgcctcattagtgaaagtaaaagactgcacaaagcgggggaagtgccaactagagagccctcacaaccaaacaagcagtacttaggtcggagggagagagttgctcctgacctaccaagaaaaccacttttgtacagaatatgagtcatcattattgggtgttgtaattgagagataaatcattagtgtttttgtcttttttaaaaaacatgtctaaaaagctcaaaagtaaatgccagtgtcatattcttttgtttgttttttgagacagagtctcgctctgtcgcccgggctggagtgcaatggcgctctcggctcactgcaagctccgccgcccgggttcacaccgttctcctgcttcagcctcccgagtcgctgggactacaggcgcccaccaccatgccaggctaatttttcctttttttgtatttttggtattttttttgtatttattattttgtattttattttgtattttttgtatttttggtagagacgaggtttcaccgtgttagccaggatggtctcgatctcctgacctcgtgatccgcccgcctccgcctcccaaagtgctgggattacaggcgtgagccaccgcgcccgccgccaatgtcatattctttagacatatcactgtcatttcacagctttcaaatacttccatctcctatgtattatcgatgaaaacctaagttttcatcttagaacggagctgcccgactattagaagcgtggaacccaggcttgccttgtcgtcgggaatgagcactagaggcacctgcacgcaggtggaggagggaggctggcggatggagagggcgaggctaggaggccctcgggatggaacctgtctcttctttggacactgtggaatttccataagctgctggacacagctgatgggtaccaggtatgagtggcaacgtttggcaattccattaactgaaaagaactaccgagaaacggtgaggcggggcggcgaagatgagaccagctgcccatcactccagaggacctgctgaaagaatctgaactcaccacgccttcgcgtccgcaagggaaaggtccggctgccacgcccccgcgaccgctgtcgccctggggaaaacacgagaaacacccggcaccgccaggttccagagaccttcgcaaagtaaggggtaaataaaaaccgtggccccaggaactagtagttcccaaagggaccaaaaccgaggctcccccaacctagcccgtgttcactccaacttacccattaatgtggcactctccgatgccctgatttcccagtccccagcggcgacgtgtgtggcgggtaacagaagggccgccactccgcccctggcgtgaagcgtagcgacccagttcgcaatccaagatggcggccacctgcgccccttctccgagaccccgaggctcggctcccagaagcccttgcactcgacgcggcggcggcggcggcggcggcggcggcggcggaggaggagtggtggccgcacatcctagcagtggggcgtagagaaagtgcgcgccgccgtcccacccaccgaaggaggagcctgtgcctgcgacaagccctggattttagttgcgcttgcggtggccatgctgtaggtactctgcggcccgtagacctccgtgtgtgcaaagggacgacccctcattcattcattcttcacgcgtgcgtgcatgcatacattcttaaggatataaactgtgtcaagtaccattttagatacattattggggctacaacagtgcaaaaaagttggtaaaaatcgcagccttgttaagtgtacggagaagctcacgttttcttcagcttcattaacttttatatgctctgctcgttttatttcaagctttttgtcatttataattttatattctataacatctgcggttttttgtttttgtttttctgtttttggggggttttttttgagacggagtctggcgctgtcaccaggctggagtgcagtgatgcgatctcggctcactgcaacctccgcctcccaggttcaagcgattctcctgcctcagcctcccaagtagctgggactacaggcatgcgccaccacgcccagctaatttttgtatttttagtagagaccaggtttcaccgtgttggccaggatggtcttgatctcttgacctcctgatccgcccgcctcagcctcccaaagtgttgggattacaggcatgagccaccacacccagccacatgagtgtatttttgacagcaatgtagtcaccaataaacgagtaacttcagttaaagtactgtagattataatacacagccctgtaatctaccctggagttcaacaaacggtattgaaaacagactgtgttccagatgcaataggaagagaataaataagataaacaatacataaatcctgcccagaagacgtttgcaattttttaagaggaaaaacatgaagacaaattgttttaagatgtttgctattttcaatagttgaaaaataaacaggagagaagggattatttaactgtgggtatgtagggctgagaaaggcacgcttgacaaaggaaacctgggcagtgttaccagaaagcgttgccaatcatgagtccatatagtgaagtgaaagcaagtttattaaagaagtaaagaaacaaaagaatggctactccataggcagagcagtggcttgggctgctggactgagtatatagtttttttgtgtgttgtttgtttgttttgacacggagtcttgctctgtcgcccaggctggagtgcagtggcgccatctcggctcactgcaagctccgcctcccgggttcacgccattctcctgcctcagcctcccgagtagctggaaatttattgtatttttagtagagacagggtttcaccgtgttagccaggatggtctcaatctactgacctggtgatcctcctggctcggcctcccaaagtgctgggattacaggcgtgagccaccgcgcccagccagttatttcttaattatatgttaaacaaggggtggattattcatgagttttcaaggaagggggcaggcaatttttggaacttagggttctaccctcttttagactgtatgacttctggatgttgccatggcatttgtaaactgtcatggtgctggtgggagtgtcttttagcatgctaatgcattataattcacgtataatgagaagtgaggatgaccagaggtcacttttgtcttcatcttggttttggtgggtttggcctgtcttctttacgacatcctgtttatcagcagggtctttgtgacctgtatcttgcgtggacctccaatcttctgtgactaagaatgcctaacctcctgggaatgcagctcagtaggtctcagcctcgttttacccagcacctgt

SEQ ID NO: 585385 - DNA, 4001 bp, Homo sapiens
gacggacagaccgacgcccccagccctccgcggggacccgggaggaacacgcccgcttttaaactttctctcacggtcgcgctgcgggctgtgctttgaccgggactgggggaggggggaatcgcagggcctttttttctttaaaggtaattaaagttttaccaccagtccaaaagttgcgccctccccccgcccgtgccaccgtgccctcctccccttccagggctctcaagtttttctccccgcccggcggcccccacactccaccagctcgcggggcgcgcggcggatgcctcggctcctgcgcttcccgatccccacccccgccggcctctacttccccccgccccgccgccgcggcgcgaggacggcccgcggggcccaggacgcgagtgtgcaaagcccattattccggaaccgcacacacacgcggcgcgaggcgggcggtggccccggcgccggccccggccccgacccctcttttcctccccagaataaggcaggcgtaaacaagttgcaggaaaagcagccccgcgccgcccccaccctccccccacaagcccgccgccccggcgcggccgccgccgccgcgaccgccgccgccgcctcccgacacacgcccgcgcccgcgcccgcacccgggccggcgcggcgcggcacggcgcggggcgaacgccgcgacggcgcgggctcccggcccggcccgcggcccgcgccctctcccgcgcggacggccgccgcgggcccgcgccgcctcgcttcccaaagcactttcctgcctcgggcagaaataaaccggagggtttatttttgtgcaactttcccaaaatggcggaaattggagctgatctatatgaaattctcacacactcggttgggaagagggaggcggcgaggaagccacgcaaactctcggccgccgagccccgccgcgggtccgtgtgtgtgcgtgcgtgtgagtgtgcgtgtgcgcggtgggagtcgggcaggcctttccgccgcgcacacacacagcacacgccggggagacgcgcctgcacattcaaccagtccattctccgcagcccgaaaggggagaaagtggcccggcctcttttcccactgcctcggtctcccgtacttgtacttctcgcgctcgcccgcccgctcgctcgctctccggtgcgcgcccggcacaaaggccacacgggcggagggggccgcaggggcggcgcgcggggctcgcgcctcccgccgcaccgatccgcggccccggccgcccccgcgccccccgccggcgccccccgcctcggcggccgcgctcgccgcctgggctgcggctccgcggcgcccacccggacacgcaccccggtggagcccggcgccgccgcgctcccccaccccgcgcccggtgtcacgaaagcgaccaaagtgacaagctcggggggcgcgggggagggggccacacgcatcccgccgcctgcgcgccagcctgagcccaacgcggccgcctcgccccggctcccttccgcacggccccccacacccttccccgtgtgcgcgcaaagaaaaaaatacaagtctctcctccccccattttttcctttctcttttctctctcttttgttcctctttcacactcgcactcactacttcagagtgagatgcccagagactccccctccagccgtttccgagtcacttgcccacttttttccccgggattaagttttctcctctttcccagaggcgcagagaagtgggggagaaaccccttctgtccctcccctcccctgatctgtttcacaagacgagggtgcgcttccttccctctatagggctcttaactttcatcctcacccagaaaaataaatgaatggcttttgcacggacaaatcttcagattaattagagattagatccgatcaaccgcttcttacccccaaattttctcttttttttttctccgtctcacgagtagtcctgacaaatggtccagggctgcgggcgcaatgcgcatgtgcgcgtagagtcagggctggggagaggggaaactgcgctggtgccggtgccgccgccgccgccgccgctgccggggaggctcgctctggcttccctgttactgctgctgcgccttcgccgctggaaagcagcaataaagccgggtggcaaatgcagctgcccgcagatcctgtttcaggtgcatcttttcaatagcccggtcaccgcctcagagctggttcaagaacagtccaaacaaataggaaacactgctaaggttccagatttctttgtctatttttcactttactttttttaaaggcaattctcagagcagcgaatccaccatgtgctgtgaaatgtatgcattcagccattaaagagtgggccttagtcttgcacaaacactgcccaaaggctaaatacatgctacaggtcatgaaaagtaacaaagttgtaagctttgggagagtacaatctccctctctttgatggctggaacaatgcataataaagaaagtgtgcatataaaacttgtgccttctttccgcttcctaagtgcggatctttattgacagctccaacatgttaggcctctgtcgagtaataggctgagattcctacagtaacttagaacactgtgaaagtcccttggcaataagcaggtccaggactaccctcttaaggtattcagtcaagatggctgagcggtcctaaatggcaaaacctgtctttgttaaagcgtcaaaactagatcaagagagtattacatttcagtattgacagctttcggcgcattgactgcgggccgccgtttggacagcttcactggtcttttccacttaataggagtacttacaaaataattcgagtaattaaagttttgataaacattttgatgtcaatagcagagtttgctgtgtgaaaaaaaaaagcatgtgtgattttaggaatgagggaagcatgtcttagattttgcggggggggggaggtaaaaggaagttcccatccccagagtagactattttgcatctaataaagggtaaaggaggcccttttctgaaactgctgcctgaggcctagaatttaaatatatcacagatggaagttctatattaaaaatccttctccagtgtagggaatattattcttgattgaattttttcacttaaggaatgtttcttgaaccagtttcagaacataaactcttaaattctttccttaggaccatgaaattaccctatagaagcagaccacccgatatatctaatgttggtgtagtgaccaaattctccaaaccaaaaatcaggccatatgccttaacatgtactccagaacaaacggacaaatcctgtgaagctgaaatgaacttataaaatgcttcatacgttgaacagccgttggctgaggggtgtgaagtagagaaggctgggtagtgagagctgtagatgatctcaaaccaccagttcactattgatttcacccaccacattcaacccttttcagagctgttcccaaacagcttaattaactgatctgaatttcagcttctctccttttctctctagcccttgaataataagcagtgaaatggccaaaggcaaactgcaggagaaggaaagaaagggcatgagctatgtacaaaactaagaccttgcccccatggaaactaaattaattttagattcctctttctgaaaaatcaattttagattccttctctcaagataatttctagatgatatttctgttgtacttatgttttcagtgatactggttcaacagtctataaatgtgtattaatggcctacctgtgctaagtgctctgcaaggtgctggggataaacaggtgaccaaaactaggccccagctacaagaaattcagcctggtggagagacagtgtagtaaattgggcattatgttacagtaatgttatatggaaaatgttatagcagaggtatgtagagcaaacacagttgagcaccagtggcaataaggaaaggctttacattagaagtga

SEQ ID NO: 585386 - DNA, 4001 bp, Homo sapiens
tctccaaaatgaggataatgaggaataataagataatgtatgtagaaagtacttagtatattgtatgacacagaataagcattcagtgaattttatatgttataatgatgctccttaaatctttaatgttcataaatcatggtatatacatagaatggaatactatttttaaaacttaaaacacgaggcagttctattcatatgaaattgatatggtattgatatggaatgatctccaagctactaaatttaaaaagaaattaacaattaacagaattaactgctgtatacacaaaacaatgtgtacagcatgttactacttctatttttttaataccattatctatatatgtatatgcttatacatacacagaatatatctggaagaatacataagaaactagtatcacagattgcctctgaggagaaaaactaagcagctaagggatagggatagaaaaaagccttacattttgccatattctttcttgcacctgttgaaatttatagcatttgcttttattgactaccaaaaatgaaaaataaaatttatattataatccacagcttacactaccagaatattccattatatctttatttatttatttacttttaacgactactccagcagatcagggctacccccaggcagtgtgtggagcctattccattatactaaatgcattatgctaatctttgcagaaagacgtaaggtgacctaatcaaagttctagtattaatttcaactgcattgatgataagggtcaaagattgtcatatttttagctaaattaataaataatctattaaggtatataccttattaaggtctatcaatctattaaggtatattacaggggttgcttggatttgagaaaaaggaaaacgagtatgtggatgagggagacaaggagaataatttcattcattcattcactcaaaaatcatatttgcacgtcaagtaccaatcattgcgctaagtgcttaggaaacaatgacacaatgtccttgcctttgaaaatcgtgcagtttagtgcgaatacatgaatagagcagtaaaactggcactcttggttactcagaatatacattcattcattcattcatgaacatataactgaatgaaggaagccagggagaaagaaagcccggtgacaaaataattccactgaagcccctagtgacttgaaaagaacaccaagaatcgatccctcaatctgagaatgtgtgtggaccttccttcctagaatcacgagagacatcagggcctgcagaggtcccaggcgcggctcttcctccagtgcccgtcagtcaccagccccgagagcttggaaaacgcagagggtaggggtccccaggccccaaccccacacctgcatctcttcaagccaggcactcccactaggttcagctctctaaacgtcccggaaggaacaaactctgagtcaacctctgaccctcaaaatgaaagtcactcagggtcatttccctcagtgctcagggctcattcacagacagtataaaaggtcaagagaaatggaaactcctctcgaggagccctcagcttcgtgaaagcaggagacacctggggtagatcggacagggagggtaatcccagaggcttctccagtcatatgcagtcggctcggactactcatggcacagtcactgacctttccaaaagggcttcccaggggcggtggccagaggagcgagagcggcggcccaggccccgcacccaacacatctccctctcagcgggctctgtgctaaggggcgcagggtaaccaagagcgaccaggaggccgccatcttgaactccgtacgaggagaggaagaggaaaactttattggaacccagaagagagacggtggcaaagtcaaaccccgccgtgcacgctgaaggctccacccgagagaaccaagggatcagttagggaacgtgacctccagtagccacatgggcgggctgcactcccgtgccctcccgtccttccggacgctgccagccgggactacgactcccagcatgcagtggggtggggcggggtggaacggaacaggcagctccagtctgggcagtgggagggagggcgattctccgcccggcgctggcggccggccgaggaacccgaagttttcaaggaattgggaagtgattatgacgggtaggcaggtaaccactcttgagccttttaagttagctcacatgaccgagattccgaaacctgaataaaatggaggtgacccaatgggccctcgggttttaacggaagagtggtgtcacttcgtcacacctccctaaatggtaggcccattttttattttatctccagcgtccaactcatctttgacgagtacctgaaatgtgcgcctaccgctttcccttttcgtatttgaataatataaatggtacgcactcaaatgttttgaaagattgtataagtggcatgggaaagccaagggcctaagaaggactgtcggtggacggagaagtcatgggacagtgtatccgaagggtaacttctcattgatctgccctaatttgattaaacaataaatgctttgacatactataataagcgaattaggagtacaaattgctgtccagaagaggctggcaatccagtaagcgagatgaattccagaaaagataatacaggccgggctaggtggctcatgcctgggaggcccaggcaggagaatcgcttgagcccgggagtttgagaccagtctgggcaacatagcgagatcctgtctctgcaaaaaatacaaaactgggcatggtggcctgtgccctgtagtcctagttactagggaggccgaggtgggggttgcgtccaggaggtggaggctgtagtgagctgggattgtgccactgcactcctgcctgggagacagagtgagtccctgtctcaaaaaaacaaaaaaaaaacaaaaaaaaaaaaaaaaagagaaggcccggcgcggtggctcacgcctgtaatcctagcactttaggaggctgaggcaggcgtatcacctgaggtcaggagttcaagaccagcctagccaacatggtgaaaccctgtctctactaaaatacaaaaattagccggcatgatggcaggtgcctataatcccagctacttgggaggcggaggcagggagaatcgcttgaatccgggagagggtggctgcagtgagtcgagatcgtgccactgcactccagcctgggcagctgagcgagactctgtctcaaaaaaagaaaagagaagaggaggggaggggaagggggagtgaaggggaggggaagggggagtgaaggggaggggaagggggaagggggagggaacaaaatacaaagacttttagaataaatttttttaaaaataaagataattcagtgttgtggaatcaatgagagagcagtttggctggtaaatcaaaaaggccttctaaaaactcaacttttgtttttttgttttttgtttttttttttttaagagaagtggcctcactatgttgcccaggcccaagtgctgtggctattcacagactccatcattgtgcatagtagccttgaacacctgaacttacatgatcctcctgcttcagcctccccagtagctgggactacaggtgccaaccaccatcccaagctttaaagcttttttttttttaatttttaaaaacatggactacttcacgaatttgtgtgtcatccttgcgcagagatcatgctaaaagataattcagtgttgtggaatcaatgagagagcagtttggctggtaaatcaaaaaggccttctaaaaactcaacttttgtttttttgttttttgttttttttttttttaagagaagtggcctcactatgttgcccaggcccaagtgctgtggctattcacagactccatcattgtgcatagtagccttgaacacctgaacttacatgatcctcctgcttcagcctccccagtagctgggactacaggtgccaaccaccatcccaagcttt

SEQ ID NO: 585387 - DNA, 4001 bp, Homo sapiens
tagattgtatgttgtagctattttgaataaaattccttattgtatgtagcatttaagtggtatcttgacagaatggtagtataaacccttcctcctgaattcacttcatcttgtgcctgggtcatagaaatcagagttaatattaccttatttgaaaagagagtaaataagaagggagaggaaaaaagagaaatcctgtgtgtgttcaggataattcttagcaacaatttacttgatccttactctgcatgctttgagtttctgccccattccaagtggacataaggattggtgcccctggcccctcatttctcccagctgcctaacattattaaagtattatgtcttgtttaaacacaccttgtaattgagcaaagtttaatagttaaaagtagaatttttaaaaataagtggccagagatactcttaaaatcactctcgtaaattatattaattaagtcatattggccccattttacctctcagagaagcaaaagcaaaaatagaaggaaaaaagttatatagtgaatgcaaggtcatttttattccaagaattttaatcagggagttattattatagaaagagcttgggatatctctttactccttaaaaaatagtactgctaaaaatgctagattataagaacaaatatcagaactattgacttggctagaagttaactggaagaaggataagtatacttcaaaacttaagcagattcagcctcattaaaacttttaaaagcttctaacctacagattttgtactcttaggttaaacattttcatatttaaaaccgaataataaatatttcttttttttttactttgatacaggttttccaacttaaagaattgtttgctgaaataatgtgttacaaagtatgtcttacaatgctgcacatgtgcttcctgtaaaattcatgataataaaataactcttcaaagactccccaaagtttcagaaatgagagctatatatacataaacactaagaggctctgaggagaataagttatttaagttacattaaatacagccatcttccaaagtcctccaaagtgtatatctagtcactgtggccttaaagtacacatgacatagaagtctcctctgtatttaagcaaaaggagaaatttcacgatttcactacaataaaataggatatgaagataagatgtgggtttgaaaaaggtgaggctggaggcgccattgccatgaaagaaaaaaaaccacataacttctttagaaatcctgttttaaaagttgaaaacaaagttctgtaaaactttatatatatatatatgtgtgtgtgtgtgtgtgtgtgtgtgtgtgtgtgtatatatatatatataatttttttttgatgcatcagctaccctccataaagtcccaggatgaaccacacagcttgggaagcctttctctgcaggatgggctctgatttgaagaaattcttttttttccaattggaaaaagttttcctcttggaaagatttcagaaatcaatttacgggatgtatcgtgatagcaagacctcttcgaaactaaagaacaatgaaaagcactccccgttccttttgcaggacttaggtaattccccctacactacgctctcatggcattgaacttgaacttgcttcaagttcctcttgccccagagcgcactctctgaaggcgaagcaagacggcagtccacagacagcaactctcggaagagtggaagaagtgaggaatctcggtcccggcaaaggatgcaacccaagcccatgcctcgactgtacctctttgctgatgtgcctgtgactgccgctgctgctgcggccgctgcgcctgtacgcccccgaggcctccggagagcagcagaaggaggaggaccccggcggctcccggcatcgtagtggccgcgaccggatccacttctcgggagccagaggagtcgctgccgccctgtcccctggccttggcttgtgagctgagcgagcagcagctgctggggaagaggaggagacagccccctctggctttggccgggccgccgcctgagggtgggggagaaagaggacactcctccactctcgccttccatgggcacgcggccccaggacggccctctattaaaggatcctcctttcctagagcgctccttccctctgagaccggatcattcctagcttgacctggtatctgaacttcttttaaattaaagaaagtaattgacatgaaagcactttgaaatctgtaaaatccctacacatggaaaacattatttctgggaaatgcaaacagctaggaacttttacctcttgagaaaggcctggcaaaactgtgtgcagccactgtgtacctagaagatccaagacatccccaaggccagagtgtctgagaagttactagccgagggaaggtgccctctggggacactgcaggctggggaacttactgctaggtaggctgctgggagggcagtaaaggaagtgcaaaataaaacagccaccctggcgtccctgaaatgttcctgaccaaactaatggttagaatgaaggctttcagttcagttaggagacatttacttaaaggtaataaaggcctttgcaatagtttccttccagactcacaatttcatctcttccagtcctggtttctcctctttctcctctttaactcaacagaactactgccattcctagtttttgttgttttttcatttgttttttatggcctaggtcagtggttctcataaggtttaaaacaactccataatggattttgtgagtcgcaggatgtcttttggtttactccgggaacggtgggtactgcaggcattagtgtactgttgggtcagggtgtgagctgtccctcagtggtcaggacagtcctacaacatattttgtccttagacttctgaatgggccactggtcatttatgtagtgagtaaacaaacaaacaaaacaacaaaaccttgccttatatttgaaacctaatttaagtttgtttccacatcaaatttttgtgtgtgttttttgtttgtttgtttgtttttttctaggatgcatctactatatacattgagaagataatttactttgtgtttttggattttacacccatttgtcaatgggtgtaaagatgtactttcagagaagcacatcactgataacaaccttgcccatggtacttgagtcaccagcacaatatcaacatcccatcgattacactggggtcatctaagaataggtgcaaacttttattttattttgcctcctaaggaagttttacccaagcatttatatgttgaaatacatattgtcttatatagatagttttcttttttatagttaagatgtattgatttatctaaatattatattaaagttgaattttctttcagtaaaattaagagagtattgctttgaagagaattgattgaaaatcactagccaaagcccattctttaatattattcatgtcttttagttctgttaatattataccagaaagctttgtaatccttttaccttactgtggaaatttgcaaaatgtagtctgcccatgtctgcacacttatacattatttattattataataaacaataataaaacttatatttgagagtttattataattgaagccccagtgtttttaatttggtctaattttgcctagaagtgtttttcaggtacatctaatagcagagaggcaccctaaattaaccttctaaacctattgctattctcagaatgattatttttactcaaccacgttgtggcctcaactcaaattagttaatctaataaataataaaaaatatttataaaaaggaaaagttttattgaatatttataaaaaggaaaatgattatttttactcaaccatgttgtggcctcaactcaaattagttaatctaataaataataaaaaatatttataaaaaggaaaatcagaatgatgcagctgctaactctaattgtggaatgaaaatataccatgttccctcta

SEQ ID NO: 585388 - DNA, 4001 bp, Homo sapiens
tccctggggttaattccaagcctgtagagaagcaaagccttcccattgcatgaagtccctcctggtctggcttctccccaagtttctgggtatgaagttgaccagaagccatgctccctctttttcatggaggctacattttataccacagtgagaggttggcatattctgaccctgtccactctcttttttggggcaatgtgggtagggcttactctgaagaaggaccatgttcatgcaccttatttttaatcatcaataattaataactataattgtactaacaattaacagaattcatagcaataatccatgcatcagtgatgttagaaatggtgtcaatccacataactgttttagttgtacagttgctgtaaccatagctatagagtgtggtgtttgttttgctaggtcaattgctccttcctttcccatgaacttaggtgactttattttcctccctcttagcatgtcccatgcaatgggcatgctgttgtctgtttcagttcaggggttcttaaatcacttgttctggattcattctcctttaccagacctctacattctggttttgtttccaacttaaaagctattgtaaggtattcaaacagcagctctttgaataaacatattatcaatagcatatcctgaggcttgattttaatggaaacatcttgtttctggaatacaatggctcgtttctacttaagataccctctcagcagttgtctaacagctcctttcatgaccagccactctcactcaccccctcaccttccctgctgcagaagacttcttgtctaatatgagacaaaaagatcctgcagtagtgttcccactgtcctaacagcacagaggagcaggaagccagtgacagggcacacacgttaagtgccgtggcttgacaaaatgactactgggacacgcaagtggcagaagtcaccgatgtgctgctgcagtccccggtgagagtctagcggatgaactcagagcaccaacacatgcactctcacccctttgagcagacacattccgaagcctcaactttcaactctcaacatccaaatgcaacttacaaaggaaaactctttatttcaagtttccgaactgacctagcccaggtgaaactctcaaggcactggggagaggaaagaggcggagagagagagaaggacgagtgtggcacagcccgcgggggcgcaggtgccccagcagggtggcaatggcagggacactgtacctcggccgcaggcggcaggcgtcccagagccacgcggggttcgctcgtctcaggcgggtcttgcctgccaaccgctgagctcccttcaatgtcaaaaggaaaagcgttgtcgtccccggacgcggcgcgggagcaggcagcgctccagaggagccacagaggcagaaccgagcgccaggctgagctcaaagccatttctccgctgacatccagtagtgctcttccagggctcgggcgctgtgggtctccgtaggtctcccgcgtggtgcggcggtgcctcgcttattttccctcctctccgtgtgcagtatcccgaggtggctgcgcaaccagcagcttaggaaataaagggaaagtgcgagagtaagggagagttccagcctctctctccctctctctctctccccttctccccctctctctccctctccctctccctctttcactttttctccttcccgcagaggttctggctcaagaacctacagatggacggagcttacagtacggcatcaaaaggcagacggattggggtgagccccgccagcgctaggccacctcctctccctggccgttcgggactggggactgcgctgtcctggcttccttctcacattcattctcaccactccctttttaccttctactcccaggccctcccactctaagctggcttttcagacactgaggtccgcctttccctgcggtcttccctcccctctcagtttggagcccctccaagggctccagaagaatattcagcttttgtgacgcttcctcaccactcttatttatgtagtcaaggtaccggatgtcttatctatatttacatagatattttatgtggcccccgctagtttgcaggaaagtgggtggaaaagggattccagggcaggaaccaaaggtagatgatctctgaaggcagagggtcagggtgcccactttcttgagcaaggtttctcgggttttttctgggggatagactgttgcactctttgtgctaatatcttctcttcagattcactggccacccctcttcctccctccagtcctcacccagagggcttgggagaagaatatctttcactgcagcgctggaaaatgacttcattacccaaatgcatgaacttttatttacaaagaccatcttgttttcatcctaaagaggtgctttgtaaggggcccggaacaaggcttgcagtgtatgagcctgtcaagtatactgcctacagccccggcctcttcctcttggcctgtaatctcatgcctactacatctgtctgaatcatgtaacctttccaagacttcagggtgaagttgggctacagctatgtcaggggtgcccctgtggatgggatagtgtctgcaacagctgataggtacctttgtttacattggcttcataacgagctctaaacatttccacaagatccaaccatggtttaaaaatggtcagatgagacaaccataaaatgacacccaggtaagcttccaggtgaaataaagcatttttgtataacctaatcataaaataaataaataaagcctttccataaaacctaatcattagctccatttcatagaacaaaagtcattttatctaagtgtaagcaaaaccatttattttgcacctaacatgtgccagatacttggcatatgctatttgtaaacctcagcattcctgcaaagtagtaccattattttccttttacagaagaagaaagtgaggttcagagagactaggacatttgcccaaggtcgcacagctggtggaaagcagagatggggtttggatccaggcctcactgattccaaagctctcttttacatctgtatacacgacactgcaactttaaaataaagagtatgaattcagaggtgaaggaaatggacacttttattttttgagtgcctcccatgtgcaaaaaaatcacataaattgtctcatttagggctgggcgtggtggctcatgcctgtaatcccagcactttgggaggccaaggtgggtggatcatgaggtcaggagttcgataccagcctggccaacatggtgaaaccccgtctctactaaaaatacaaaatttagccaggcatggtgggaggcgcctgtagtcccagctactcgggaggctgaggcaggagaattgcttgaacccgggaggtggaggttgcagtgagcagagattttaccactgactccagcctgggtgacagagaaagactccagctcaaaaaaaaaaaaaaaaaaaaaaaaaaaaattgtctcatttaatttcatctttatgataatctcatgaagtagggattgtcatacacatttggccatgggtaagtggtaaaattactactatagcccaggtaaatctgatggtaagatctttgattttaaatgataaaattgtatgatacaaaagaaccaaagccaaaggaagcaaaaataattcctataggttttaaagtgatattttgattttaaaatattaaaatagtattgcaagggactattaagctaaattatgatactcttcttttacatagacttgttaacctactaaattaagtgggagaagttaaaaacatgtttggtttagttgagagactgatattgggaaaaaagatagccagactctgagacaaaacagattatgctcagttatactgacccagtcaccctttaaaagaacattaaataataataatattaattatatatgatgtatattaaatattctgacttcagatacagatctcttcagctca

SEQ ID NO: 585389 - DNA, 4001 bp, Homo sapiens
tggtgggaggattgctcgagtccaggagttggaatccagcgcaggcaacatagcgagttcccatctttaaaggaaactgcatactgacattttcttcagttcactttctaataattgtcagatcaaaagtgaaagcaacgctgtatcttcatgctgaaaaatgattgctgttcctacttagcgaaaatgttattcaatgactaaataacttttgtgatgtataacaatctcccattgatgtaaataaaacatctaaaataaccaaataaccagggttagaacagttccaacactatttatatagaacaaggacttgcaataaaaacaaaacaaaaataaaaacgacctacacaatgaaagccagatattatacattaaaaatgtagtagaagtattttttggtgagcagcaaggcatattccatcaatatttaggcatagaatgtgccattccaagcatggaccatgatctagtttcttgcagtagcagccaattggactaacacaatgctacttcttttactgttcaatcaaattcctccactgccttaaggaatcaactaccccattttaccgtcagagataataagctttgttttcgtagcacagaacattcactccaattataatgtcctaccttttcttcctcatggaggaaatttgataaaaaattaagtttatcagaaacttctgataaactgataaactgataaatttattaaccttcaataaataattcataaagttcaaacaagtttcatgatcgctaacattcaaatccatttccaaaactggagttatacaatattacttctgtgcatgagattatacttattgttcactagatttatgaataacttctggaggatgatacatgttttaaaagccgtattaacatatgagttgacaaacattaaattttgttcccttagaaattgacagagaagtcagaatggggataaatcaagtcatctgaggcattcattgagctacaagctatttcaggttataaaaaacactgttcccttaattgtcgttccttcatttgctgtatttatatacacactcctactccataaagacctctccatctctcccacctcttccaactatgaacagtaacctaaaatcacactgaactagacgtaagagactcccaggatttctctaaggtatacccaggatcaaggccctctgggatccaaagaactgtagctcttttactgcaattttccttcagaaccacctttcccgttccttccctcctggacaccgccgactcgcgtgttgggggtggggtgggagacacgccgccagaaagacaggctctacccagccaaacctgcacctccgaggccgaaaagcctggggctcttcctgcagcaccgggcgcggccaaccctcgcttccccagggcagggctcagctcgggtcaatgcaaccagccaagtcaggcccggagcgggccggctctgcccgccagtccaaacctctggaccctcgccagcggggatgggcgtgggccccggcggccaccgccccgccaactcgagcactggaggagcgcacccgctacgccagccccggacctacctggaggggagagcagagctcctggacagcggccacgggcctgagggcggacgctgaggcggccagagtccgtcccagcaaccccaagtatccctggtggggcagagcggggagacgaacgggggggctgccgcgggccagcgcggcccgtcccaggggtcgtgaggacctggctctccccttaacaccaggccaccgccgccgccgccgccattttgccttccactcagtgtcgccgccgccgcactccgctgcaggtttcccggatgtgggcatttcccggcgtcgcttgcgcgggggccgaggactgggggcttttgcccgcccggctgctgcgagggagcgcgcagcctgcggcctccgggcttcgttgcgtcgcccgcagctctgatcgttcgtgagcgtcgccccacgtcgctcccgcctgcccctgcccatacgactcgcccgcgcccgtgggttaaggctgtctcccgcccagcctacttggttgattcaatccttttccccattgatctatttctctggaccgagtagggatgtgcatttcacggagctacgttctcagaagggaacaactgagttgctctgggaaacctccctgtggacctcagaattccagatttttggcgctttgaaataaaattttattcttgcttagcgttctttccccgaacaagccggtgagcttccagcatctgtattttctgaatccggcagataagaaatgcttgagccaggaccgattgattagcagcggtttagagatcttatctgtcaaccgcatccgtagaaggagatcgttattgccataattggaataccggtgacggtgtgacaagaggttttacttctggttaagctgaatgtaaagtgtgggatgggatcgttgggtttgatgtataaggtacggtccaccctttgtgaagatcgcctttgccagtttttcctctaggaaatatacagttagtgttttcaagtaccttctttcgtaatttttctactacagagtacaaaaaaattaaagacatctttttctgacgttaaagtaataactggctacttactgtatctagaaatccaaatgtgaaaacccgttaaaagattatgttccggacgggcgcggtgtctcacgcctgtaatcccagcactttgggaggccgaggcgggcggatcacgaggtcaggagatcgagaacatcctgcctaacacggtgaaaccccgtctctgctaaaaaatccagaaaaatttgcccggcgtggtggcgggcgcctgtagtcctagctactcgggaggctgaggcaggagaatggcaggaacccgggaggcggagcttgcattgagccgagatcgcgccaccgcactccagcctggacgacagagcgagactccgtctcaaaaaaaaaaaaaaaaaaaaaaagattatgttccaagaacatttggttgaaagtctattttctacaagcacagagtttgtagaaggcaatgtgacccaaggtgggtcactaaagagccccagggcttactttcttcaacgtaagggtgccccataaagaccttttcagccctaaaattatatgaattataggaatctaatatgtccacaggtctgcttgccctatccaaaaggattatgcatctggaagggcagactgcccccagaatcctgtcacgtctgtcatcaacccatggtacttaagctcctcaatgctctctaaacctaaaggaaagtatctccacaaactctagtctttggggaaattcctagataattcagggagctgagtaaattgctctgtgtaggactaggaggcttactcctgtgaagtagggcgagagataaaagagcagggaaagcagaggtggaatgatcaggaagagaactgacgagatgcaaagcattggggactgtaggtgcggagagtgatgatggttggggaaatacttactgtgggtgctggatgtgtgggaatggtgatacctgccatcacatttgcaggtttttatattattgtgatggaagatcttggtccagtttcagcctactcaattcttcagtgcttcatggaaatggggcttgtttttagcaatagatgtagaatccgatttcatgcttgtgtgaccttagaaaggaattagggggcagtgtacatggaagaagtctggagaccagtgtggccctgagaacataaacccttccagaaattcatacgatcttaggggaagacaccagactatgtgccacccactcttaaggaatggggagttgtgctccatcttcttgaaagtggagaatccagccagactctgtccccaaaaaataaataaataaaataaataaagtggagaattcaaataaattatttgacattctgcagatttatcccttctcctttatttattcaaaca

SEQ ID NO: 585390 - DNA, 4001 bp, Homo sapiens
agatacagagtacggaactgattccagaaatgtttttcaagtaagataaactacacttggtgacagattaaatatgaagtctgagaatagagaagaacttgagtaaattccaaagttttgggcttgcaaaattaggagaatgtggtattcaagcaggacagctttggcagggaaaggtgatgggttcaatattggacatactgagtttgggatgcctatggataggaaatttatgtggaaataccaaaaattagctacaaaagtttgacagtaactcaaaagttccagatcagaaataaaaaattgggagagtgttaataaaacacaaatagtgtaagccaaaggagaggaagaacacagccaagaacacagagtaaaaaatagaagacggaagactgaagactggattattgggaaaaacaataatgaaatatggtgggccgaggaagaagatcccacaaaggagttgaagaatgacaggcagatgaagaacccaagagaagggtagcatctttatttaatgggcttccattgtgtcctacagaattatagttccacaatatgtgtaacggaagagatgtgactcacaaaagaagaaaaatctcttttccaaagtcacaaactactttttgatatttaaaatgatactttgtcaacttagagaatcaaaacaaactattatttcctataacttatttggataaacatactagctaacatgggaaatcacaaagtgaaatatttaaaatggtaatatagaatttaaatgtggaacaactggaaaaaaacatagattaaaataaccatgcaaaagaaagagggaatgagtaaagaactggaaacatcggttttaccattctaaaacacatatagccactccctctgccaaaaactaaatgatgacttctgattgcaaagatatctctaatgcaagttcttaacgtgaagataaaggaggggaataaatatgtatgtgcccaagtatactttccaaagaacaaagtgaacaaaaaaggggtttatatcagatgaactggaccagggctcttcactgttaaacactatcccacggtctatctaacgtaaacatcacgtatctgagtaccgactccaactcgagtatgccaaaaaggcactttcttttttcttttatttctaaccatctttactcctctcatcccatccctgaaggatgtatagaagtatcacagcctggacaagtacggctttccactctaaccacagttttaataataacacatctattattatccgagagctaccaaagcctccttttccgtcttggcccttggccctgcccctcctctctagtcttgagtctccacgggcctccggggtttttgttttgtttgttttaataacaaccacttctctagatccgcttgctccctttcttctcttctcggtcccaggaagtaaataccctttcccagctcctctcctcctaacttcccagtccccccagtgccggtcaacctcccttcctcgggaccctctcagaagccgagctctttactcattttcctaggtcttccttctcctcgcggtccctacatcctcccccatccctaatcccttcatcttccctgctttaagaaccacccgcaggcccccatccacgaacgccccttcactagctaccagacgcttcaacccagcctcacctcgcacctccacctcccccgccgtctccacgcccacttcaaagcccacctccaacccgcaggctcttcagcagagccgatgcggcgtcccgcctccttgccttccctcttaggaccaaactcccagctggggcctcggcgtctgaccgccaaagagcgggtgcctggttcctgcggaggctgccgggcgggtgccgaggttgccgagatgcgggaggtttgaacacaaggatgggacagaggcgaggatcggggctcctgggtggcagcggcggtaacctgggctccagggtaacggaggcggaggcctagactgcactacgaagagaccgcagccaatcatgatgactctacccgagctcccattggcttctgtctccagacggccctttttattggcttcagtggaactggaaggcgggacggcgagtgcgggagaaggtctccattggccgaccgctctagctgtagcggagacccccaagtagggaaattggggcaaaacgcggagcgctccaggctcctacgggctgtgcggtgccagggctcgactgctgagcgtcgtgggctccgagagggacgcgggcggagggcaaagtgggttcatgatatgaattgtaaaattggcgactgcgtaatgtaaaacacttaacaattgcttagatttcctttgggaaataacttgcttttaaattgtaaacaaattacaaacaaactgctagtgcttctggatcttcttaccgaaatggctgattcaggaggatgcggggtgagtgcactattgttcctgcctcgagatcctggctgtgaatcaccaacgagccgtgagtttggcttgaaagtgatttttaggttttggaacgggtttggggtggaatggcatctgaaatatttgcacacaagttttttttttttttttttttttttttttttttttttaaggaacgttttgaggagcatgtcagcctattgagcgctgatgtgtgacatattttctcttttagaaatggcattaattgcgggagacagggaaggtaaaaaaaaatcctctttcgtgagggctttaaactgctccgagccatctgattatcaaggtggtttaacactactctggtgttctcactattgttaatttctcactggcctttttaccaccattctgtagagaatctaatatttgaaggcaaatgcgtttaatgaatcttctaaccatgaagattggtaattcctgcttctcgctcaacctcgtttttccacctttgcactgtttcaaagctttcattttatcctgtcaatacattttacttcaagttacagactaacccacccaaacaatattgtgattaaatgtaattttctgtatgcgaaatacatctgtacaagatggcagtcatctgttagtgaaaataagatgagtaatccctaaattgcacggaattacttttcatcaattctttaatctgtctctgctgacactgttaaaatagctcactcgttattatggactctgttagaattaacatgtaaatgtatgggtggattacttataaaggaagttgctaggaagaatcagaaaacataccgtatttacgtggacaaatgtctgtcacaggagcgtcagatcaggattgctgaaggagagctgagaatgaaaccaccatttattcagcactcagaatgctccaggcagtgtaatctcattccatcttcattcatgactccagacaggtattgttattcattgtttatacttgagaaagcagattcagagaagttaaagtatctaccacaaggtacgaaagtagtaagtagtaatgccagagtacaagcctaggtctgcttccaaatttcgtggtttcggatttagtgccttcattgtgtttcacctacaggttaagaagttgttggtaagcaagaaaatatttaagacgctgggagaatccaaaaaattgtctagttgtgtgtaacatagtctcaggattcttacagtgtgcaattttattcaccccctcatattcaaaataacagtatcagtttgaccttgaaaaaagaccaaaaaatgtataaatttacagaagtaaaaactagtttattgaattaccattttaaaaggttaccccaaaatatgagaaagcagttttaaaagttttatgacattacatggttttatatattatttttgatagggctagaattttctaagataccatttgacattttatttcagtaccacacaggattctgcttttcagaaataaaggaaacaaagttatcaaaaccacatttatatttctgccacttgaaattatagttaac

SEQ ID NO: 585391 - DNA, 4001 bp, Homo sapiens
gtgcgaactcacacaaaccactcagcagaggctgctaccacctaaaggaaacaggaggacagacggtaccagacaacgagacggcctgattaagacaacacacccactcccagcctgtccccacgttttcagcagcacaaaggcagaaagaaaaacacaaagtgtcaccgtcttcaacgaccgaaaagggaaagaacatgaatctgaaattcaaatgcccgtctgtgatctcggtaagcctggagccatgcaaagaataagactttcagcaagagcctcaccaaagccaagaaacacgtccccacctgcttgttcctgtgtccaccctccagaaaggccaagggtgccccatgaaatcttagctccacaaagcctgcattgagatggcccagcccctgctttctgatgctctgatgaaggtctgaatggttacaaatagggatatctgcgtctgaagccctcgctggcaggtgctgaatgccgtctgcccacggagcgcatctgtagctaggacctggagggtacctgtctgggctcactcaagtggagcctgagtgtgtccagatcagagaaggccagggaacaaatgtgccattcacttgtgggtctgattcatttagagatgtgaaggaccaagaaatagaaaccatggaacttttttctaattaaaagacaaaactaacagcactgagaagtcttacagaaagttattttttcctgtttttgttttaagtcttcaaattccagtttcccctctggctgcctgtgtttctgggccacttcctctcatcatcaactacagtttttatgatagaaggcagattaaacttactatgaatctgtttttacaaaacaattgggaagcaaagatatttggtggatgaatccaataaatggatgtaataaaacacccccaactatgacacacccgaagccaaagagaaataaaagccgttatctgcaccaggatgccccctcatttacatgagtaagacagtcaatgcagggctggccagaggaccatgcgtcattttctttcccagcccctgggctactagagatgttaactaaggacttgggaggccaggcattgcacacttaattagactactaagtcatgccctctggcagcacaagactcctcctggtacaatttaagacctgaaaatttactgccccatatcttctccagactgtcaccagaagcagcatcccagctccttgataatgctgctttcatgattcataaatggatggggctgctcgccatattagagcttcataaaacaaatctaaatgtagactaagagggctaattccacttaagatgtgttccaaacaaactccctatgtttcaaatcagaacagcattttcagagccacagctgcaccactggagacagagaatgtggaattgagaacttggcctcctgatgcttagaaacgccggcccttcctcccagtgccagggagcttgagggtccttcaacaacaacctactgcatccccctagattgactcaggcagatcaaagtccccgatgctacatttgatgggaaagtgtccataacaagcccagggttggattttgggaggtcaattctatttcaagtattccttcactgccacaattgagcctgacaagaacatcacagaacacaatgtgactctggtacattacaggaagcactccctgaaaatgatcctattctttttctggggaagtttacctcctgatggaggctaatatcctcaggaagaataataaaaaccagagaaactcaaactcacctcatctgtttttctctcacagtccactggcaataacttcactgagaccaagaaaagaaacacagaggaaattaagtgtgggttgagaaaggaatacaaaaagagactactcacaacatttggagggagtaaagcattaccaagccaagggtggggattagaaagatgtcatctaaggaaggcacttttaaaatgcagacagcaaaatgtaagggtatccaaatcctggattaggaattacgatagctgggtccttgtcccagctgaaaatgattagctcaagtttcttgggcaactcaaccactctgaacctctgtctcctcgtctgtaaaacgggatcaaatgggccttccctgcttaactcagggagttaggcccaaacaaaacaaaatataggagttttgtaaacaatgatatgttaaacagagattaacaccgtaatgggaggggaagtccaggtaaataccagcatacattctagcgctgttgtcttaaagcatctcagcagtgagtaccagtgtgatactgtttgacatcaccagtgtagttatagtaccatgacactcccaggtctccttaatttctctagcaggtcgacaaactattcacatagttgataaatgctctcatagtggggaaatcatttgggtgtttgcacacgagtctgttaatacccttgcccacagacttgtacactcccaaacatccatctgccacaccagctaagacatactttagctttttcctgtattttggcagttcctgctaggcatgaaaggatgtggccttggctggaagctgggaacagtattagtcacattcgtgctttgtaaagagtattaaaagttggtgaactacagtggccctttatacctaaatgtataatgaaatgatctctatgtttcctttcagaaaacacacaatcctcagctattccggatacatactgtatcctgcagacctctcattggcatatctaaccatgtaacttaaatgtggccagaaggatggctgtgagcatccttgagtcgtagtctctctcttaacacactccatgagggtgctacaagcaatgataagggcctccagttgcgatcagtttaacctgtctggcaagcaaggctggtagattctcctgttgacaaagcggcggccctgtgattcaaagaagtggagagtggactttttggtgctacaaaggtgggacccccaaccagatcctatctgtgggccactgaaatctggagtgccttcaaacaggcactaaatgtgtaagccagaggtcaaaagggaagaacccaaacggatggggtgaatctgttagaggggggtgtggcttcctctccagggagaaaaccagaggttggaggagcagtgactacagcttgtgattgaaagggagacgttagaagggagggctggggcagaaaaggagaacaggagaaagtgaaggcagaaattattgcagatgcaggagccttggccctctcttcccacagctggaagaaggcaggcctggaaatgagaagacagtcagaggcagctgacaaggccggaagtgcgcggcctggcgccgacaggaacggggggtcctccggcggacacacgcgcgcccagggccctcccctgcgccggcccaggacgtactgttgtcctccgcctcctgcggcgctgagggcttgcccatcttcacccaaaggatgcccaggaagacgagcagtagccctaggctggcccagagcagaagccgagagagccagcgctccagccggcgccccacctcaggccgggccctcgccgcgccagcagggcccgctcgagtcgcccgcaggcccgggcgcgggtcgggaccgaggagggaggaaggcagccgcgccggggcgggagacgctgcccaccagcggcgggccgcgagacccgggccctgcgtggccctgtcgggcgtccgggcgtcctcgtcctcctcggagctgccccggaccgaggcgcggcgcctgagttgcgccgggcgggcaggataggcgaggccgcggctccctacccaggaagccgcggagggccggatatcaccgtaggccccaggggtcgcgtaggccgagcccgaggccggctgggagagccagggctccgcccgcggagaggccgcggcgggccgggcgcgcagcggcgcatcctcgcgtaaccgggcctcttcccgtaaccgctcctcg

SEQ ID NO: 585392 - DNA, 4001 bp, Homo sapiens
gagttttgtaaacaatgatatgttaaacagagattaacaccgtaatgggaggggaagtccaggtaaataccagcatacattctagcgctgttgtcttaaagcatctcagcagtgagtaccagtgtgatactgtttgacatcaccagtgtagttatagtaccatgacactcccaggtctccttaatttctctagcaggtcgacaaactattcacatagttgataaatgctctcatagtggggaaatcatttgggtgtttgcacacgagtctgttaatacccttgcccacagacttgtacactcccaaacatccatctgccacaccagctaagacatactttagctttttcctgtattttggcagttcctgctaggcatgaaaggatgtggccttggctggaagctgggaacagtattagtcacattcgtgctttgtaaagagtattaaaagttggtgaactacagtggccctttatacctaaatgtataatgaaatgatctctatgtttcctttcagaaaacacacaatcctcagctattccggatacatactgtatcctgcagacctctcattggcatatctaaccatgtaacttaaatgtggccagaaggatggctgtgagcatccttgagtcgtagtctctctcttaacacactccatgagggtgctacaagcaatgataagggcctccagttgcgatcagtttaacctgtctggcaagcaaggctggtagattctcctgttgacaaagcggcggccctgtgattcaaagaagtggagagtggactttttggtgctacaaaggtgggacccccaaccagatcctatctgtgggccactgaaatctggagtgccttcaaacaggcactaaatgtgtaagccagaggtcaaaagggaagaacccaaacggatggggtgaatctgttagaggggggtgtggcttcctctccagggagaaaaccagaggttggaggagcagtgactacagcttgtgattgaaagggagacgttagaagggagggctggggcagaaaaggagaacaggagaaagtgaaggcagaaattattgcagatgcaggagccttggccctctcttcccacagctggaagaaggcaggcctggaaatgagaagacagtcagaggcagctgacaaggccggaagtgcgcggcctggcgccgacaggaacggggggtcctccggcggacacacgcgcgcccagggccctcccctgcgccggcccaggacgtactgttgtcctccgcctcctgcggcgctgagggcttgcccatcttcacccaaaggatgcccaggaagacgagcagtagccctaggctggcccagagcagaagccgagagagccagcgctccagccggcgccccacctcaggccgggccctcgccgcgccagcagggcccgctcgagtcgcccgcaggcccgggcgcgggtcgggaccgaggagggaggaaggcagccgcgccggggcgggagacgctgcccaccagcggcgggccgcgagacccgggccctgcgtggccctgtcgggcgtccgggcgtcctcgtcctcctcggagctgccccggaccgaggcgcggcgcctgagttgcgccgggcgggcaggataggcgaggccgcggctccctacccaggaagccgcggagggccggatatcaccgtaggccccaggggtcgcgtaggccgagcccgaggccggctgggagagccagggctccgcccgcggagaggccgcggcgggccgggcgcgcagcggcgcatcctcgcgtaaccgggcctcttcccgtaaccgctcctcgccccgcggccgggcctcctcccgcagccgctcctcgtcgcgcagccgggcctcgccccgcaggcggcgcagcttgttgcggtagacatcccgggtggtgtcggtgatgggtcctggctggaagcccagggcctgcagctcccgccgcagttccaggtccgacaggccggccatggccaggacgccgccccccgcccgcccctggcgcgcaccgcacccggaactgctccctcccgcaggcgcggcggagcgggcggggccacgcgccatgatgggaaggtcggtcgccatgttgggaaggtctgcacttggcctttggtcggccatgatgaggcggtctgacgtggctcttagagccgccatggtgggaaggtccaagggggattaaattttttgttttgttttgttttgttttgtttttctctctctctccgctctcccacttccctttgtttgttagatcaagcggtattaatctctgagtcctccaaccctagctctgcctctggcaggtggtaagcgttcagtaaagtcagcgttgatttaatagatgaattgcttaatggtgaacgaagccactgccacgaatggagagacaggatgatttgcctctctgggcttggggactgatgtgtgatccggttttatttgggtcttagagtacactccaggcatgctccaagaccctgtcccgacttcgggcttgttaactgggcgacactgagcaccaagtaggtgcgatccctgccttaggacagacactggcccccaaggagcgccagcctggaggagacgcagcatccatggtggaggcagaggagcaaaatgcccttgggttcgaatgggcagttgaggcttctctgcggagggcctgtgtctgcgtaatgggatttttacaaggagacatgggagagagaagactccagagatacacggtcttgcagcctcactggtggtttaggttgtgggctttggagccagacagttcgatttcaaatccctactcacaactattagatgtgtgatcatattcaattaacattgttagcctatttgccagtaaacctcaatagagttgctgtgaggattagaagaggtagtttggctaaggtgcttgggacagtgcctggcacacgttcatgcgtgtttatacttaacccacatctttgcagtgtcagtgctgtgtagagcctcccacagggcaggtgatttggttacatgaaggctcttagcaggaaacccctaagggaagcaagggaatgtggcaactggaaatagaaccagtttataatcttccttccacatccctcaactcccattcccaaacatttattgccggcccaatgggttccatccatttctacccctgccattccattctccccttcccccaggcccctcctccctggaactgccccgtatctgtcccaacagcccccttgcccattccccactttattccctcccctccctgacaccctgggcaatgctatgctcctctgtctgggttttgcattcctgccacttgctccacctcaggggtattcaacactggccacaattgctgggaaaatgacagcctcggcttggtcagcttccactgttagcctccccatctcccctgacttagctgctcccatgtggtgtgatttctctcaccaagtgttgttttccttttccctgcatgtgtttgcacagaatgccatgaatttgatatagtgattgcctaacacatataccacataatagtattttatttctttctgaagcactgtttgcatgacaaatgagttggtaacatttgtgcaactccttgcagctgtgcggttcaatatataaagaatgagcctttcggcatcagtactggccccatgtattctaagagggcttgaaactaatgcttaaacaaagttatcgttacagcatttcacagagttatggtctattttataacaatggatctcagggcgatttaaaaatatggactgaactggagccacccccagtggtggcacgcaatgtgggctttgtcagcttccttgtgtttggggacactgctgccgctccacacacgtagggtcaagtggcccacagcccctcccccagaaccctgttgtcttccctgtggtgtagaacccactgtgcttggagttgtggcctttggccacccatggtcagcccttttacc

SEQ ID NO: 585393 - DNA, 4001 bp, Homo sapiens
tatgccactctttcactcaatttcacaatttcatacacccataggatctactttaagaagtaagaatgtgttttcaatctattttttgtctgccactgctaagaatgtagctgaatgcatgactttacagcattgttttaaatagagaatctcagtaaaatattctttaggggagtaccaaacctaagattaataactgttcattttactgaatattctgacaaagaatttcttcagactggggaagtaagtattctgagggattttctccatatacacaatctgcccttcggaatccactgagcttttgttcagctgctgtgttttgtagttaacttcatgctgctcttgctcacattaccagagcatctagcatgaaacacagtcttgtccttttccaaacatctgttagctggaaaaggaatgtcacatgtcatctctctccctccttccatattctttcacttcctgagaatgcgaacctatacaggagagtataaaagagcttattcagtggagttgggtcaagtggccagccaagattcacctttattacatctagtaaatacaatgctctattccaactttgagggaacttttcctcaaaagacagagaatgtctcttgctgtgagaattgtgcagtttaaaaatcatattgttcatttttctgctctcctaagagtaaacaatcaacatttggtctagactggtcttgaggagggcatggcttttaaggactttcatgggagctgtatcacctggaatcctggactaaaattgtgggagctggggaagaaagcagagttctgccatgggatcagaagtagtaagtaaaactagtccaagaagttacatagttagaaatcaaaatcccaaaaagctaatgatgtatatgctaattacctttactttctttctataagccttcctttgcagctatgaatttacttttagctaaattcattataatcacataaacatgtccaccatttgatgcctacaacagtgacatgacagtacaggataagccacagctcctcctcagggagtgccttcttcacatagccttgcccagtttcccttagggaaagtgcatttgttcttgactctatttcaaaacaactgcttgtattcactatacagatcagtgaacccattcttagatgttagctatcttctccactacatgcaaaagtggggaccaggtttgttctctatatgccactatttcatacataatgcactggtcttccactgcactcttcacatagtaggtatgcttcttgcattatattttcttaacctactaaagataactcacatcctcccaaattttaccacagcttgcctccaagtctgcacttcagtctttcagaatggtcagtcagaaatacaagagtgaaggttgggtacacacacattaagaagtgaggagaaatgttatatgttgacaactgattattttaatatatgctagaccctataagtggctatcattattcatgctgtgcatttcaaatataatttgaaaacaggtttccacctttagtcatttaatctcaaagcatatttattagaaagaggccaaagctttgagaaaaacaaagattattctctcaataacaaccaaaatagaaataaatttttttatagcatacttatgcttctgaaactcagtgcctattgaacttaaatgattattcaaaccaaatgagctttcctagatgaatattttgaattgtttagtttttattatctttataaattcactgtgtagtacagaagggcaattcttcataaacttctcctgagtggacatataacaagtataattatgctgcccttattcttactggcattcaaataattgacattttttaaaaagatttactgtcaatattttggttaaaaacattttaatgattagcttcatacctcctgcagaaggtcctcttcattattcatctcaacactttttaagttcagcgttagaaaccacaatatcctcaacaaatgcattcaacatgtatttatatgtgtacctacaacaaagactgcagatgatgaattccatagaggcttttccagaggggtctggcaggtaataaaagataaacatcagattctgatgtgtcatgcccaaggcacagtatgctggaaatgcactagaagaatcgaatgacaaatgcttgtttacgcctgactccctgcaaacaaaagacatacaaagcttaaaattgtgttggttgatttttttctccaacatacagaatttttgttacataacaattgtattctggaatgatatctattgtcagattcagatgatgaaacacttattagacgactatgctatcaaagcccacagacaaaagcacagatggaaaaatacagctataagtgacccagatttttaccaatggcaaagatccactcatttgtaattctcatttttattttcttttctaggtccctctggcctccaaattaattctggaccttcattataaaactgaaatatctttctttagcttttccaattctccgatgtcagtctgtgacaaatcccagaccatccccactgtgcacaatgaacacagaatcatctacaggctgccccatatggtcccataaacaatcctaactcagtagaggaaatagggaatgctttctcttcactagtaaagggggtttgaaatcacacttctgctgctatcaactcaacttcaagtattgttgatgaaggaggatatgcagtttcttctgaaccaaaccaaattctctctaagcattttccatgtggaagtgtatagtctccatggctaatcacttcttcctggtcttctgggcctgaggaagaccaagccaatacttacaaccactcaatcctgcctgactctcttggcccatttcaaaagccccatttcctaaagacagtgattaactattcctatttccattccattggtacttgttccatgactgactctaaagcttctgctctgtgtagcctgatctacaaccagatcttgaatttggacctagttctgatgctgatgccagcctgaaactgcatcctgaatatggctgttttggactcttgaacctccccaagaaaagggattctatctcctatcctagtatttgacttgctcttggtgctttcccccagatctctagtagggtgtttaattcccacaatgtcttgtaccagagccttacctaagtttttctcaatcctcttctgagaccacatttgcttccacttttacaactttttcttgcatgtgcttgtctccatgcaaaacaggtgccattgagctatggaaaaaaatgttttgtgaaaaatttcgtttttgtttcagaaatgttccctttcctatatcaaagaaaagaactccaagctggtttacatgttcagttacatattgggacatgttttaaaaaaatcattcctttatagtactacttacccaaattttctcctgggagttttattgttattgaatatgcaatttgattcatttcatcttcttttccttaccttattttgacaatctcttcttctcaatgtgtatccatgatttttttataatatcctttcctgaaccttgatttgcccatttttgtaaaaagtgttctaaagcttggttggacatatggtgtataacctaatttatggtattagcatgatacatattttaaaagtattaccattatttagaatcagtttttccaaaggaaaaaccaaatgtcagtaaagggcttaacaaatagattagaaaaataataaatggtcaataagtccatattaaacactttcattcacaagcatttgttcaatctgtactatatccagaaagctatcttagtcaaaatgaatatagtcattgagccatgaatgtaaatgatacaagtctttctcttaccactcttctgagacaacatatggaaagaccgttcaactcaagtacttctcctgccaaaaagttgtaatcta

SEQ ID NO: 585394 - DNA, 4001 bp, Homo sapiens
gttttattttatttattattattattattatttttagagacagggtctttccatcttgcccagtctagtctcaaactcctgagctcaagtgatgctctctcccaaagtgctgggattacaggtgtgagccgctgtgcccagcccccacattgttttaaaggaccctaggccaggtgctgtggatcacatctgaaatcccaacactttgggagactgaggcaggcaaatcacttgagcccagcagttcaagacctgcctgggcaacatgacaaaaccccgtctctacaaaaaatacaaaaaaaattagctagacatggtggtgcgcacctggagtcccagctacttgggaggctgatgtgagaggatcacctaagtccaaggaggttgaggctgcagtcagctgagatcatgccactgcactccagcctgagccaaagagtgagactctgtctcaaaaaacaaacaaacaacaacaacaacaaaaggaccctaaatagcttcctctacctcacaaaatatcactccatttgctgccttaagtataaaatcccatgatcaaggaaaaaagactttcactccacaatgaaagaggggaatttagatgaaagtttctataggcaaggtcataccctgcataatagtaacactccaaaatcagcaagagaccttagaatctgagagcagtttggagtgggagagagagaatgaggacagagttctgggcactcttaaaaagaacaaaagcccagaggtgggagatgaaggcatctagaatgtgcttgactggtgtcactactttgtgctagggttgagtcctattcccacatggccaacaatggaagcttccttctttctctctctcacagctgcaaaaactgatgtgatggcctgggaatcaggactggcaactgtgtgctcctgggcaagtcacttccccttacagatgaggttctgggctcagatgaggttctgggctcagaacctcatctgtaggatgagagggttggacagcttggtctctaaggtcttttctgcctctgccattttaagattctcaactcctcagaatcttctgcagagcactgagtaggactgggctataggagaacagctaaatttaaggcccagagccctggcagaggctgggatggtgcagctgcagctgtggccccggggtgggcccctgcctgccctcccaccatctctgcttacccgcagccagctgcatccatgcacagatcttatagactgtggccgtgttgcagatgaagaacaggctgaagcagatgatggagccaatgatgaggaacatgcccaaggccacaaagaacatggcagtcttgaaggctctagaggggatggaggagaagtctagggggccgcccttgcagatgagctcggaggacagcacgttacccacgcagtaggagaaaaggccgaagtagcctgcctgcggtgtgttgacgctgtcgccgatccagtagggctggatgaagagggccatgaccagtacggagaagcagatggtgagggtaccccacatcacgcccacggctcgcgagttccgcacatagttggtatggtagatcttggctgcctcctgggccggcagcaatttcaccatggtgagggcagcaggccctgggctggggtcccgtgggctgcaagtccgtagctttgtggatggaggcctagaagcaggtcactccccagcggggtttggggaggaggctgaggtcagggcaccaggtgaggtcccttcaaggcaaggggaagaggcttaataggacaaggacaaccttgatttggtcaaggaaagcttgccaggtgcctgtgtccgctctagccgaggctgtctccagtctcctgcctcctcccaagcccaccagggcctgctggcgccgccctgcccgtctccctcttcccggctcacggctcccgagagccccgccccctcctccgtccgcggagggcgccgtttcagcaccgcggccagcgccccggggttccgggcgaggggcggggcctgcagcagaggcggggaaggggcagagctcccactacaggcccccgccgcggggaatcggaacaccgttcaccttcctgaaccgagatgacaagaattgggaaggtggggatgtgactgacacattcctactgctcaattccagcagcaaaaacgctttccccccgcaaaagcgctgtccacatcccatcccaccccgcccctgcctggctccctagtcgccttcccagaacctccaactccaccactccggaggtcagcaaagcctttcctggttgccttctggtcaccggtttttcgtccttagcattcagtcaacgatttctaaaagcatactatgtgttaagattatgttggaggacatctaagcaaaaccacagataaaaaagacagggcccccgtcctcaaagacagtgaaatatttacatatataatatacgtatatatgtagtctatataaatatatatataaaacgcctgtatatgcagactgattgtgtgataacagaagcaactacaaagtatagcagacaacattctttatgagccttctcagacctgaacatatgtgttttgtcaaatacaatgcctttctccccttgtttctatttgtttgttacatatttccccatttaaatatatatatgttttaatatattatatatatacatatttctcctgattttataggtaaatacatggctagtgtaaagaactaggaaaattccactgggcgtggggcttacgcctgtaatcccagcactttggaaggccaaggcaggcggatcatgaggtcaggagatcgagaccatcctggctaacacagtgaaaccccgtctctactaaaaatacaaaaaaattagccgggcgtggcagcacgcgcctgttgtcccagctgctggggaggctgaggcagaagaatggtgtgaactcgggaggcggagcttgcagtgagccgagatcgcgccactgcactccagcctgggtgacagagcaagactccgtctcaaaaaaaaaaaaataataataataataacaccaacgtccggagctaaggaaagacaagacaatcttaaaaacatggactttggggttcaacaggcctggatttgaatgagctacttactaagtaaccatccatggacttaaccttccttccggagcctcagtttcgccatctattaaatgcaggaaatgcacttacgccgggcgtagtggcgggtgcctgtattcccagctactcaggaggctgagacaggagaattgcttgaaccccgggaagcagaggtggcagtgagctgagatcgcaccattgcactccagcctgggcaacaagagcaaaactccatttcaaaaaataataataataattttttttttaaagtgctcaaaggtacattagtggtctctaatcccagcactttgggaggccaggcagtccgatcacttgagctcaggaattctagactagcctgggcaacatagcaagactcccgtctctacaaaaaatacacaacttagccaggcatagccaggcatggtggtgcttgcctgtagtcgcagctacttgggaggttgaggtgggagaatcactggagcccaggaggtcgaggctgcagtgaaccatgatcacaccactgcactccagtctgggctttaacaaaaaaagagaaagtactcaaaaatgttggtgattattattattaccattgttaatctctgcagtttcccccttctgaacatactcctttacacaattggatgatgtatgtacaattttattttattttattttattttatttttattttacttttcttgagacagagtttcactcttgttgcccaagctggagtgcaatggcatgatcttggctcacagcaacctccgcctccctggttcaagcgatcctcctgtctcagcctcccaagtagctgggattacaggcatgcactgccatgcccagctagttttt

SEQ ID NO: 585395 - DNA, 4001 bp, Homo sapiens
tacaacacaatacgagcaaaggtggaaatttaccccaagtagcagaccagcacattttaaacacacaagcaagagccgcctctggccacatgtttttttgagttcagtctcttaaagagacagtatacgtagaccaatgactacacggagcacatttctaaaatgtttatcaagcatccctctattgcacgcatttctttacaaccacattaggccaacagtgttctattttattttactatgaagtcaaattattttgatctgaatctacaaaatgattacaggacaggcagcgatgaaataataaagggagctactgtgactagaggtgtctaaaataaggcaatctatacatttctttccacagcaaactgtttcgctttgttttttcaaccttaaaatgatcatgtttcttcatttttctacccattcaccagatacaggcgacaaagtatattgtataggtaataccggaaacaacaagaacactatttcgctgtagaatgaagcagggggaaatgctaataacgtcaaccttaatatatatagtgaaatttcaaatattttcttttctctttagacagaaaacccaggaaaaggcccatacacgtaccctaaacgttggactacctagtgatttcagggaagattttgtctttcaatataccgaaggacatcttatcgtacgtctattggcataactaccgatcagctcctccacatggaaaaagatgaagagggggacaaaaaagtttggcttacttggtgtacaaatacatcgactggaatatccaaggggcttccctctcggtttatcatggagatgaatccaaatcccatgcgcacattgaaccacttacagtggccagttccgcgcaaaacctgggattcctcctctgccggctccggcagcttcccgggctcttctccaccacctttgctagccccgcctgagaaggaacaggacaaaaaagtcagtctgtattcccattcaatgtgcattcaaagattaaaaaaaaaaaattgcctgcctggggttgggggggaagggtaacagaaaaaaaaaattttttttaatggtttgatttcttttctccacagaaaatacttaaaatgaaaagggttaaaaggaaagcgggggagggggaagccacactgttctatcgatcacaccaacttccacgtttctatacatacgtgtacttattcatttaactccatttttcagccacattttacattacagcatgcgatactttacttgtatattgctgatttaatactgatcccattgacaaagagaaattttcagcgaaactattctctccggcgggcacgaggaggaaagagaaatcgtgaagatggtttagagctactagttaaggcacatggggcagcactgaatccagcgttatttgcaatgtgcattcccctcccccccataactttcaattaaagttggggtggaatgggggagggggcaggtgtataaaagttttcttggaatcactaactgaaactgcgcttaatcacactcacacaattcaaacaatagccccctgaaagcttttcaagttgtgaatcagtgtgggcggtacaaaacatttttggagatctataacaataggtttgcagaaagccccactgcgtgatggggggttgggaggtaatgcccagtattggggtaaaaggggaagggggggacggtctaagaagggtgggagagggggagggggaggagaaaagaagaaagaaattcacagtaaaacaatagaaaagaaaattaaccttcggccatgttgccccacgggccctcagctccaaactcgtgagatgaaaactttccctttggaacggagtgatcttctgcatcaatctaacatcttgattttgtgcgatcacaaatttagctcgcatggtctaatgtgctttccttcttttgatttttttctctcctctctccagtttctggccccctgagcacacgtgactttgtcaattacatgctttcttgctactaatttcacctcgtatccttaaggggctggcaagaggaagagataaccaatcgccatttcatctatgctgacatcaaaataatttatgaatgaacacgaaaaactcaaacatgttatcttaaagacaatttggaacgcttctttaggataaatcagaatgctgatttcgtgcttctacttaaacacaatggagggaccttgtgaatcatagatttagaaaaaaaggcagtcatatatgtgcacacgcgtgccttacacacaagcctgactaaaatcatgggagggggtcgtttaaataaaacaaccgatgttaacgctttttttccccttaagaattcagctattccatggcagtaaacctgcttggaacgctaatttcatatttaattcaattcttagaggaaaatatataatttataaaagatctaattaaacctaattacatccccatgaaactttagataatgaaaacatacacctaggaaaaggcagaggcacataaattacctgattatgcccgaaattttttcaaatttaaaataaaatcctactagaaaaatcgttttcaccttcatatagtcaaattgtgtttaggtaaaccattttggaaaattttagagggggttggtaaggaattgtacttcacaggtttctctgccatctctttccgggggaggagatgtgattaatgacttcctaaataacagcccagttttccagcctaacatagagtgaacctcaatcagtggcgattgttccccaagagctggaggacatagggcaggagggggaggggatcgccaggcaggggaggtgaagaggagccgccaggataggcggcagcagagtcaaagaaagaggtgggagagaaaaaaagccggcgcgggcagggggtggggtggagaaagaaggacaagtgggagaaaaaaggtaaattcatatcatattgacttgtaccctgacattttaaaagtccactaccaatggctagaagagttgaataaacgaaaatgtaacaacggatgaagctcctactgtccttcctcaactgacccccagtttcaaaatgcctaccccctttacctttcaaactggttcaaacgattgattacaagatgctggcaacagtatttctgcccttatcgaatactataataaatattatagattaactaaaaagactttatttcctttaaaatataaaatatcgctattttaaaaccttaaaatgcaccaccagacttgcctaccccaccccccattttcttaaacaagcagtttaccaagaaactaactgttcagataccacttccttcgacaaagctaccgagttgaccctcccccaccatgccagcaatccccctcccagtctcttcaaacacatccacactccagcactgtttcacacaagctaaaatgtagggattatgaatcgaagagctatggaaaaagctgtatacacctatttatactccctccccatattaaacaactaaatataaatttaattggctcagattggaaaatggatgtataaaaaatagaagttattttcagctgtttttgataaaaggtttaatgaaaactaatcaatttggaaagatttttttttttgtctgttattccttttgttatttctcaggaaaaagggctactttctcattttatttattttgggaggaataatcctgtgccagctgttagggagaaaagaaaaggtgcaaaaatccaatgactttgaaagtttaacaaaagctcaaagctctgaaaaaattatttactaacaaaacatttactaggcattattttgatggtagaaattacttctattatactgattacactgacaagaaagtaatctcaatgatggcattacaggctaagcttgtgacataatatgaaatcgagaaagtaatttatattttttcatattttaataatcactttaaaaaatcaacatctggtataagaggaaaaaaatct

SEQ ID NO: 585396 - DNA, 4001 bp, Homo sapiens
ccaggatttaaagagatttgcagaaatttaaacaaaagtccttcttcctaatgcttttatccacgacaacattcaattctgattttatttgtccttgctgtaatattgccaacttaaatggcctctcttcttcatctatccaaactctaccacaattctcattttcttccaatattgttgtctattctcttaagtcctgctttatttatagtcacactttggctttcggtccataaaatacatgtttcaagaatttcagttttctcacttatcttcaggccctctttaaagccgtattttgtttggtttacatcctcttacaattcacaccacttctgtaccgtaaatgtttattaatttataactgccaagatagtctcacgtaactttcatacattacatgcttatttatttttttctaaacaaactaaatctgatggactggaaaagccagggggctctccaaatacaggactgggtggctgcagagaccacagtcaacctttagggtttcatttcctccaagagaggactaacatgttccagggtaaaggcagtgtttttatctgtgacagtgatggcagtaacaagaggatccttttcttaaattttcacaccattcttttcttttattttctttttttagtctctactgcaaaaatctactagaacatactacataggtaccagacaccaactggatctgacaattaaagtaaaaccaaacaagcctgatttccagaactggaggtttttgttttgcaatgcaaaaaggtcaaaatacgtgagaacagaaagtaactacagcctcggacgatgagaaaagagaagatttgagaaggtagagaagttatgaaaggaaataaattgaactcccaaataaaccaaagggttttaatatgaacagggaagtaatagccaggccactctgagacatttctatctacactttgctcactgaatatgcagaaataagatcgttggaaaagaaagcacctgaggtcagacaggtagtagtatatactccgatactggtaataaagagggctacagctccgccctccacaggtatctacaccaatcaaaaaaagattagaagagaatgtgacacctggaagtcagaacgagcaactcacgtcatcaaggcagaatcacacaatgggcacagaggttggagactcactagccccaagggtagggaaaatgagggaaaaaacatacagagaaggtgacaagtaaacaacgccagcgcctacttaacttgcaaagatccagcgctgccgccccacaccgtgtgacaatgttttacaggggacgaaaggccaccacatacttctcaaccccgagggtctcttccgcccccaaaccccaccggccccattgcccaagtcagcgatgacggcaagagcttccaaaaaggaccctgcaaccctagacgtcatcggtgaaatgacagcaaaagagaccggaaatcgacacccccctgcccccgccgcccgcccaagcccccaacactaaggagccctccacagtccaagctaaaagcggggcggggcgaagagggtctccggggcccggagaggccaactgcagggcctgcccctcccttcctcccccagtccaaacatggggaaaactccaagcgcctcccctaccagtagtaagaggccgaatatgcaccagccgatcaccagctccgccgaggccgcgccagaagtcgccatcttcgcttccggtccagaccaacctgagcgcccggggtggggaaaggggagggggaaaggggagagagcgcgagatatactgcacccgcgcaccctaaaggttaaaggggcggagggggaggagcaagtggttgccaaggagactggacccactagcgtcccctggcggcgagccgagcgggggcggggcagcaaggactgctcaggggcggggcgcgtgcggacgcagtgacatcaccacgctgccctcgctggcttccctgcaagctgagatgtgggagggctgcagagcagggtgttggctcatagctgggcaacctattgagatatttgactcagcctaagttgatagactagaacagcaagggaactccacaaagaatgggctaggtggacctggagatccaagtcaattttagaggtttatacttcttcaccaaaaggaagtttggccctcgtgtacaaggtggaatgtgtgtgattagcagaactccttaccaggttgcaagaatggctgatgtcaggcctctgagcccaagctaagccatcatatccccagtgaccttcacgtatacatccagctggcctgaagcaactgaagatccacagaagtgaaaatagcttagctgatgacattccaccattgtgatttgtttctgccccaccctaactgatcaatgttctttataatctcccccacccttaagaagtttctttgtaattctccccacccttgagaatgtactttgtgagatctaccccctacccccaaaacattgctcttcactccacctcctatccgaaaaactgtaagaaccaatgataatcccaccaccctttgccgactctcttttcggactcagcccgcctgcacccatgtgaaataaacagccatgttgctcacacaaagcctgtttggtggtctcttcacacggacgcatgagacagctgactctgaataaaagttgactagctgcccaaatcactctaatttactggcactggtgcccagccgggataactggttggctggacatgaacttatcacatgatgttatagcctttctattcagatgtatgcatgcctgtgaatttccatgatagctttgtatgtaaaggtatatgcatcagcaaacaaaacacactgccataggcccacaatgaagaagaaggaggaaactcttgggatggcttacctgagtccacagggaggaaactcttgggatggcttacctgagtccacaggggtgtgagtgcatgtttcaccactgtgatgtagtcaagaaacaactctgagaaaaaataccatcatctttttccaatgtattatgtggtgatgagttatgctctacctataatctacttccggctggaagcctgagggaaaaaataggatggtccttcctgcctggacagaataagaagggaataggggagaatacagttttaacttgaactggtaccatcataagctggctttaagccctctagacctgcaaatgtttgaatttcactctttcttcctaataattcatatccctggagacctctgtcatagcttccttaaagtgaagagaggtatcgcttccaggttgatatctctattccagattgtatagagcacccttgacataagtaactacttcttagaaaaagattctgtttacatttcaaaaggaatcatgccaaaagggaccagatgttcacctaatcaatagagactgcacccaaccagataacgacataaccaggcacactcttttattattattattattattattattattattattatactttaagttctagggtacatgtgcacaacgtgcagatttgttacatatgcatacatgtgccatgttgaggtgctgcacccattaactagtcttacatcaggtatatctcctaatgctatccctccccactttcccccaccctacaacagggcccagtgtgtgatgttccccttcctgtgtccaagtgttctcattgttcaattcccacctatgagtgagaacatgtggtgtttggttttctgtccttgcaatagtttgctgagaatgatgttttccagcttcatccatgtccctacaaagaacatgaactcatccttttttatggctgcatagtattccatggtgtatatgtgccacattttcttaatccagtctatcactgatggacatttcagttggttccaagtatttgctattgcaggcacactctttactatcagtcaacaccagaggactctgaggctataaaaagagtaga

SEQ ID NO: 585397 - DNA, 4001 bp, Homo sapiens
ctactaaaaatagaaaaaattagctgtgtgtggtggtgggtgcctgtaatcccagctacttgggaggctgaggcaggagaatcacttgaacccgggagggagaggttacagtgagctgagatcgtgccactgcactccagcctgggcaacaagagcaaaactctgtctccaaaaaataataaaaagccacttgtaccccaaaagctattgaaacataaataaataataaaataaaatacagatatactaatttttgaaaaaggttctcccacctggatgacggcagccatgatctttctgcctgtggcctcagcatccagtcctgccatgagagtcatgtctcccaactcagatgggctcaccccaccctccctcttggtacctgcctccactgtcttacccatcaagccccactctgcagtgtggcatccgtagtgacagtgtggcccttgctcacttccgccagcctcacctcctgtcccctgctacatcactctgctcaggcttcccaagcagacccttctggtgcgtgtgacctgggagtcctgtgagggatgctattgatgtggccatgttgtggtgaccacctcagggacaatcagggtttaacaagggccctcgggcactgagcaactaagctttcctgaaaggagtccaagagaggtctcatgtaggcaaccttggaactcaatgagaagcatacaaagaaaaaaaaagtatgaacaaatagctgtctcttctgacacctggcaggtggcggccctgatttctaactctggctacctggtcacttgatccctaccaacagcaccactaacagctcccacacagtaaacacttaccgtaccccaggcactctgttaggccatcttcatgcaccattttctttaacccttacgacaccttggtcaccgatgaggaaactcaggtccccaaacaacaacgtgggcaaagtcacacagatggtaagtggcggaggggcttccaaacccaggtctgcctgactctaaggcaatgcccttaacctccctgctacgctgacgtgtcgtggctttccctctaccttcttgagttcacacttcctcagcatccatccagttatcccatttgcctgtcttgagtgattacatagttttctgacactgaggatcacagacggaaagatcatggactgcctccaagccccggcttccagctcctccctctcacctctcatgcacaactttgtctgtgattaagctgagtctcccgcttctccactccgtggggacctcccacaagcatttgacagtcagccaacatttatgccttcctgcaagggaagcagaagtcacgaatgaggcacttgtacagtgtgggtcctacctagagctgttgcaaaggcaggaagagaagggcatgctacctaatgagagagaagaacaccagacacttcatcgtgtgtgagcgtccagtcccttacctagaggctattttctgggggggaaaagggttctgctcctaatcaaataatgctctccacatttcataatagggagccatgatcatccactatttccatgggcaacactgcagaggaaggcaaagggctctcattaattaaactaatgaattcatctgcaggagacaggaagagtaaaccacggaaacagaattgactaattcttcttccgttaagatgcatctaccctgagccagaattccagaactggttcccctcctcatccatgatgaagacgctgcggctcatgtggtcacaaaggcttggtgtttcctatgtggagataccattgctgttctacctttaatcaacaaaacaaaacaaaacaaaaacgagaaagagaaatggtagagggagggaggaaaatgctgtctgttccttaatcaccaatcaccaacctggagtggtcactgacaccttgtccagtgtggcaggggggtccctggggtccatggtcctggggtccattcagagcccccacccagaagaggacaagccagtcttcagctacacaggtaaaaaaacacttcacacatggattgaacttcttatctcagacagtcctgaccagggacggcatcagagtaaaggctttggtctcacgcagcaaccctgtggccagtccccgcagtgtggcaggcctgccactgtgcgaccgaggccgtcatgcatgaagcacatctggggctttatggctcaacacctgagcctcctggaaggccttggccgcctcactgaagccccagcgtaccggctctgcaaggccctggggttaaaatagcaaaaatgccatctggcaagaggctggctttgttcagactgtgtgctgcgttgtcgctggggtggtggggacattttccaagccaccattagaatatgagctgtcacctgggcgagccccactcccccatgcccccagcccgctcgtcagcatccacgcaatcatggcaggagcccctgtggcagctgagccaccttgggttttcctcaattccatctcactgacttggtgatgacagccccaaagcaggcaggacaaatcccctctttcttcctagaaaagtacctgaaataacacgctcattgttagactccaggagttggtgctgaggaagggtccttggggctgggacacggagaacagccaccggtcactgtagacccttttgtcctggctgcctttcccctctattggcacatgttccttttccatcaaaaatttagttacaattatttttttaaaataagaagaccagaaagaacacacagggctgactgccttttgtaggacaaaactcgaacagggaaatttaacttgcgtgtaacatgcacacccagacgaccttatttcaatcatacccaattttaaaatccaggaaccggccacagtaaggaaaggcaggcatgtttcaggctgtccagcagctgggcagaaaaacggagacccactgggccaaacagtgagaggctccaattgagccatcctagttcaggtctccctagtgacccccctctgtgcggggaggtaagtgcgtctcttgatatttttagttcactgtaaagacatggtttttgccctccaggaatcagctagctatgcatgagcggaaaccctgcaggtgccgaacgtaactgattggagtggggaggaggggaaggacaaagagtgacagcttcaggtttggagagtagttgagtgatattagaagcaaaaagcatctctgatttggacagcagaggtgtgcacagttctgctgtggtttcaatcttactataggccccagtcaacaggacagcacaaatgctctttttttgaccggacattcggctggctcagagcaagtagcggggtagagtcacttagatttcagcagcaaagctgtgcggggaggcaagatgctgcctgggctgcctccccggcctcagcatcatgcctaggtggaggaagacgccaaggcaggtttcttgagcccagtggaaagctgcttgtgctgcccccagctccctcccaacaaaaccaaaggccattcatgctaaaagggtcacttagtccaaaccttctggtcacaacagaggaaggtgctctgctgccctcagcacaccaaggggggacacccctaaagaaagcactagaaggtggggtgcagtggctcatgcctgtaatctcagcattttgggaggccgaggtgggtgaatctcttgaacccaggagttcgagaccagcctgggcaacatgacgaaaccccatctctacaaaaaatgcaaaaaactagctgggcatgtgtctgtagtcccagctaccagctaccggggaagctgaggtgggaggatcacctgagcccaggagctcgaggctgcagtgagctgtgattacaccattgcactccagcctgggtgacacagtgagaccctatctcaaaaagaatttttttaaagcaagcaaggactagaagctgcactgctgccagcacccaagcttcaccccacggggcccctcctt

SEQ ID NO: 585398 - DNA, 4001 bp, Homo sapiens
gaaggccttccctgatacttctccttcagtacaaactacttttgaccttaagctgttatttcaggactctcatctgactaaatgaaactattttatttgcatactaatttattgtcagtctcttatatcgggaatataagatctctgactataaagctcttgtaccttttgttgatagatgcatcctgacctcctatcacagggtgtggctaaaatagggacttaaaataggtattcaaaacctgaatacctatttctgaatacctgaaacatgtccatttagaagggtactttcctgtgtccctacatcatgttggaggttgtaaacacaaatgctacagggctcagatgggtactaaagacaaagaaaaactagatattacttgaactgaggtaaaggaggcagatgctttccagcttgaaccattgttgccaggctacaatgcacatctaacgtagtcagatcttcccgttaattcatgggatgccacattgtttttattctttcaattttagctgttagcaaccaatttgaaaaaaaaaaaagtagcatgtgaatcaccagttgcaagctctgttcatacaaataagacaattcgacattaattaaaaggagaaactgggaaaagatattgagcagactgtacagtagtgtttgtaatggtgaaaaatgggaaacaacctaaacatccatcactatgggaattcccaaataatttgtgacaaatctatttgataaagtctagctatatttatcaatgtggatagctctcaaaaacacagaatttggtgaaaaaatcaagttgcagatcaatacacaaaatataatagcattcatgtaaaacttcaaatgccccaaaccattctacatattgtttataatacatagtaatagtttaaatatagaaacctagattggcaagatacatatcaaattcatgatcctggttgcctctctgagggtggtagtagaatgggactgagaatagggaacaccttctttatctgtaatgctccatttctttcattcataaatctgttcgttctggatagtgggtgcgttgtttattctgtgctttttttttttaacatttcaatagttttgttttttttttttaaatggcgggtggcggaagaacatcctatcctagaagccaagagactggggttgtctttgctctgccttttctggcatggatacaatctctagatatggtttccccattagctaatgcggggggtgctatgtggtgttcctccagagtcccttcaatctaaggacctgtgaatctaaaaccttcccacctcccactccaacaccgggaaggctacccagaccaggcaatgaaacgtgcatttcttccctcatttaagatagatctctttctctcagcctgcaattccttctccagaggctttaagtatagtggaagtagaactatctttgacgacagagagacacctgcatcaattagcctttctgagcctcaaattccccatttgtaaaacagagagtataacacctacccataaaattgtagagaggtttagatacaccgttatgtgtagggcccgaacagagtagctattaatagtggtaacagactctcaattaggggctcaacatcatggtcgctgaacagaatcacggtcgctgaacagaatcacactcttcacgccgccttggagccaaaattagtttagccgcgagaagtccgggcaaccaatcggaaacaaccaaggaacagttgcatggcgacactctggttccgccttcgggcatgctcgaacagcattctgggaattgtagttcggggggggaatctaacactcaccgaggggcggagtagcttccggaaagggtactgcatttcccgtttctacctccactgcacccgcttattgcgtcttgctcctgggtcacagagcctaaaacgacacacccaacacgcccgccggagttacagctaaaggaaggacaggggaagcaatgaaatgccgagggcggagccaagagcgacactgggggagcaggaaaaggcggggcttccgcttggggcatggaggctgtacctcttacgtcacttccgtaaacaaacggagctgcggaggagcgggtcccgggatgtgaccggggctctgcttgtggctgcggcggtggcttctgaggctgtcgggtctttgcgggttgcggaagggggccccaatacccttcttcttcaggtatgtagtggaagcaaaggaacctccgcaacctgcccctttaggcccttcccaccactctggtcactgctgggtactgggcggtgaagggtcatcgcttcggtagattggggaaggggaatgaggtgatgtcaagagggatgcccagtggtactgcttggaggcaagacctggcacttaaaaccactgtgtgaataagtaactatgagcagtttacttattatgccttctctaaaacattctttgctgtttgatatacaggaagggtttcagtgctcttgtgacagatgtaattttccaaaaacgaggaaatcgcgagtgctggctccgcagaatattgtggtttagaccaccactggtttatttgcattgctttacttcctagatttttttttcttgtaccaccaagtgtgtattagcatcgttaaatttcaggccagcgtgtttatgcgtatcatacatttttacagatccttgcctcttcagagaactaatcgtctctattcagtcatctttcaaactctcatttaatttgtgttgcatgttgaaacaacaccagaattattgttctgttacaaaaaatgcttcttaaaagaaaaattgttagccaaggtttaagtggattgacacccagtggtatctgggattagagactgggcattggagcctttcccagaaagcctcttctttggcagtattgtagctccagttgtaattgtctagcgtcagccaatttaagctcagtggtttaaattccagtgccagtggcactaagtccaggcaaaaggaaaaagaaaaatttattgaattcatcaaataattattttaagcgacagcaatgggtttgaatctttttgaatggtcatggcatgcctaaattaaacacagcatgccaaaaacggcctaatgtttctagaaggcaatttacaacctgatgaggtagagatagccatataaattcatcttatgatatatgaaataatgaagttaagaaaaatttaacactatgcacaaataaagtatggaaggggtttttttgttttgttttgttttgttttgttttgtttttgagacggagtctcgctctgtcgcagtggcaccatctcggctcagggcaagctccgcctcccgggttcatgccattgtcctgcctcagcctcctgagtagctgggactacaggcgcccgccaccactcccggctaattttttgtatttttagtagagacggggtttcaccgtgttagccaggatggtctcgatctcctgacctcgtgatccgcccgccttggccttccaaagtgctgggattacaggcgtgagcccggccggaagggtattttttaaatagatggatgttagaaaatagagcggattaatagataaagtaaggggattgtgtagggataactaggaggccttacacgtattccgcatggaagggccatctgtaacttcacattgttaacttttttgatatgggcaaaactaaatatatatcataaaattcacgtttgtttggaaatggttagagaaagtatattcaaaataggcaacgaacaagtttgattttctagaacttcacttatcaccaagctagaatcattattagccctagctagaaactgagtttctgtttagtagttgaagtaaggcttctagttgatttttaaaatgctagtaaaatccctatgacaattatacatctgtttgaatctacttggttcttcttaagcatacattttggaagaaagacctaaaggccacctgaagcttgaat

SEQ ID NO: 585399 - DNA, 4001 bp, Homo sapiens
cgtaagggagaaggtcatgtgaagacagaggtagagactagggtgagtcaaggaatgccaaggattgccaagggttgccagcaactaccaggagctgaaagaggcaaggaactatcacctctagaaccttcagagaaagcacggtcctgctgacacctggattttggatttgtggctccagactgtgagagaataaatttctgtcattgtgagacacagtttgtggtactttgttttgataatcctaggaatcgaatacaagtaagaagtatttcaatcataatgttatttttcttagaaaactgagtatctgctgcttcctgagaatcgttattttaataataattttcacaatttccaacctccactctcctcaagcctcggaatccctccctcccaggcgtagtctcctcttactcccaggaggagctcctctgcgcgccactctccgccgcctccccagggctcacatctctcccctcctccttcctccgcacagtggaggacagtgttgccccccttctctagggccgctgcctcccacctcagcagcatccctgctccttcatggatatcccactcctctccgctggactcttgacactgaaatgtgcacacgtccctctcattgtgaaacttcctcacacccttccccaggttccactgtgtggctctcctccccctcactgtccaatctcccaagatgttatctacaatctccatttctatttcttcacctcccactcttcaacccattcccatctggcccttggctccatcgagccacccaaaccaccctcactaagaccaacaatgaccactgctctacatgcaacaaactttctttcatcatcttacgtaatctctcaggagcatctgatataatttagtgcttcctgattcttgactcactctcttctccgggcatctgggactccacgttctccctgattttgcctagtttccggtcattctgtctgacactgtgaagtgtatttatttttctctaccaagtccttaaatgatggccactctcaagccgcctcctaggacctcctcttttcctcctctgttccttccctaggaggtggcagacattttcatagctgagattaccacctttagaccatttgctccccagtttatgcctccaatccagaccccctagagctccggacccgcacatccaattacctatttggcaactgctcctgggcatctcaaagccccctcaattttaacaatgatcaaatcattaaatcttcccccgcaaacccaggctatctccagccgattttactaaatagcaccaccacccatccacttcctctagcatgaatcattcacgacatctctttctgcctcgccctacttgtccaatctatcaccaagttctgttagttttacttcctgtctctcaaatacatccacttctgatataggaggtgggtcagggaagtgctgagtagagaagggtgagggttccacccttgggcctatgccctcagacctaagggagaacaggtactcctgcttttgtgcccgaatgttgcattttccaagaccactctggcccaccatcctgtgcccatataaacctgagaccttagcgggcacacacgcaagaagctgaatgttgagaggaacagaggaacagagcagcagagagaggcagaaagcagagcagcacaacagagaaggagggaagaggcctctgaacgtccagaggagttctgccgaaaacagctgaacttcagaagattatctcccccacccctccacctctagcttcccatccatctcactgagagccacctccaccactcaataaaaccttgcattcatccttcaagcctgcgtgtgatccgattcttccgggacactgggcaagagctcgggatacagaaggctgtcgcactggccgtctgcccttgtgataaggcagagggtccattgagctgattagcactcaagccatctgcagacagcaaagctgaaagggctttgtaacacgggttgcaggcacccaccgctagacactaagtggcgctgagagcacaaagcacttgccctggcctctgcacctgcctgtctgcatgctcctccttggggtttgagcggcagggccatgaaacaggcgagccacatccctgtcacacattctacgaggggaaatcagggaactctcccgtttcacttcttcccatctccactacccactaccctagtccaagctattatatttcatgaggactagtctaggagcttctaaactggcctagcctcttaaatggtctatccatgactcctctggcctgggctttccctcctctccattttactcactgctggctggggaacttttacaaatgcaattctgattgtgtcattcccccttcccccttttctatccctaagaggcttcccatgggccacagaataaagcaaaactccttaacagggccatacaatctggcccatgcctatccctctagtccagtgtttttcagctgagagtgattttgccctccagaggacatttggccatgtctggagatacttctggttgtcatgacttagtgggaggtactgctggcatctgggtagaggccagggatgctgttaaatatcctgtaatggacaggagagcttctcacagcaaagaattatcaggccccaaaaatcaatcgtgccaaggctgagaaactcagagctaagttccattgtgcatcaccttccacctcgtgtctgtgccccaaccactcctgtcttttggtttcttataggtgccatgatccctctggccacaggtcctttgcacaggctgtccccactctgtggaaaggtctccctctcctttttacctaattaaagacttttcattttccaacctcagctcaatcgtcacttccttaaaaccctcctgccccagcctccctatagtaccaaggagctctcagtctctcttttgaggaacttgatgtccctgttttacattcatttgtgtgatttttgaccaatatttatctcacccactggattacaaagtactgtaagggtaaggaacatgtctatttttgttcatcattttattctcattgcctagcacagggcctaacacatagtaggtgcttagaaaatatctgttaaataaaagaatgtatgaatggtttttatatttgcgcatataggtttctttgagtctatgatttgtaatctctacttttaacatatgcttttaacatatgcctgtgcttttaacatatgcccatcaaaaatcctgtgttttgccttcatagattctgatctcatgtcaccacagcctaatacatacattctatatggggggataatgcccaggtggaaagtggttcttggaggacaaaaaaaatcttattctttttatatatgaagcacagatacacacattgcacataagcaaatctatggcatatctctggtgttaatatttctttgtagggggagagtaggggaaaaaaaaaagttgaaaaaggttatttgttggggaagccataatggaaaggaggttaaaaaacactggcctagatatctatcatctctctctctctctctctctctcctctctctctctttcctatctatagatctatctatctattcttattattgtaaaatacacataacataaaatttaccatcttattttttcatgtacaatttagtgacattaagtacattcatgttgttgtgcaactatcaccacccatctccagaattattttcatcttgcaaaactgaaaatctgtacccacccaacgagaattccccatttttccatcctctgatcccctggcaaccaccgttctactttctgtctctatgaatttgactactctaggtgtctcatgtaatgtccttttgtgactggcctattttacttagcataatcccatcgagattcatacatgttacagcatgtgtcagaatttccttccggtttcaggctgaattatatcccg

SEQ ID NO: 585400 - DNA, 4001 bp, Homo sapiens
taatggaggatcactgtcaccgcctgtcgaaaattttcgtttccccagtgtctcagtaaggcccaatctaaccaagggttcttctccttgtttggtggagagagttactgtcctcaccacagtcctgacattttctttttcaggacctggaacaggctcagggtggagtaaaagactggaaactcctgaagaaccctcaccttgctcctcagatttttccttcattttctttgacttaatttcctcaagagtttttattccaaaatgcaaacattcaccttgctttatattgactgcaggtttccggacagaagtcactcgtaatccattgtgaacttcaggagttggttgcagggtaggtgttttggtttcatcaccttcctcagaaaactgatcatcatcatcttcatcatcatctgcagcattaattacaactggtggatgcttggggctaggaacattttcggaactttctactttcataacgctccgcagctgaggggaaggattggactggacagacaatttgttctgctgaactgaaagttggctagccttcacttcctcttctggtgactcaggcacagtgggcaacacacttttgctcggaggtaggaaaaggccatcaacatatcgtcctctattgtgatggaaagcgcagtttaatttttgacatcctgttggctgattttcccaataacaaggaatttcactgcgttttttatcaatctccatgtgccgaaacctgcacacccgtcgaaaacagcgcccttcttgccataatgtgcaaacagtttcattgcctagtgcagcttcacagtgacggaatgggcagctgtcacctttggtacatgtagaatagaaaaaaaaatagcagtcttctccttgattaggcatgctgggtagattcttagatcagaagtggcttcttgaaacaagccactgcttcctcaaagcaaggaccaggctccaagtcctcgtgaaatgggtttaatcttccaaatgacaacttgatcacagaaattgtctttaaactgtaatcattagctgattgctctcaacaggaacgtctgtgtcttcactgagttccaatctattacgcctgtaggtcgaaccaacactcaatccatgaattaataataatgaagcagaaaaaattttcctcctcacattgccaagaaaacctctcagccacaattcaaacacagcatgtgtttttaaaacatctcccaactactgggagattaagtccattcaaataacctttgtcagactggagacagctagggttagttatctcctcaaaaacaaaacaaaaaaaagagttcatttaaagatgaacttgagagtcaaaggatcatgaaaaaaaatccatcttccatagctgaacaatataatctgaaaaacaaaaaaaatcagtttttcagtaagatccaatttctggtcttcaagatttcttcacacttaatactagtcaattttccaggaattttttgggcagggaatatccccaaatcctaaaaagcatcactatctctagttccacagcctccttctcaaggtccagaaccttgagatggcctggaagatgtcaacagtataggccttccccacaggaatccgcaccaattatgggagtttaggggtgttcgtcattacggtttcaccaatcctacaaggagtacggaagtgtccctgttgctcttgactcccacgctgagggccaggggtgggagtgtaatgagggtggggaatgggtgtaggataccggaataaggtcggtggctttctgtatgtggagtttgagacaagctccaaagtagtgggacccgaaccgatgacactatccccgactcccgcttgctgccacgtctttcttctcgcttggccgctgccgtccgtcgtcctcccagcagcagcagcactagcagaaaaccaagactgccagcgtcaaagatggcgcccggctacaggctgcgctctaaggcccggccggtaaaagtgccagcacgacgcagggcgcgagggttctggaaggtgtagttcctctatgacgcgatgcctaagatctaatttcttatatctttggtagagacggggtttcaccgtgttagccaggatggtctcgatctcctgacctcgtgatctgcccgcctcggcctcccaaagtgctgggattacaggcatgagttaccacgcccagcccaaaatctagactttcaataaaatatttacagtgtctaacatcctaacaaaaattatttaaaatgcaaagcatcaggaaagactagaaccaccaaactaagttggtagcagaggggaagccactaaataagccgaatactcgaaagacaggcattgtactcatcagtcattcctgagggtgggaccatggtaaagctgaaaatcaaagaattggttgaaagctttatgagcacacagttaaactcctgaattctctcttttatctgtgcgaacagcctgttccattcttgagcaatacacagagcccagggatgtggtgcaatactacagaggagaaattaagtaaaaatctactcccaaaacaaaggtaacaaggtatttttccctattctgctctaaaaatgtgggtggtcaggccacttcccctgactgtcactgagtggatgtaggtaaaagaatacagactctgagagaattagagagttcttaaacaaatcagccaggtctctttgatcacagtgcaataaagtcactagaaaaccactcacaatgaatacatggaatttcaaaccatattttttggtgatttatttttcaatataagtggagagccaagcataaccatgtaagttaggaaattctctaacttcacagccagagaccaaagtcagttggaaggtggggagaaaattcagaggaaatacaaagaagagatgcatgttaaacttttgaaaaaaactccaaaacttaagactactgccctcaaagtaataagaaaaaggtagaaaaaaatagttttcagatctacaatatgtgaacatttttagttctaagaggtctaacctaaaaataatatacttcgcttaaaataggaagtcaagtaaggaaaagatgaggaatttaggaaactgaggatccaaaccagaagacaggcggtaaagcctcccaggatgaaggtgaagagtcatcccagaaaacactatgaagtgagcctgtggatctacccattcagaagaggcatttctaaggacaaaaagactgaggctgagagaatatccaatgtattttgcatattgagggacatggggaagtaatgatgactggatgcttagaataagtaaacaaaactaaaaatatagtgattaaaaactgccaggaaaacaaaaatgttctgtaaaagtaaatgcatatgacctctttcagctacaaatgatatcactaaacacataattatataaaatgaatgttaatttattacaaaattaacctaattttatattgggagaatgatataagggcttggtgtgtttatctgtgtgtctgtgtgtgtgtgttttggggtaaggagcagtgtaagaaatgtaaatacttctcttccataggatgacatcaatgaataatgtttaaatgtgcttttttattaagtaataaatgtaaaatattttatttggaaatattgagataaatgaaaacacaaaaatagttaaacatcttatataggtggcaggatgagttagaaatggaaacgcactgtaatatttgaccctcagaagacactatagttattctataagaaatatttgcattattataggaatatttacatagtatttgatgaaaatataaattaaaataaaccagaatattaaaacttggaaataaatttaaaaccaaaacgcctggcatttcagaaattttggactacttccaatgcatcagaagcgacactttcctaagaacatcccaatgagctttcaaacaatggccattagaaagcaatagactgccaagttgtt

SEQ ID NO: 585401 - DNA, 4001 bp, Homo sapiens
tgaatatgaaaccctctcaggctgggttgctggatgattctgctcacacttacaacaggacaaggggaaccataaggtctccaagtggatctcttatttccacacacacatctcctgccctccttgtgtgatagcagccctgcctcctcctcttctcacctgcttgtatctggacacatactattcaaacatccctgggggcagccataatgtatatttccatggactctcatttaaatgtctccttgccagggtgccccctttgggaaaccaggacctcctcccctacagagcccagatattggagatgagaagtgcaaaatcaccctgaaggtgaatataagggtttagatatggagccacacctgcttctacttcttggtttttggacccacgtattcttccttctgtaaacacagcactatagagacatctttgattcaatacatgcaccacatcctgaaagatggcacccattcctcagagggtttcatccaagctggcactaagttgtgtctgtagagacctgtccatgactctgtgtggctggcagcccctgggaggtgcaggtggtgataagaccagggggtgccatggtcatggaccacgcttcatcccctttcctctgaggtgtgtcccgcgggcagataatgtactgaaattctgagccagtggctcaggaatgccaatagtgatactggctgagggtctaagagtagagaggaaaaccacaccacatctaataggtgcctatccctgtgaggatgaacctccgccccccgggccgcctcccacttgagctgggtgatctgagccgccgtgtctgcggctgtcaaggagcacaggtcctcgttcaggacgatgtaatccttgccatcgtaagcaagctggtgatacccgcggagtaggcgcccgtccgaccccacgtcgcagacagacatcctctagatgggtgtgagaccctggccccgcccccgcggccagccccgcccaccgagccccgccctcgccaggaccaacctgcggggattttggctgaaaatgaaaccgggtaacggctcctgggcctctcccgggtcaagggtctccaggtcccgctgcctcggcgtggatctcggacccagagactcggggagacccgggcggtccgtgggggatgtggaggggtagtgacctgcgcccccggccggtgtcactcacaggcctcactctggttgtagtagccgctcagggtccgcaggttcactcggtaaaactgtgctttggccttggcggtccctgtctcctcttcccaatattccggcccctcctgctccatccacggcgcccgcggctccatcctgggactcgtggcgtcgctgtcgagccgcacgcactgcgtgtcgtccacgtcgcccacggagaggaagcggggatccgcgcggccgggccgggacatggtggtgtggaaatacctcaaggagtggaagcctgggagcaaggagggggctgagaccctcccgaccctcctcccggcaccgcaaccgggttcctgcgcccccgccgggcaggcccctagctactccccacagacgccgtttccctcccgaccccgcactcacctgcccaggtctgggtcaggaccagggcccccgagagcagcagaagcagggttcggggcgccatgacaccatcctcggcgactgggaagaatcggagtcccggtgggtgcgtgggaactttagaaccgggaccgcggctacattgattggcttctctagaaacccgacactcaatgggagtgagaactggggcagcccggtgagtacccaggaagaaggacccgacacaggttgggagagggagaagagaaaccctgcaaagatggggaatgcccagcgctgggcctccccaatccatacaccgcctttggggcctgagatcctgagagccacgcctgaggccctgggacttcgccctgaccccgctacttctgtgccaagcgctctgtctcaatgtttccctgagtcttggcccaggagctgtctgagaaaccagggagaaaccctcggaatgggccccgtccctctctcttcactttgcatcacggaatccccgtcccagaactggactccctgcctcctactccttacctgtccccgtggactcttctagaagaaaaatcaccccagggagcttgttgccagagagtgagcttgccctgggaatggaggtgtagagacagggttttttgttgttgttgtttgtttgttttttaaatctggaaaagttgtgcctgagtgcatgagatagaatagagaccagtttgctttttgtttattaactacagtgggtagcagaatcttggtaactcctaatgatcaggaatctaatcggccaaaaatgtgactttggtcccttgacatataaatgtgtctaaaagcattacaacaggaatcacaaagctcctaagtttcactttcccagacaatgtatctgtgactcccgcttgtagtattttaaatttaccttcattccatagccctgagtttctgtgtgagtccaggacatctcctaatacaaggtagccactgtgttactatatgttgtaaccaggagccagtacggactttattcatctcacagtggcaagcactcaatgcagtcacaatgcccctcaccagtgctcatgcactgcctgtttttaggaagtatccacttctaagtgttgtgtatattttatatgaacacttagtattttttaaacctgattaacataaaaaaattagtttttaggcagacccacataaggtattaaaggccaactgcaaagatcaccctgcaaggctctgtagattgatgtattaaaatatataaaacaatgtgtttaaacctgagttctgctgctttcgaattctttccctctgctccatttcctcacctcctgcatctccagcccttccctccattcctctcatgcctcaggccctcctctccccttagtccccaccaccttgtcactccttatttgtgacactagcactgtcccattacctgctacgtgactgttctctgcacagtggtcctgctcctgtgagtcagagtgtgtcatttctccacctaaaacattccactggctccaccttggtcttgtgaagcttctggaatgtcaggcacgtaagcatatgagggcacacctggttcattgtagggattaaattaatttttcttgactgaatgaatgaaatatgagtctattaaattgcatcacagaaaattataaaatgtaaaatactgaaaaagttaagaaatattttattttatgtaattagtgtgcatatcaattcatcaattcattcgtgcactaccacgactggcaaaacaacacccatttatctgcttatacttccttggtcagaaatctgggcaagatgtggatagaatccctgttctgggcttccaaaagctgtgttttcattttgaatcctccttcaggcttatacagaggtggcagaatgcagtttctggcagttgtaagactgaggtttctgttccttgctggctgtcaatacagagaataggcagggttgtgctcaattcctggtgcctaacagtgttctttcctacacagcctcttcattttcaaagcccacggtagaggaaacccctcatgctgaatccctctcacactgcaaatctctatgctcagaaagaacacagacctttcaaggactcaccttattaggacagtcaaagcaggataaacccagcctaaagtcaactaattgaggcccttagttatatctgctaaatcccttcacagcagcatctacactagagttgcttgaataactgggggaaagtgaatgaccgggaggtggctgttgggggccatcaaagaatcagcccagcaagggttggatcttccttttgtgtttaatttggacacagttggaaattgaagttcaagtaaagtgatcattgtgaatggtaataaaatgcatcctcttcagccatggaca

SEQ ID NO: 585402 - DNA, 4001 bp, Homo sapiens
atatagagtcttataaaatatttgagagtgcaatgtcaatagatgctgggaagtggtgaaagccatttcccccctcagctgctccacattgcctttatgtctccttactccttccctcacccctagaccttcatctttcctgattagtcttgtttcctcccctcttctttcattctctttcttttggataaaataaaatcataaaagtagctcatatttgctggtaacttccatgaccagaccctctgccaagtgctgcacatccatagcctccctcaagctttccaacaggcagtgctgtacgaggagggggctgaggccttcccgaggttgtgtcgctacccaggggtgcagctgatagacacaaccctttcaggtcttagtttacgagcaagctaggtataaatgttaacatctccacatcctataccaaactgtgccgaaatgacaacataagtgaaaatcttttattatcttcaaaatttatttattcctagtgaactcacatgttttctgtaattataaattatgttataagatatcaatccttccaggagggggtggtggctcatgcctataatcccagcattttgggaggccacggcagatggatcacctgaggccaggagtttgagacaagcctgggcaacatgccaaaaccctgtctctacaaaaaatacaaaaattagctgggtgtggaggcacatgccagtcatcccagctactaagtaggctgaggcactagaattgcttgaacacaggagatggaggttgcagtgagccaagaatgtgccactgcactccagcctgggtgacagagcaagaatgtctcaggaaagaaaaaaaaataataaataccaaataaaattaataaaatatcaatccttcctattctagtagttgtggcttaaataaataaataaatatttttaaaaataaaacatagggtcgagtgcggtggctcaactctgtaatcccagcactttgggaggccaagacaggtggatcacaaggtcaggagtttgagaccagccaggccaatgtggtgaaaccccatctctactaaaaatacaaaaattagccaggcgtggtggtgggcacctgtaatcccagctactagggaggctggagtattcacttgaacccaggaggtggaagttgcagtgagccaaaatcacgtcagtgcacttcaaccggggtgagagtctcaataaaataaaataaaataaaataaaataaaataaaataaaataaaagcatagtatcaatctttccgcaaatgaattcatggtgcaatcttacattttcgttctcatgaagtaaagcaagagtggtagaattaagtggaaagagtctatctctagtgtagtcacgtcagtggttgtgtcaagatggttaggaggctcctcccgtttaaaacagtatccaagccccagttgtaaatcaattggggagacacgccaactctgatcatcagcaatatctgagctccagtctcagatattgtgtgcagttagtctctgtcctgtaccctctacctccttccctaccagaaaaatcaccactttagtccctggccaccgggacaccccaggagggtgagtggtctgaggtagttatggcacttatggctcccttgctgctgatctggaactcaagccccaagaagtccccttggatgatctgaatatacatttgggacagatctagggagtttctgagcaacacttagactggggtcttccattgattaaatcctacttgaattcgctactttgggactcaagtctaagggactgagactgagacaggagagcacaagactaactttggtctcttgatcttttcttaccttgcaactgtcaatgcctccagccaaatgcccagcacagagctcagtggatttgactcttccattcagaaactcatagcgattgcacacttcattctcaatcacagggagctgggcttccttgagaaagccagccccaaaggtacctgtgtttaaaaagatgaaagaaatggtaactacgtccacaacatgttcacaaggaaactccagaagaacagagcagtggtgatggacctcctgtctgtccgtgaggctgtagaacacaaggcagctcccaatgctgccagactctctgaaccctggagagtgtaaacgtcatataagagtctatgttccaaaaacctggatttaacaatctgagctttgtcatggtgctttgcggttggttgttgtttctttacctttttctttgcttttaaaaccataaagaataatgtttaaatgtagagtctgagaaatgcaattgctattgtttttatattttcagactttttgtatgcttctttcactaattacatcatatcacaaaatttcacaccctgattttttcactcaacattacataatgagttttgtatagtgctatgatcttcataactaatattttaaaggagagctactgattaatgagcatgaggtttcctttggggatgaggaaaatattctggaaatatgatgatggttgcacaccactgtgaatgtactaaatgccacttggtggtaccctgcaaaaatggttaaaatagtaactcttacgctgtgtacattttattgcaataaaaaagaatagtcatcatttactaagcattatcctttccaggcacaagcttataatgtggtgtatctcacttcatcctcacaacagtcctatgaaacaggcagttccatcactcctgctctacagttaaggaaactgaggtgtaaggaggttgtctagttcaacctgagcctgggtctgcggagtcactgcccaaatgcttcctccccgtgcgcgttggcccccctcttgcttccaaccctccacatctttgttcataaagttcattcttattccttaatattttctgagcctaagttcccataaattatatagacatatttctgtctcccaataacactgccaatttattttctagaaggttatgacagtgtaaaatgtcactagaaaacaatcacttcaccacacttgtatgagtgttcaatttttaaatattagctaatctaacaggttgaaattgtcctgattcattttctaatttatacttctttgacaatttgggagagtgaagattctcctggttgtgtttattcttttgtgaaaaactgctttattttctttgccaaattcaaatagaacggttgcaaaattgccagaggaaatgctgtttttccagatggacacacccagggatgtttcagtgttctcacaaataatccagttttctaattttgcaagcccagctttcattagaattttgcaaaaatccttgctttgcgagcatggcacaggcaagagatgaggcactctctctttcttcccccagagcctttgactgcacttagatcattgactttggttcagaaacctgactgcatctggagttgacatgagcagcatggaagatgtttgtcccagcacctcactccagaggccagctcagctcaatctgggcagagctgcatgatggaagtttctgactaccaagcatcgggcagagggtgcatcacctggactacatagttgtgtgagggagcaccgttctctagaatctgctatttgagcaaggcaaacatcctgataatggtgaaaacctaccgcaagttgccaggaaagttgatgtggtctgcgagtaggtgctgccatccagtggccgacatagagatgtcatctctgagggcaggtaggccacaggtgacaagaggattgaagccctccctgatggggccttggggagagggcagcagggtaagtccagcggcaggatcagtccattgattgtggatgacgactgacctggaaaatccccttggcctcaacacctccaaactctgcatttgatccaagtcagggaacacctggaaacatgaaggggagagcaggaaaactttgacctccctctcagaggctgagaacgccaattgacctgat

SEQ ID NO: 585403 - DNA, 4001 bp, Homo sapiens
ggcagctggcatggtcggcggaggatgacggctccaagtgcaggccttttggagcttctgaatcctccctacaggactctgacccccttcagcctctgatgtaccccacaaggaaatgacactaccctcagggctctgctgtgtgtggctatataaagctcctgccagagggcagcgaccagaccagggcacaaccccaagacctagttcccttgctccccaccttgagttccaaatcggcccccacacaagaataacagcccacatagaacctctagccctggcccctgggaacttcacagcccagggaatggcagtttcctccctagctttgctcctccccagcagcagggggtcaaattcctgaagcttccccctcccccagtactagaaggccaatcaggccatggaggccacagctgccacctccctgaaacatacacatgcgtacacacacacacgcgtacacacacacacacacacacacactccattgtggccaggggagggggtcatcatctatagccatgcctgtaactccaactcaagagtgcaggctctgacatgttccctgtccctgcaggtgtctgtccgtctgcagctgtctgctgtcgccgggtgcatttggcaacagtctggctcagtccctctgcggtctccactcaggctctcttctccctcctgctctggttttcagaggctctatctccctagaactctctgtctctgtcctttgtaccgggctgatgggaagacgagtaggacacctccctcagaaggtctgtgcaaagtaaggcactgtccacctcggaacggtctactgctctccctcctccctgcccaggccaaccttagaaccagggcagggctgggtgggagacagagacctaggaacccaggcatggctaatgccactttccatattgcttcatcatgccattctgatgccccaagctgcacacacacacaatccccctgatctgctttctgcctgaggccagcatagggtccctgaacctgccctacctgcccccacaaactgcaaccatgccttccttcctcccatccgctctgcatcaacccttccgcacttggctttaccccaccccacccagtccacagagctcagggagtccccggcgcccccacctagcccccagcaatggctctagccaggccttgcatgtgcggagatgcaacagagtggtctggcggcaaagttctcctgctgttttcaacggttccatccacccgtggctccccgtctctccatccggctctccagtctcacatggacccggctctccccgctccccgccagagtttcacccccactgtaggaaataaagactaaagaaaggaaaggaaatctctcgcgataaggatgggcgaaaagagaagggggtgtccgcatgagcacctaggatgcggggagtcttcaagagaaaaagaaagggatgcaaagttcccggttccctcgggtgcgttcagccccgcgccgagctcccgcggacacccgggatcgcaaagacgcagcgccggcgaccactcacctgggcgaggcagcatctacccccggctgggtggcaccgaggccggctccgcggggcgcccgggctccccggctcggccacgcatccttccccgcccgagacagactcgagctaaaccctccggcggctccggcgaatgcaggcagatggtggcctcggacgtccacgcggggaaagccctgagccgcttattcagttatatccatggcatttagcaagaagaaggggggaaaagcacaacttgttctcttctcttccagattaaagaaaaataataataataatccctccctaggaggatgccggtaggattttccggatcgaagaaccccaggcattcccaggaacctcgggcatcttggaatgtggggtgtcttcaagttcagacgagcctgccgggttgtgtatgtgtgagtgtatgtgtgtctcagcgagagggagccaggcactcacacccacacgcacacacaaacacactcccccgtactccccgcatgcacactgccccccacgcgcgcgcgcatacgcgcgtacccggtttctctctccgctccacacacacacacacacacacacgcacacacacacacacacggatcacacgctccaatctgggagggagtcgggcgggctgcggagacagcgcagggccagcagtggagaaaacccagcggccagaggcgcccaggaacccggcggccgtgcgcaccgtccccgccgagctctccggcgcggcagcccccagtggcgaaccgcggagctgcaggagccgaaggcagcctctgcgcccgctgccctgcccgctgccgagcgcacccgcttccgagacgaccaacaccgccgcggaaaccagagggattcacggtcctggcaggggtggcgcggggacgcacggtggggcgggagtgggctggggccgcagtcgcggagggaggtgggcaggccgcgagccccggaaccgggagggcggtctccgcggtccagcggcacgggcagcccctgcggaaggcgagccgggcggccagggctgcacctctgcagctggcgacggcgctgccacctcacgtgcctagcgcgccctgcagccgtcagcccgccgcctgctggaggaaaacccgaccgcgccggccctaggctgggagtgggggctggggcgatcgcgcccacccagtcctggggcccagttcagattctcgaatcctggtaagggacctatgaataacgagcgccccgtgcacgcacacacacgcactttgacttttcatgattattacaagaatcagtgaagggtgcagtggcgccaagtgtttgcacagcatctttacaactcttcacttgtttgatcttctcagcaaccctcatttgatgtataaggaaactgaggcccaaaagagtaaagtgacttgtccaaggcatgtggtaggtagcggagaccctactcaaagcagactgtgagctcacagtcagaacacccaggtctggccaaggtctcgtctttggttatcctctcggttcactataaacaactagttaccagaaaggtaggaccgtcctctgccttactggactccccaagaggcatttccttccttctaaaggaaatgaaattttgagattcctgttggtactccagctggtaaatccaggggcaggaagaatgtcaatgttgcagtccttctcttctctcctggtggctaacacatcccgtgcacctgtcccggttacccacagggaggcacatgttgcatgtggatgtgtctctgcagcccaggattggctcggctggatacatctgtaacatacgaccctgtgtcctctctacacacatgcataactgcagaagccgaggcagctggtcctcatgtgtgcaccctccacatgtgcaccccgggaaactgccaaactggcatgctgcatatccttgaagacaagcctctccctgcaggaattctggaaagcctggtgggggaggggcatggccaagatgaaactcaaggtatatggggtgggccttggagagaagggatctaactcaggagcagggagtgagggatagaggtagggaagagtcatgagaaggaaagtaatgaggaaggaagaggtgagtaaaaggaggtgtggagtagaaactggggagggcaagtagggaagaggaaggggaagggaagaaggaggggagaacagcagggaaactgccttactctttgcttacctgagggcttgcctactattggcgggagctcccaggaagaaaggcttaggaagaaccacagcctgggctcaagcctttgaattctcccaagggttgggggcagtgggctaggttatctcccctaaccctcagtcacccatgagacaaccagaacggagtggcagggataggaccaagctggcaccagagtagaaatggagctgcttttagaaaccagaaaagcattagaatgatgt

SEQ ID NO: 585404 - DNA, 4001 bp, Homo sapiens
ataaatcaaacagcaacagggcatgattaaacacacggagcctgaccacacgtgggcacaatcaaggtctcttattccctccgtgacattcatgtccaaccactaccatttttgtgcctcctgtatgtgtcctgattctctcattcagagcatctacaaaaagtcaaaccgtcgaatcagcatcatttttagtccttaagaaacacgctttaaagtttcctattttcttttcctttttttttttttttttttaagatggagtttcgctcttgttgcccaggctggagtgcaatggcgcgatctcggctcactgcaacctccgcctcctaggttcaagcgattctcctgcctcagcctcccgaatagctgggattacaggcgcatgccaccagctctggctaatttttgtatttttagtagagatggggtttcatcacattggtcaggcaggtctcaaactcctgacctcaggtgatccgccctcctcggcctcccaaagtgctgggattacaggcataagccaccacgcccggccttaaagtttcttattttcaacgaaaatcaagtcccctcttttcactttttataaaagggaccagaagttttcctcccatttttgtatgatgaaagccaccgcaggcaaagtcaggagagccacgtcaagaaaaaggagtgggtgttacgagaagcccggcatctaattagattttgctcttgcaattacttaacacaaaccatgccttatacaacccatgagactaaaacaaacttttttctctcagcatttctccccttttaagtcatatttccacgaatcctctcagatcagcctttctcttcaagcctagaaaaattccagtagcacgtcaccgcgcccgcccgcccgcttctgccaaactactgggcttcctcttccctaagacagagaaacccatgccagaaactcttctgggtgcccgcggctaaaataacttggcacgagtgtgtttcgcttccaacttggcgagggcgctgcgggtctcgagcgctctggccaaggccggcccctcagtcgcgcgcttaccctgccggggcgaggcgcgcgcggtggccagggcggcgccgtccggcgcgcggctgaggctgtagctgctgtagccgctgtgcagcgcgaacttgcagacgttgcggccgcgcgccgtgcagttgaagaggtagcagccgagcacggctgccgggggcgcggggcgccggggcagctccaccacggccacggagcagcgcggctcggagcagcaggccgccacgcattgccgccagccccgcacggccgccggcgcccgcaggaagctggcacccgccgccagggagtccttggtgcggatgatggcgtcaggcattgcgctgtagccgccgctgcccgggcccgggcagtcctcctgggggccgccgcccgcgcgcagctccagctccagctcctcctgaggccgctcctgctgcagttgccggcggaactcctccagcagctgctccacgcccgacagctgcgcgtgcagttcggacagcggcgccgcgggcggcaaggccgcacggccgcttggcagccacaggcagagcagtagcagcccgcgcagcgccccgtgacgcggcggtagccggcgctgcgagcccgcgctctcctgggcgacggaggccatggcgacgagagccaagggcagcgagccgaggcggggctgagcgcgggaggaaggcggggacgcgggcgagcgcgggccctgggcccctcctgcgcggccgcggctggctctaggccccggcctcacagcgcggcgcccccgaacccggctgctcccccgaggtcgcgggcgccggcgggaaccgcagtagcgggagacatagccggcccagccgggcaccgctccttgccctcgccggagactgcccagcgccctgcgcctctccgccccggcctgcggcgcgctgggtggcgacgagtcggcctcggcgttgatcagcaccaggtgtgtgcgaacagtggccgcggcggggtggagccttggtgagccccgcccccccgcgcggccccgcccccgcgcgtctcgcgccggctcctccagggctgggagagcaggccccggggagggcagcctcagaacaactttgctcccgcgccgctgcccagctagggcagggttcatgtctgggcccagcaggctttagcaaccaaccacacctgcccagggcgcctgcccacaggggcttggcattcgggggaatgggggcagtgggaagggagggcctgtcttcaaatcctcgtgacccccgggactactccagagagggggcacgcgcacctaggaccaccgtagcgcgtcatcagtccttcacctccagcgtccctgactttccgcatcatgttcccaagatgtgcttgggtagtacaaagtggggcggggttggggtggcggagtcagggccgggaggggtggggatgggaagtactgaaagatgttcagtctgtttaaaaacacaaaaatcaagcctggtgaggtggtactcgcctgtaagtcctgaggctgagttgggaggatggcttggacccaggagttcgagactgcaatgagctgtgatcacaccactgtactccagcctgggggacagaacaagaccctgtctttaaaaataaaaacaaaacccataaatagcagtcgtcacatgcactcagatttccacaaatataacaaaaaatctgaacacagccaacatggggacctgggagtaatacagcctgtgacagagaggcctctagcggttatatcacgtaaaatctcgggagttgtgctttaaatgacataaggaataagaaaatgtccaacccagtgggggcttcaccttggcgttctagacttctgtgagcagcatctgcatcttgtttgtttctgaatcagtttctgttgattcatttttctcctgattgtggatcgcattttcttgctttttagcctgtccggaaatttttgcctggatgcgcacattgtaaatagaacactgttaagtgtctgtattttttaggattgaaagaataaataattggtgggaaaatatcagtctctgctatgtgtttattatctccagagttgacatttaggaacccattgcttgcagatccagatcagagtaggaggtaaaattaaaaggtagcaatagaaaagaaagaaaaaagctcaatgttacttgccattccatcaaagggagaaattataaagtttttgcaggggtatatttgagtgatttttgaggctaaaagaaatggcctcttagctctaaaggctgtgtctggactgtaccacttcggcctggagattcttcctcatatggcatactcatcccacacaactgcagtcattgtaagatgaccttgaagcaacataatgctttttattttttatttttattttttgccatagaccttggagagcttgagcaggattgttatgaggagaaactttcactagtgatgaaaatgctgactgagggtatcatcaaaccctccaaggactagttgttatataagttattaatattaaaaataacatgataatatataatattaactaagaattgtacatgatttcaaagtttgccaaacactttcacatacatgattttatgtgccttcacagagactttgaccacctcactcctgcctttgggaccgtgaaagagaagtcagtatagagtgagccctagctcacatgttccgtggtagggaagtggacaggggagaggacagcatttctcaggggcattcatttctaaatccctccagcaccatcaaagattttcctgcatctgcaactttacaataggtctttttgggagaagtggaaattatttaatgttgtgtttaccgtgagcagtggttatttctgggctgtgagttgcaagtactgaaggggaaatactgacttttataatttataagactttgttgaattttttttttgcaatgagcttgttgt

SEQ ID NO: 585405 - DNA, 4001 bp, Homo sapiens
ttcaataatgtcatcctgaagcccctgaaaactattaaattacatattctatattcctggtgatatcactgcctaaaattacacaacttaaagcagtgagggagctgacgactggtaagaaatcttcaaggacgtaaaaggccagaaaaaaatcatgtgtttgaaaatgcctgcgaaataataaacgcctgagggaacttgatggctttgctgcttctaagctaaataaagcctggggggctttgcaaaggtcctagtgaggataatctccatgattacacagagcaaacatccaatcaattccacatgaacccaggaaagttaatccaagaagaacaccaccacttaaaatattgagaaaaacacacagttcttattgtttaaatgctccatcagcgctggagaacgtatcaggtcattctaacaagtcagaacacttgactagtgtttctgtgacaatgatttggcttgtgttaactaaagggcaacaagaagtttgcgttccaaagctcaggcctaaaacaggtccaatccccgactgccagcagtctccctacttcctgcacacctttggattattgcacaccgacttcctgcacacacctgggtttgagacaccttccccgaggggttactctagctaagttcccgaggcaagcttgaaagaagttcgctgtacccctactctcggtcaaagcaccatcagcacatgtcgcttgacaagttcggcggcaatggagtgatcaatttacataaacaactctgaagagataacgcatcactgcaaggagagaaagtcagcaggacgactgtgcccgctccgggaaaggcggctgcaaggctggcccgcgggcagagcctccgctgacgttcaccgcagctcccaccacgcaacaggtccacgtaggcaaggcccgggcggccggcatctgggcacctgcccctagcgctccaggcccagctctcccctgcgcccatctcgcgtccacccccgcagccaccgcaggccagccggccaagcccacccgcgataaagcacggagcacattcctcattcctcccaagatgccgagatagtgcggcccgcttgagcgctgcccaggtcacaaggtcctccgggacatgccttgactaaaggagaggcgcgcccggcccttggtgggggaacgaccccggggagtggagggggggaggatgcagtgctctgtagcttccagatggaaacagcccgaatcacccggcttctcacctgaccgggcacaagtgccaggtgtcagtacctagcatggatctaagttacttaacagtccagaacgcttctccaatagcacgagccccagtgactacgcgcaaaatatccggtcactttgaataaaatgaaaaggaacttttactgggaaaggatggaagtaaagagacagggggagaaagaagcaggtgaatgcataaaagagggaaggttccttcacgccggacccggagatggaagaggggacgagagaggatgggagcggaagggacagcagacgagcgggcagagcgctcaggtgaggccggacccttacctcgggcagctcgcggagctggttggcgtccagcagcagctcctccaggctccgggcatagcggtagatctcctcggggacgtagaccagcgagcagtggcgcttgtcgatgctctccacatgacggttgcaccgccacagggggatgcagtggaacatcgccgcccccgccgccgcctagccgggtcccgagcggcggagacccgggctccgagcccgctctggccggcggctccgctcagtccgctgccctctccgcgctcgttgttggctcttgggttagctcgcttctcgcgccgggcttcgcggtcggaagtgcttcaaggaacctggagcgggagcccctgccccgtccctgtacccccgcccgccagccggtgcctccactcccacccgccagtcgccgtcgccgcccccgccgccgcgcggagcttcctactcgcagccgccgcgcggactgagcatgcgcgccagtgggtgcgcgccgagggcgtttcccggcccgagggatgctccgctccgggttttcccggcgacctgcatccagagagggtcgactgacctgcgggccggctgctggcggtctgcttactccggcaaagacgggggcgcatcgggccgtttgaggaaggcagactgtgaaaggacttgggacaaagatgaggcggagtagaggcggcctgagcagagcagaacaactttgatatttagttttatttaactcgcactcctctccttgctccccttccccaaaacaactttctcttccggggtcacacaggaccgccccaaagcgtaccttgcgcgccgggggcgccaggcgctactggattcggtgtagttttgaggtgtttgcaccaccctcgctgctgctttcgtggctgcccgtgtgcccgctgctcacggctgccccagaagtgtgagctggccgcgcccggccctctggtcctcgggcaccgcctgcaggctttgtaacttgggagcacatctctggtgatcatggtttatgcagtgagtgatagtaaatcctcctccctgtaccagcaaaggcataggagtctgagagtctgcgagattctcatagatgtggttgcacctggcaaggagcccagctgcagaaataagcaggcaaacgcgagtttctgagccagttccagcccggcccagatgttggcccctgacaactagctgtggctggtgcggagggaggagcgagggaagaggggcagatcgaggctgccaggtgagcatcctccatacagctcctgcttttctgctacaaccccagtcccgtccagcccggatgaccggggaggctcactattgggttataacaaccattccctcgccccgactcattcctgcggaccacggccggaatcctgaactgcccctctttgcctgtaactgtttgcaacacagtccccatctccgaataaccaaattttctcctttaatgaagggttgctaaagtcaaggtcaatcacaatgatgaatcatttccttgggggcttctctgattccccacccggccgccccttcgttccacactttccctttcaagcatactcaaactccaggtttccacctgcggccgctgccacgctggctctcccacactcactcccgccctccagctgctatagctaaaatctggagccacggagttcacttttctatagaagacaaagctgagcatgctcagtggccaaggcaaagtttggtcggaaactagtttttgcattagactctccatgggctccatagactctcctgtaccttacgactaggcacaggagcgtttccccggtgaaatggagaagaggacacttggtcttttcaactttactaggagggctcctttcttcccagtccgtaaggaggggtctgactttcatttccaccccagcattatcaccttaactctcattccagtcaatcccgaaactccgttgccctacccacttcacccttcttttgtttgtcctgatttgattcctgcgttctcacagagggctacctggactttgaacctccacccccctttctacattcttgcattccagaaacatatgaagctcatttctgccacccttcctagaaaactggttcctgacagagacatgtggaaaggtaagtaagtccctgtcttcaagttttccaactgctttttaaaaaaaaaattaaagaaggctagttccctccatttaaaataatgtgatttccagaggttatcacactagattattttaacgaacaccaaatgtattttaaagacgtgtccagtcttttaaaaattcagacctcaataagcattccttgtgtgcctctccatgatgcttcagcttctctgtgttattatttttgtatcaccttaatccgaaagagattatgacctcttaaacaacagatactgtctcacttgctttgtagatc

SEQ ID NO: 585406 - DNA, 4001 bp, Homo sapiens
taaggacaactccttatataaagtaaaaatctgccacccactttagccatccttatcccctgaccagccaggcaagccctgccctacactcattctcaggacctctggaggcgtcttcagagcctctggcgtttgcttggggtgttggaaaggtcgcagcctcccagaaccggatgtgtcactcactccagcaaaagatgcagactccacagggttggggagagagaagaggatctgctgggatcatgatgagaggtgcgtgtgtgtgtgtgtgtgtgtgtgtgtgtgtgtgcgcgcgcgcacacgcgcgtgcgtctgtgaataatttcatactgtaaattctggtaaaagatcaggtttgtctgtaattcagcagaagtaggggcttccatacaaacctagcaacagcctctctacatcaagttttacctgctgagttaacagtcaccaacggaagggcatacacaaattcctccaaagtattattagctaaaagaaacaacagaggggcaaattccacacatggagatcaacgggtgctcagaacttcctcttgttgtcagcgccgattaaacatcatctttgtgagctgtaggctgtgtagtgtgccaagaatggtacaggagggaatataggtcactagggctcaaaacacatctgtacacagacgcacataccttgttacagtataacatgctacacacatatacatgcttaaacgctaggttttcagaacactctcccatcctatttcagctctgccattttaaccctccagataattaagttaaaccccaagacttaaccagccccgcccccaccaccaccaaaaaaaaaaaaacctcaaggtactcaaacaatgggtcaccttgcacagcgtaacacacacgggttccctaagagatcccctatagggagaatcggtaggttaatcattattaaaataaggcttttatcattaaccctctatttcctggcctgagtctgcgtcagccctgtaaccctttcgctcccagctggctacaccaagccacaccttgccaagcccagtcattttaccagactagcgcccactcccccaagtctgcgtgtcagaagatcacctcccgcggggcattttcaggaaagcgcctgacacgtgccggagacgacctactgtgcgctcgccacctgtccttccaataggctttcccggactttcccgagtttggggcagtgggctgggagctgtaaagggctcccctcgcttgcagaactcccaagtctaagatggcccgcccccttctttcgccaacctggatccccgcttccgggcaagaggaggtgcccagggctcacagtcgagaccctcctcccacccacctcccgaggactcccgattcctccccgaagccttccctctctgcacttggctctacaggcggtcggatgggaacaaacttcccggcacccccagtgaccctgcccaacaccactctgccctaaggggcgccaagacttctcgagacctgcgggaaagcagaggtgggaagggagagagaggtgaggagtacgcagaggaaggtggaaaaccaacaaccgcgtgaatcttacctatcaactccctgggaacgtcagagctctcctcggtcatggttgccctgtaggtgtgggggttattgcaggtccaactctgatttatggccccctgcccttccccgaactcctcaatttttttagagaggcagatgcagcttgcaaatggaagtgggcaagaaaagggggggcggagacagaattttgccgcgcgccccccgccccaccaaaaaaaaaaaaaagagttgcaaatgcgaggcggatttgctgctgctgctacatgacgcctcctcgcagttcccggcggctgaataaggagcggaccggattacaagcgggcgcggggcgcggggcggctgtggcgcctgctcctcctcccggctcgctggtccccggcggggcttgggccggcgtagctcccgcccagcctccgcgccgcacctacagccctaggtgaaagcggaaggcgtgggagagggcggggagagcggcgcggggcggggggagtaggttttcctcgcgctcctgccgggctccggctgggcgggggcagctccggccctcctccttctcctccttctccttctcctcttcctcctgcgtttcctcctcacctcgcgagagccggcctccgcaccggtgcgaggccggcctccggtgcccgagcgctgggtccccggcgtaggtcgcacccccaggagagacgctgtgcggtgctgcggtggcggcggcgggcaccgcgcccctcctcgcagcctccctcccaaaccgcaaaagccctgcgtctggagagggggcgagcgggctcgcgagagagcccgggagccatctgctggctgcgagggaggagagccgggtgagccgggctttccatttccttgtccccactccgggcgggccaggggacccagaagacgggagacggcagattctgcagacccgtctacacggaagctggttctttttgggaccctcttacgcactttttctttttcaaccctcccggtgacatgtcacttcatcatcgctattcttcatttctgatgagctagacgaaacctgtgaacactaatcataccgtgagaagacacttgtgtgtgtgcgttcagctggtgctctgcagccgcagttcgctatctcagacattcccgttgagagcgccttggaaaatgcctttcactcggaaaagtctcttttatcctcggggcatattcaggaagctgagctttaatcactggagcctatgtaagcctgcggataggtctgatcctacctgggcccaaactccctatgacttccctgagctccatccccagaggttcaacttcagggccaagaatactttgtgcctcaatcgctgctttttagcctagggctgggaatgtcccagactgtctaatcaggttctgcttttaaaggacagaaaaggaggaaaggaaagggaatccatgcacttggcaatctaattttaaacactgctgttgaccttggaccccttagaatcatcttcagccccacagccaggccttaccactaaggatttgccaacctggccccttcccaccctccttaacctctcccactcccttctctattacaaccagactcactgtttgcttcctccttcctcttaaggttatctgattcttatctatgttttcaaacccatcccaatggtctaccttctttgtgaatattttccagggattttcagattactgtgatccctaagcctctacaatatgtattgcctgaaacacttttctaaacccaaccatatggtgtcgtgtttcattgcttgtgtatttgtctggttttactatctaactcttgcattgtcccctgagtttggattttttctgcccaactagactgtaggtgagttgaaagtgggaatttatcttagacttttgaacttcttcaacagcctagttcaaaataggtgttcaataaacatttgttaactgattttagagctttggacctcaggcctccaaccatttgtttcaaaagtgggcaatttctttaagctagacatttccttaatgcattaaatatattttttctgcagtaaatggaaattaacatctcaaactgtctttcattcaacctggtgtgttaaagaggacttttctggcacataccaatgaagtttcagaaatgccctgaagtttccaaaccatgtgataacttgtgaaaataagaacaaaagtttgtcttttttttttttttcctgtggcctgggtgatggaaagaataaagggaaggctgtatggcagttctgtaattcagtactctttggcttcttttaaaggaagctggggtttcaataaaagaatcattttcactgcaacaggatcctgattggctcctgcatctctgaagaagtgaattcaaatgaatctcctatcacaacactgaaaaat

SEQ ID NO: 585407 - DNA, 4001 bp, Homo sapiens
ggccacggcaatggcaaggcggctccagcccttaggggtgatgccagggttggcactcagcgttagctccttcaagcctgggcagcatcatagcaagaaaccagaatagggagggttaagccctcctccagcccttccccacaatccctgtgtctctggggtgtccctagtggctgggcaccaccttacccccaccatagaggtcaagagccattaaggaggcccatgcttcctctgcctgccccagcctggattcctgagtctccatgctgccccccgtcctgccccttcctgagaggagtagaaagatgttctcgcccacatcatcagagctctggggccacacccccttccctctgcatttcgattttcatcactgccacactagcccaagccctcaacagggtcctgctcaccagatttggccccatctgggggcaggaggccacagatgaggttgatggcttcatcacccagcatgcagtcccccaggtccagagccacgagggcagggtggagggccagggctgggttcagcaaggccagccccgcatctgtcagggggctcccatgcaggctggaggagagtgagagagcagggttactgcagtcctccgcactatctacatgggaaaggggcactttcacttctgtcagccctaggtatggggagggcagtcacagcgcttgagaggcctggaaaaggagaaggaaagttctagattctcagggaatacagatagagggagaattcggtttgttttctggggcagggatccaggacattgcacagggaggggcagagaaggggtgggtgggtggtggaccggaactctgcagtgggcagggctctcgtccccacggggatattcccccttgggaaccaaggagctgccccagtgaagtaaatgcagatgattaggtggggaggtacggcccccacctcatgtcaggaactggtgggtatcccaacacggctagggtcgcgcgtgcaaagtccaagcatgtgcttggagggtgctgtgaaggcatgggccgaggcacggtgtatgtgcataaggcatgtgaaggtaggatggtactggaaggagtgtggaggaacaggaggtgccaggggagtgtatggaagggtgcagtgcccgggacccccttgcgagggggcgcactcacaagagggactggatggagcggttggtccgcagagcctcagccagctgcttgatgcggctggggctggacacgacgcccaggttaaggttgagctgcgccagggacgtggccccggccagggcccggcagatgcggccaaagtcgcggtcgcagaggcggcagccgcgcagtgagagcaggcgcacggcgttgtcgcgaaggccgcggcagatgtcccgcacctcggcgccggacagcggctcccccgaaatctggatggagctgggcagcatcgtgcccacggctgggcctccgggtacggggccggaacggaggttggtggggccgcgggcggggccggggatagggccggggtcggggccccggcaggggtcgcgggcggagtggggccgggggtggaggcggcggctgtggcggaggctgcggctgcggcggaggctgcggcgggggcggagaagagctaccgggactgagccggagccggccagaggtgcggaggcgtccagggcgcgggccgggctgaagtggggcggcgctggggcgggggcggcccgcacggtccgtgtctgggcgttggggcgggtgcgcgttccgggggttgggcaggcgctgctcggcgcttgtccttgtccctcgcggtcgcggcggcggcggcggcagcggcagcgagcggctcaagggcttcggcttaccggtctcggctaggaggccgtacccgctccctccttctctgccgcccggctccccccgaccaccccgcgggcctggccgcacggctggcagagagagcctgaggcgggcggctggcggcagctccggctccagctccagagagcgagcgggcggcgagttcccatggcaacggccgcgtcaccggcgctcgccccgccccctgcccggccaaggccacgccggcccgcgaggttcgcgtacactgggtggttcggggcaaggagctgggagcgataggccgctcttcccttgggagtggggtcagccaactggcaggcggcaggcggcagggctgagtgggtagggctgacggggagcggaatggaggcacgccccgtggagatggcgttgggcacggttactgctgcttctgcccattcttccatccttccccgttcctaaggtccatacccccgccggaatccagggcactgttccctcctatttggaaggccccagggccctttcatccgcgccgcgcctcgctcccgcccccgtgactcgaggcgcagcgtgcgtggtgatcccggcccatggggacttccccgcttgctcctcgccaagatggcggcctcatcagggaggccccaggggccacggctgggcagagccagcttgagctgctggggagaagggtaccccatagggtccctagggcaggggagcctcagatagatgcaaggtcctggtgccacaccttctcaggtacgcagggcactgttgacatctgagggtgtgtccgtgccgcgagactggggcagccaatacaaagaaggtgccagggccagggccctggagcactggtgaggacgtgaaggcggctgagccacactgcacggtgcaggcggtgctgtctcaactttgtcctctggccagggtggtgggggactcacttgtgtaacgcaggacaaatgaagggcacctctgtttgtccctttgttaggagggatagatgctgctgacccagatttactagtgttaagatgattattttacataaaatataatattcaatatagtgaagggaggtcaaaggccctattcccactcttagccacctgaattaacttattaagtggagcatattaaagaggtggtgggggtggatggtgctatgttaggagtggtggttggttttaagaggaaagacagaaaaactaaaaggagctggccccagtaccaccaaggcaaagccaaatttggcttcaattaagagctccacaggaaaattatcaacacaatgcccaggtgcagaagatccttgttttgacacggggtttaagtcgggatgttttgttcaattgtcactgcttccttggcttcccaagagagcagctgagcccagactcaagctggctgcagtgttccatcaggcttatggcttttgtgcttgaggcctccctgccgcttcatgggtcaggtgtgatattcaatcactgccttctatgtagtctggcctgtcccacctttatcttgcctgggtgaggatatgaagaagggaacatatgacattaccactgttgactgagtaggaaagtatataggaagcgggatgacagggaggaccactggatcagccgctgcagttccagacttcaatcaacattttaattaccaagtctatatttagcaagacaatgtgggagagataaagaggaaggaaggggtaggtggggaggggttctcaaaggagctgacccattttctgcattggctgcagagccttgcagtcctggccaggagttcttggccttgtgcctttcagaagtgccgacaggcatcaaggaggtacttacgcagctacagctcagtggcagctgcaaaccccatctacgaaacatgtcatcaggactgtcctttaatagtcttcctcctctctgcagctgcgggaaagaggactggccaagaatttcaggtggggtcagtgtgactgcagggtcaccgcaacagctttggctgtggcgttgaggacggtggtgggaagccgagcagcagggagcatggcagggatgtctctggggaccctctggatgggcgggatgttggggccctccagtgtgtccaggatccctggaaggaagatggaaggtgagcgagga

SEQ ID NO: 585408 - DNA, 4001 bp, Homo sapiens
ctcaatctcctgaccttgtgatccgcctgcctcggcctcccaaagtgctgggattacaggcgtgagccaccgcgcccggcctggcctgttctttttttgagacagagtcttcctctgtcaaccaggctggagtaaagtgatacaatcatggctcactgcagccttgacctcctgggttcaagtgatcctcccacctcagcctcccgaatagctgagactacaggcatgtacactacacctggctaattttttatagaaatagaggtctcatcactatgttgcccagactagtctcgacatcctggactcaagtgatcctcctgcctcagcctcccaaagtgctgagattacaggtgtgagccaccatggccagcctagtacttacttttttttttttttgagacagaatctcactctgtcacccagctggagtgcagcagtgtgatctcagctcactgcaacctctgccgcccaggttcaagcgattctcctgcctcaccctcccgagtagctgggattacaggcaccagccaccgtgcccggctaatttttgtatttttagtagagacagggtttcaccatcttgaccgggctggtcttgaactcctgacctcgtgattcgcccaccttggcctcccaaagtgctgggattacaggcatgagccacacgtccagcccgtgagccactgcgcctgacctgtatttactctttaaactatatattgctttgtattgttttccaatacacgatacaatctctaagcttatctgtaaatttaaggcacaaggcatttatttattgctaaattttaaaatttttcttagagatggggtcttgctctattgcctgggctagagtgcaatggagtaatcactgctcactgcagcctcaaactcctgggctcaagctttcctccttcctcagcctcccaaagtgctgggattacaggcttgagccactgcaccctatccatttatttcttctgtacatcttccacctcgcctagccctgaaatatttctcaaattaaagaggttccagggccctgggcacacccacccccaacagacttgttggaacaggtacctacctcaggtcattctttagttccacgaccacatccttgcccacaagggacttgaaaaaagaatagaagagctattgggagagagggggaaaaccatcatgtgggaaggagcatggtagggaggagtgtcctttgacagtattaccaaatactggtattgtgaaccccactgcatccctgacagttctcaaaatttcacaggaaagaataattggttgacagagctgaaaggctggagcccaaattattctgcacactgcactgagcccatcacttaaagtcccagagagactctgccctgcatacgtcggcctccccactgtgctctctcagtcgaccacctttctcgggtacctgcccactcctttcaatgaattgtagaaaatatcccacccgcaccctgccgaagcttgcctggcagagaagtgctctgaggtctaacttttccgtctcccgctatcctcactgaatctctctcagggttggggttttttccctcatcatggaaaaaatatcccatttgttctcagtgcctcctcaatgaacctgagaaacagtacagtactaaagatgaagataaaaactccggacctaactccagcctaggggtacaaaggccagatcccccgccccaaccatgcgaggtccccgagggcgcccccttttgacgtcacggtacccaccatggtgctggcgccgcgggcagcgggccggaccgggaagacagcagggtgctgcgagcaggtctggggaaaccgaagcgcgagcccgcgcgtggggcgaggcgggaccgcgcaggcgcagcgggaagcgacgcagaaagctccaagcgctgacgggcaaagcgcggccgacttgcggctggggagcgcaagctgggtagagtagaggggaggaggaagccgggaaaggggcggggtttccttcattccgacttcctccctggccggccggctcccattgcgcaggcgcggaccctagcctgggctgccagacgggtggcgggactcagcgcctgagctcaaaggattttgttcttttccagaatcctgccatctacagcgtgatgtgtttgtgccctacacacacttcctatcgagaattgtggggagtttgttaagattatgaagtgtgcacttttctatatttgttaaagtaaaaacataaaatttaaaaaataaaattaaaaaatgttttgaatcttaaattcagctgataaaaagaaaaaaaggccgagggccgtggctcaagcctttaatcccagcactctgggaggcctaggtgggtggattgtgtgaggtcaggagttcgagaccagtctagccaacatggtgaaaccccatcttcactaaaaatacaaaaaaaattaggcgtggtcgcaggctcctgtaataccagctactcgggaggctgagggaagagaatcgcttgaacctgggaggcggaggttgcagtgaaccgagatcgcgccactgcactgcagcctgggcgacagagcaagactccgtctcaaaaaaaaaaaaaaaaaaaatgaccgggagcagtggctcacacctgtaatcccagcactttgggcggccaaggcaagtggatcgcctgaggtcaggagttcgagaccagcctggtcaacatggcgaaattctgtctctactaaaaacccaaaaattagccgggtgtggtggcacgcgcctgtaaatccaggaggcataggttgcagtgagtggagatcttgccattgcactccagcctgggcaacaagagcaaaactccatcccaaaaaacaaaaaatgttgaggcctgtaaatcccagcatttggggaggctgaggcaggaggatcatttgaacccaagagttacagtgagctacaatctccccactgcattccagcctgggtgacagagcgagactctctctagaaaaaagaaaattataaacaaacaacgttgagcagtcccagagataaggaggagctggagcacaaattttgattttatcaaaggttaccaataaatacatttctccaaaggagccaacctcaatctccgcatttcttacacacttttgccaagactgtcctgtaaaggactgtgtaaaactaaagagactgtggctcacagatacaaataacccagtctaacatttcactgttaaatgtttcaaacacaaacagacagaaatgcagttacatattattctaactcatatcccccaggtttttataaatatgtattaggacacaggtaaaagaaaaaaatgtttttgagatggagtctcgctctatcaccaggctggagtgtggtgccacgatctcagctcactgcaacctccacgtcccgggttcaagcgattcctctgcctcaccctcctgagtagctgggactacaggcacgcatcaccgtcctcagctaatttttgtatttttagtagagacggggtttcaccatgttgggcaggatggtctcaatctcttgacctcatgatccgcccgcctcggcctcccaaagtgctgggattacaggcgtgagccactgtgcccagctggtaaaaatattttttcatggactgagacttcataaaacttgtatttgtcatcttgcatagacatacttatttgtcaagagtttgttatagaaatattttctggggctgggcacggtggctcacgcctataattccagcactttgggaggctgaggtgggtggatcacctgaggtcaggagttcagaacagcctggtcaacatggtgaaatcccgtctctactaaaaacacaaacattagccgggcatggtggtgagcgcctgtaatcccagctactcatgaggctgaggcaggagaatcgcttgaatctgggaggcaaagtttgcagtgagccgagatcgtgccattgcactccagcttgggcgacaagagc

SEQ ID NO: 585409 - DNA, 4001 bp, Homo sapiens
actctgaactttcccttccaccaggtctgacctggaaaggtccaagaaggcagctgccggctgtggtcccagcgcccctcccaccaccatgtgggagctcagcacatctgcttcccccagtcccaggaggctgagcctgattgtcctgagaaatgggaaggatcagatatgactcctccttggcaactgccctttcctgccaggcccacacataccctcttctggctgttaggggagcttgggtccctgaacactgtcattcacccaataaattactatttgaccccagagtgggtggaagggtgagccatgtgttttttttattttaatttttaaaaaatttaaaaaattccctattcaaaggtcaaaaagccacataagttttgatgatgatcaatttgaacggaggctcgagatggactgagaggactgagacacagaagtggggggaccatggtttttactggctggaccacagggggaccctgtccacccgcctgggttgaggaaggtgtctggggtgctcaggtgggtttgttctcagcaatgcaggcatagtcagctcttggatcctccttggtgcctctcttgtctctgcccctgaggtcaggtccctcactgctgggcactggcagcctctgcagagatgcatagtggagttcctgctctgaggagccctgggcctgggaccaggacagaaggtgctgatgggaggcgatgccgtcagatccttccctgtgagttctgctcccacctccagcctttcttacttctctccctctctctctctctctctccctctctctctctctctctctctctctcttttttctttggagacagagtcccactatgttgtccaggattgtcttcaacccctgagctcaagctatcttcctgcctcagccttgcgatagctggaatgacagacgtgagccactgtgcctggttctggagcctctctctctctctctctttcattgctcttctctttgtgtctctctcactctcattttctccctgtctctcctatcctctgtctcactttttctcttggtttctgtctcattttctctttctcttttgcctcgattttctctgcctctctcatgctcctactttctctctccttgtctcccgtccccaaccctcctctcagcgctcagccatgcttctccccactcacccactcaggatctctcttgccctcccccttccctgtccccagactcacccagctcctctccagcctctttactggaagaaaagaagaagctcaacacagcccaccctttgtgcttctcccgggccctcccgggctccccccaccagcaggcgtggactcccctgttggcttcccagtggctccagggccaggcagtgttctgggaaagcagtgggaaagcgtgtgggggtgggggcacagggggcactgctgcagggggagggagggagtgcagcgctcacctcttcgatgcagccaacacaggcaggcggacagaaggaccactgccagaagcaggagcccgcccagccccaggcccccgtagatacatatatcttcagggaagagggctcaaggttaggaagcccattccttctccagcgtaccccagcctcctggttggttgcagctttctcagattccctctccaacagttttagaggcagaaaaatataccctcagagcttctccatcccagaccttaatacctcacctcttaccaggtttctgggcctcccgtgaggtccctttccctcctgtaccagctgtccccagaggcctgtccacctagtcatgagctgcatacatcactgttccccatcacttcctaagctcccaggactctctctatgcagatgcaagagacactttacttaccatcattccgcgataacattaggtcagggatcagggactggcctggaggtcaggaactctagtccttgctcttttaggcgaaatgatcaggggctggtgacttgcctcaagttcctcatctgtgaagtgaggggccctctgttataatcgttcccaggctggggagcctcccttatgtgccaaccctgagctgggcactttccattcctcactgctaatccccagaacatagggtatcatggtgcccgttgcccaagtaaagacccgagattcaagcctggactttactaggtcacccatcccagaaaggtggagctggggtttaaggccagctctgcccaactccagagcccagccctttcctctgccctgggctgaccacgtggtttggaggggacttttcagccctggatggttctaggtgctggtaaggggatgatggaggggaaggagcctgggcctgggtgggtgtgggcactggggggaagaagggagggtgatatcagcacacccagcaggtgggctgctccctgagccgcagagcagcgcgggagtgtgggggcccccttggctggtgtggagagctgcttcccacaggcagatgctgctagggctgaagtggggcatggaggagtatctggggccccataacttcccctcaggcacttcctcccctccaaccactggttcctgtttgagggtgaagagggggccgttctcttcaccccagagccagatatactgactagggtctggaaactgggacccttctgggtttaagaggaattctggggggtggggagcagaagtgcaggtggaggccataagggccgtgggcacagaaatgaattgtctttaatttctttggggagcagagactcagaggattcctcgacggcccagggaaactcaaacccatactctccctcccctcatcttagcttcaccccactctggggtgtgaccatccttccaccaaggtccctgcccattcccagcttacccagagcttgtggcctgcaggatggacagactccaaactggccagtgctgtctggctgaagagaagtgttgccacctcagacattcctgcccctcctctggctttaacttctcccccagcctgggttcctccccagcattgttaggagaggaagttcggctccagggttagggttacaacatctttcttttcaaacttctgggcctgtagctagggccataatctgcctcagctccagtcatttcactgatcctgccactagtcagcaaacacccaccaccttcaggtgtcttccttgattaactcttctctattacctcttacactgcatctgttgagacctcttgatcttggcatatgtctgtggacacatgtaccctgctccagttcagactgggagctctggcatatttggtgttctggtgacccacttggtgttctgcagctctatgcagcaggctgcttggctgtctgattaacaaacatgagagttaaaggcagccatactagatctacatgagccctgtggatagatcaaggacagaaagttggtgacaagttggtgacaggaaaggaggtgtgggcaatacaggtggacttcctgtaggaggcagcattctggcattgaacacagaactaagtaaaggcagcggcctgaggctctctggagagacctgggtgaaggcttcttagtggcactgtgatggagaaggagatgggtgctggaggattgcacacccactccttgaggagggtgaagactggggagcgcctgtaaggcaaggggtgaggaggagatgtggtgcctgggtgggtccatattaatttgcgtttccccttccaaattcaagaaccttctacttcctcccccacccttctccccatcctccatgttccccatgctgaataatattcagggttttttgtttgtttgttttgttttttttacattttattattaaaaagtgcaaacatagggtgaaatgagaataattgtacagtgaacatattcttaccacctagatgctactattaacattttttgttttgttttgtttttgagatggggtctcactctgtcactcagcctgaagtgcagtggtgaaatcatagctc

SEQ ID NO: 585410 - DNA, 4001 bp, Homo sapiens
gttgaggaaggtgtctggggtgctcaggtgggtttgttctcagcaatgcaggcatagtcagctcttggatcctccttggtgcctctcttgtctctgcccctgaggtcaggtccctcactgctgggcactggcagcctctgcagagatgcatagtggagttcctgctctgaggagccctgggcctgggaccaggacagaaggtgctgatgggaggcgatgccgtcagatccttccctgtgagttctgctcccacctccagcctttcttacttctctccctctctctctctctctctccctctctctctctctctctctctctctcttttttctttggagacagagtcccactatgttgtccaggattgtcttcaacccctgagctcaagctatcttcctgcctcagccttgcgatagctggaatgacagacgtgagccactgtgcctggttctggagcctctctctctctctctctttcattgctcttctctttgtgtctctctcactctcattttctccctgtctctcctatcctctgtctcactttttctcttggtttctgtctcattttctctttctcttttgcctcgattttctctgcctctctcatgctcctactttctctctccttgtctcccgtccccaaccctcctctcagcgctcagccatgcttctccccactcacccactcaggatctctcttgccctcccccttccctgtccccagactcacccagctcctctccagcctctttactggaagaaaagaagaagctcaacacagcccaccctttgtgcttctcccgggccctcccgggctccccccaccagcaggcgtggactcccctgttggcttcccagtggctccagggccaggcagtgttctgggaaagcagtgggaaagcgtgtgggggtgggggcacagggggcactgctgcagggggagggagggagtgcagcgctcacctcttcgatgcagccaacacaggcaggcggacagaaggaccactgccagaagcaggagcccgcccagccccaggcccccgtagatacatatatcttcagggaagagggctcaaggttaggaagcccattccttctccagcgtaccccagcctcctggttggttgcagctttctcagattccctctccaacagttttagaggcagaaaaatataccctcagagcttctccatcccagaccttaatacctcacctcttaccaggtttctgggcctcccgtgaggtccctttccctcctgtaccagctgtccccagaggcctgtccacctagtcatgagctgcatacatcactgttccccatcacttcctaagctcccaggactctctctatgcagatgcaagagacactttacttaccatcattccgcgataacattaggtcagggatcagggactggcctggaggtcaggaactctagtccttgctcttttaggcgaaatgatcaggggctggtgacttgcctcaagttcctcatctgtgaagtgaggggccctctgttataatcgttcccaggctggggagcctcccttatgtgccaaccctgagctgggcactttccattcctcactgctaatccccagaacatagggtatcatggtgcccgttgcccaagtaaagacccgagattcaagcctggactttactaggtcacccatcccagaaaggtggagctggggtttaaggccagctctgcccaactccagagcccagccctttcctctgccctgggctgaccacgtggtttggaggggacttttcagccctggatggttctaggtgctggtaaggggatgatggaggggaaggagcctgggcctgggtgggtgtgggcactggggggaagaagggagggtgatatcagcacacccagcaggtgggctgctccctgagccgcagagcagcgcgggagtgtgggggcccccttggctggtgtggagagctgcttcccacaggcagatgctgctagggctgaagtggggcatggaggagtatctggggccccataacttcccctcaggcacttcctcccctccaaccactggttcctgtttgagggtgaagagggggccgttctcttcaccccagagccagatatactgactagggtctggaaactgggacccttctgggtttaagaggaattctggggggtggggagcagaagtgcaggtggaggccataagggccgtgggcacagaaatgaattgtctttaatttctttggggagcagagactcagaggattcctcgacggcccagggaaactcaaacccatactctccctcccctcatcttagcttcaccccactctggggtgtgaccatccttccaccaaggtccctgcccattcccagcttacccagagcttgtggcctgcaggatggacagactccaaactggccagtgctgtctggctgaagagaagtgttgccacctcagacattcctgcccctcctctggctttaacttctcccccagcctgggttcctccccagcattgttaggagaggaagttcggctccagggttagggttacaacatctttcttttcaaacttctgggcctgtagctagggccataatctgcctcagctccagtcatttcactgatcctgccactagtcagcaaacacccaccaccttcaggtgtcttccttgattaactcttctctattacctcttacactgcatctgttgagacctcttgatcttggcatatgtctgtggacacatgtaccctgctccagttcagactgggagctctggcatatttggtgttctggtgacccacttggtgttctgcagctctatgcagcaggctgcttggctgtctgattaacaaacatgagagttaaaggcagccatactagatctacatgagccctgtggatagatcaaggacagaaagttggtgacaagttggtgacaggaaaggaggtgtgggcaatacaggtggacttcctgtaggaggcagcattctggcattgaacacagaactaagtaaaggcagcggcctgaggctctctggagagacctgggtgaaggcttcttagtggcactgtgatggagaaggagatgggtgctggaggattgcacacccactccttgaggagggtgaagactggggagcgcctgtaaggcaaggggtgaggaggagatgtggtgcctgggtgggtccatattaatttgcgtttccccttccaaattcaagaaccttctacttcctcccccacccttctccccatcctccatgttccccatgctgaataatattcagggttttttgtttgtttgttttgttttttttacattttattattaaaaagtgcaaacatagggtgaaatgagaataattgtacagtgaacatattcttaccacctagatgctactattaacattttttgttttgttttgtttttgagatggggtctcactctgtcactcagcctgaagtgcagtggtgaaatcatagctcactgcagccttgaattcctgggctcagaggtcctcccaccttagccttctgagtagctaggactacagacaccagctaccacatgaggctttgtagaaatggggtcttactatgttgcccaggctgattttgaactcctggtctcaagcaatctttccaccttagccttccaaagtgctggaattacaggagtgggccactgcacctggctctattaacattttttatttgctttatcacatatttatcaatccatctcacttttaaatatcttttaaaattacaaatatcagtacattttacatctaaacccttcagaagcttaacattgactggagttcagtatttatttccccatttcttttctggcctgaggaaggcaaattttacatacaaatctcaagtcagtactcttttttttttttgagacggagtcttgctctgttgcccaggctggagtccagtggtgtgatcttggctcactgcaacctctgccttctg

SEQ ID NO: 585411 - DNA, 4001 bp, Homo sapiens
tgtctctcctatcctctgtctcactttttctcttggtttctgtctcattttctctttctcttttgcctcgattttctctgcctctctcatgctcctactttctctctccttgtctcccgtccccaaccctcctctcagcgctcagccatgcttctccccactcacccactcaggatctctcttgccctcccccttccctgtccccagactcacccagctcctctccagcctctttactggaagaaaagaagaagctcaacacagcccaccctttgtgcttctcccgggccctcccgggctccccccaccagcaggcgtggactcccctgttggcttcccagtggctccagggccaggcagtgttctgggaaagcagtgggaaagcgtgtgggggtgggggcacagggggcactgctgcagggggagggagggagtgcagcgctcacctcttcgatgcagccaacacaggcaggcggacagaaggaccactgccagaagcaggagcccgcccagccccaggcccccgtagatacatatatcttcagggaagagggctcaaggttaggaagcccattccttctccagcgtaccccagcctcctggttggttgcagctttctcagattccctctccaacagttttagaggcagaaaaatataccctcagagcttctccatcccagaccttaatacctcacctcttaccaggtttctgggcctcccgtgaggtccctttccctcctgtaccagctgtccccagaggcctgtccacctagtcatgagctgcatacatcactgttccccatcacttcctaagctcccaggactctctctatgcagatgcaagagacactttacttaccatcattccgcgataacattaggtcagggatcagggactggcctggaggtcaggaactctagtccttgctcttttaggcgaaatgatcaggggctggtgacttgcctcaagttcctcatctgtgaagtgaggggccctctgttataatcgttcccaggctggggagcctcccttatgtgccaaccctgagctgggcactttccattcctcactgctaatccccagaacatagggtatcatggtgcccgttgcccaagtaaagacccgagattcaagcctggactttactaggtcacccatcccagaaaggtggagctggggtttaaggccagctctgcccaactccagagcccagccctttcctctgccctgggctgaccacgtggtttggaggggacttttcagccctggatggttctaggtgctggtaaggggatgatggaggggaaggagcctgggcctgggtgggtgtgggcactggggggaagaagggagggtgatatcagcacacccagcaggtgggctgctccctgagccgcagagcagcgcgggagtgtgggggcccccttggctggtgtggagagctgcttcccacaggcagatgctgctagggctgaagtggggcatggaggagtatctggggccccataacttcccctcaggcacttcctcccctccaaccactggttcctgtttgagggtgaagagggggccgttctcttcaccccagagccagatatactgactagggtctggaaactgggacccttctgggtttaagaggaattctggggggtggggagcagaagtgcaggtggaggccataagggccgtgggcacagaaatgaattgtctttaatttctttggggagcagagactcagaggattcctcgacggcccagggaaactcaaacccatactctccctcccctcatcttagcttcaccccactctggggtgtgaccatccttccaccaaggtccctgcccattcccagcttacccagagcttgtggcctgcaggatggacagactccaaactggccagtgctgtctggctgaagagaagtgttgccacctcagacattcctgcccctcctctggctttaacttctcccccagcctgggttcctccccagcattgttaggagaggaagttcggctccagggttagggttacaacatctttcttttcaaacttctgggcctgtagctagggccataatctgcctcagctccagtcatttcactgatcctgccactagtcagcaaacacccaccaccttcaggtgtcttccttgattaactcttctctattacctcttacactgcatctgttgagacctcttgatcttggcatatgtctgtggacacatgtaccctgctccagttcagactgggagctctggcatatttggtgttctggtgacccacttggtgttctgcagctctatgcagcaggctgcttggctgtctgattaacaaacatgagagttaaaggcagccatactagatctacatgagccctgtggatagatcaaggacagaaagttggtgacaagttggtgacaggaaaggaggtgtgggcaatacaggtggacttcctgtaggaggcagcattctggcattgaacacagaactaagtaaaggcagcggcctgaggctctctggagagacctgggtgaaggcttcttagtggcactgtgatggagaaggagatgggtgctggaggattgcacacccactccttgaggagggtgaagactggggagcgcctgtaaggcaaggggtgaggaggagatgtggtgcctgggtgggtccatattaatttgcgtttccccttccaaattcaagaaccttctacttcctcccccacccttctccccatcctccatgttccccatgctgaataatattcagggttttttgtttgtttgttttgttttttttacattttattattaaaaagtgcaaacatagggtgaaatgagaataattgtacagtgaacatattcttaccacctagatgctactattaacattttttgttttgttttgtttttgagatggggtctcactctgtcactcagcctgaagtgcagtggtgaaatcatagctcactgcagccttgaattcctgggctcagaggtcctcccaccttagccttctgagtagctaggactacagacaccagctaccacatgaggctttgtagaaatggggtcttactatgttgcccaggctgattttgaactcctggtctcaagcaatctttccaccttagccttccaaagtgctggaattacaggagtgggccactgcacctggctctattaacattttttatttgctttatcacatatttatcaatccatctcacttttaaatatcttttaaaattacaaatatcagtacattttacatctaaacccttcagaagcttaacattgactggagttcagtatttatttccccatttcttttctggcctgaggaaggcaaattttacatacaaatctcaagtcagtactcttttttttttttgagacggagtcttgctctgttgcccaggctggagtccagtggtgtgatcttggctcactgcaacctctgccttctgggtacaagcgattctcctgtctcagcctcccaagtagctgggactacaggtttgtgccaccatatccagctaatttttgtatttttaatggagaaggggtttcaccatgttggccaggctggtctcaaactcttgacctcaagtgatccacctgccttggtctcctaaagtgctgggattataggtgtgagccatctcgcctggcctaatactgttttgtttgtttgtttttgtttttaagacagagtcttgttcttgtcacccaggctggagtgcaatggcatgatttcggctcactgcaacttccgcctcctgggttcaagtgattctcctgcctcagcctcccaagtagctggaattaaaggtgcctaccaccacgccccgctaatttttatatttttagtagagatggggtttcaccatgttgatcaggctgctctcgagctccttacctcagatgatccaccttccttggcctcccaaagtgctggtattataggcaagagccactgcgcccagc

SEQ ID NO: 585412 - DNA, 4001 bp, Homo sapiens
tcgagggtgcagatgcctccgtgtggggctctggtcggcagctggctttcagagcctttccctgccttctggggccctgtgatccctcatgcctacttctttctctcttggtcagccttgtgcgcatgccctctcactcttcatctcttgggcctgtctctgtttctccttggatgttcttctattattcccctctctccatcctccataaataaataatttaatttttttgccttcataaatagtcccctccctgcctctagtcatcccccaagctcctccatgtgcctgctcttcctctgtgtgtggatctaggccccacctagctggtgggacagaccaacagctttgggctgggaattcctaggcaggcttgaaatcctcagccagacagacatcagggatggttcagggaggtgtggtcccctgggatgcctagaattccttctttgaaagctccggtgacttgatcagggaagacttgagctgttggaatggccaaaggagaggtggtgacgacccctgaaatggtcagaatggaggcagaatggggagaaggtcttgaaatcaattattttttctttctggatttttccaagttctacagagcgaaggctccaaagaagacagtactagggctgaggactaggtgggggatgccatctgtgtgggtggatagctggtctccctgggtgagctggaacgcagccccgtggtacatcgagtgcagccagggttcctgcagccctggatacaccatcttctgggagctgaggagaggcacatggaaggggtactgggaggagaagagctggacctcatgggccaggtagagtggggaggaggtggccttgggagagtaggctttcccagagaagaccacctgggagtagacgaagtagatgccactggtggggaccaggagagaattgttgctcaaggagaaaccatcctggaggaaggcacggtccgtgtttgctctccagagcagtgagttctgcttgctggggtctcctaggaagagccataggggatgggggtgggagatcaggggtctggatcagaggtctcaatccctgaggaagtgggcactgaacaactgagttcctgggggatggcagggggaggcataggagtgggctccctctgttttttttagcgtgggggaagttgggggagaggggtggatgcttgggttcctgaggcaggggtaggaggagagctggtggggacatgtctgggaggtcaggtggatgtttaccaatgaggtgagcagcaggtttgagggtgctgtgggcaagatgcatcttggggtgctgacgggcagtctgggcagctgaaggtgtgaggccaacaccagggagcccctaggggagaacagagttgaggggggctctagggctcaaggtttggctgagccaccccagcagcccccattctcctgctgcctcacctgggccccaggcagcagaaccagcagcagccccagaaggaggaggtgtagggtggtgccacacacccttgggaggaagagacgttcaggtggtgtcatggggagaacctgcagagaaagagagagagagagagagacagtgagcggggcggggcacgcggcggaagacagacctcccgccctgggagagagcaccccccgacccccgagagagagatcgacagagaaggggacaagatgcagtcagagaaaccccaaggtgagcagagggagacagagagagacaggaagggaacagagaggaatcatggcagaaacagagaatgtgtgacagagacaatgagactgacagatggagagtcagagacagagaaggaaaccaaaaccaaacccaccaaggcccaggcccaggcaggccggggatccaggcagcaggtgcaggagggaccgaggcccaggcagagggcaggacactgctgggcggtagtccaaagcacgaagcacgggcagcccaaggagatggggcaggagagcctcacctgctgtgcggagcccctgggcccggacgctcaggtccctttatagaggaagcggcagtggcagcgtggcaggcagcgggcgggttctaggtcggggctggggcccggggaagcccccagggcttagaagatactgctgtttcagtcaaaggcaggaaaggctgaggcctaggagagaaccacaggctgggggttcaggcgactgagttctgggaaagggagtcgggtcaggggaatcgtgggctgggagggccagggagtggggtcaggcctagagttccaaagaagggacagtcaattcagagaggaggtggttgagcagctggggtgtgagctggaggcccggttccctgaagagcaatcatatataacatctctgcacccttggctgagtacaggcttctctctttgcccatttccttctcttgtacccctgtccttgtcccaaacaactcaaatcatacttgtcccagtatacggactttccagcccatctggcaggtttcacatcaagaaggtccattatatatccccttcatcggggacattctggtgtttgcctcttgtccaggtgaaaatattaatggatcccccttccactcttgaaagtgtcctagtttggaagataaattttttggtccccttactcagagatgatgctggacagtcaagtatgatgaggtctcatctcactcctgaaggatgccctccatctcttcctgacttcaggtggcttccacagaacagatttatataaccccaaataaacacacattccaggatcaatgtggcagacaccttccaaagttttctacaaaggaagtttcagaattccacatgggtgaggcttaagggtggtgacttagggtggggtggggacagctaagggacttgttctgaagctgcatttgcagagccaatacattattttaaaattgttccaggcctggtgcagtggctcacacctgtaatcctggcactttgggagtctgaggtgggcggattacttgaggtcaggagtttgagaccagctggccaacatggtgaaaccccatctctataataaatacaaaaattagccaggcgtgctggtgcgcatctgcagtcccagctactcgggaggctgaggctggagaattatttgaacctgggaggcggaggctgcagtgagtcaagatcgcaccactgtattccagcctgggggacagagcaagactctgtctcaaaaaaaaaaaaaaaaagtttccaaaatttttttcctttttattgatatgtaacttaggtatgaggtggacacctcttaagtgtacagctgatgaatttttccatctgtatgtagccaccacccagctccacgtattttcaggtccccagcaggttccctcatgccccctccctgctgataccctccaaagataaccaaccactctctcacttttatcaccatagattatttcctcctggtttggggcatcatataaatgaaatcacacagaatgtactcatttctgtttgacttctttcagtcagcattatgtttgtgagattcatatacgtggttgtatgtatcagtaatgtttttaaaaaaaattatgatgtaatattctattgtatcaatatattctaatatattctgttgatggggatttggtttgtttctagtttttgtctaacacaaaaaatgtctaacacgaacattctcatacatgagcccattttcacttagcttgcaagttacaaggtttaaaaaaagcagtttctaaagatgactttattcacttttcctaagtttgagataataccaacttgtcacctcaaatattattactgctactgatgtgattttacttggagagtgttagaggggttggagctggggctggtggtgacccggggtaaagcccactgttgcatggggcagaccacttctctccccaggcacaaggtccctgaggggtcttggtgtaacatggagggacatgtaagtaacattctgggtgtgtatgagc

SEQ ID NO: 585413 - DNA, 4001 bp, Homo sapiens
tctccatcctccataaataaataatttaatttttttgccttcataaatagtcccctccctgcctctagtcatcccccaagctcctccatgtgcctgctcttcctctgtgtgtggatctaggccccacctagctggtgggacagaccaacagctttgggctgggaattcctaggcaggcttgaaatcctcagccagacagacatcagggatggttcagggaggtgtggtcccctgggatgcctagaattccttctttgaaagctccggtgacttgatcagggaagacttgagctgttggaatggccaaaggagaggtggtgacgacccctgaaatggtcagaatggaggcagaatggggagaaggtcttgaaatcaattattttttctttctggatttttccaagttctacagagcgaaggctccaaagaagacagtactagggctgaggactaggtgggggatgccatctgtgtgggtggatagctggtctccctgggtgagctggaacgcagccccgtggtacatcgagtgcagccagggttcctgcagccctggatacaccatcttctgggagctgaggagaggcacatggaaggggtactgggaggagaagagctggacctcatgggccaggtagagtggggaggaggtggccttgggagagtaggctttcccagagaagaccacctgggagtagacgaagtagatgccactggtggggaccaggagagaattgttgctcaaggagaaaccatcctggaggaaggcacggtccgtgtttgctctccagagcagtgagttctgcttgctggggtctcctaggaagagccataggggatgggggtgggagatcaggggtctggatcagaggtctcaatccctgaggaagtgggcactgaacaactgagttcctgggggatggcagggggaggcataggagtgggctccctctgttttttttagcgtgggggaagttgggggagaggggtggatgcttgggttcctgaggcaggggtaggaggagagctggtggggacatgtctgggaggtcaggtggatgtttaccaatgaggtgagcagcaggtttgagggtgctgtgggcaagatgcatcttggggtgctgacgggcagtctgggcagctgaaggtgtgaggccaacaccagggagcccctaggggagaacagagttgaggggggctctagggctcaaggtttggctgagccaccccagcagcccccattctcctgctgcctcacctgggccccaggcagcagaaccagcagcagccccagaaggaggaggtgtagggtggtgccacacacccttgggaggaagagacgttcaggtggtgtcatggggagaacctgcagagaaagagagagagagagagagacagtgagcggggcggggcacgcggcggaagacagacctcccgccctgggagagagcaccccccgacccccgagagagagatcgacagagaaggggacaagatgcagtcagagaaaccccaaggtgagcagagggagacagagagagacaggaagggaacagagaggaatcatggcagaaacagagaatgtgtgacagagacaatgagactgacagatggagagtcagagacagagaaggaaaccaaaaccaaacccaccaaggcccaggcccaggcaggccggggatccaggcagcaggtgcaggagggaccgaggcccaggcagagggcaggacactgctgggcggtagtccaaagcacgaagcacgggcagcccaaggagatggggcaggagagcctcacctgctgtgcggagcccctgggcccggacgctcaggtccctttatagaggaagcggcagtggcagcgtggcaggcagcgggcgggttctaggtcggggctggggcccggggaagcccccagggcttagaagatactgctgtttcagtcaaaggcaggaaaggctgaggcctaggagagaaccacaggctgggggttcaggcgactgagttctgggaaagggagtcgggtcaggggaatcgtgggctgggagggccagggagtggggtcaggcctagagttccaaagaagggacagtcaattcagagaggaggtggttgagcagctggggtgtgagctggaggcccggttccctgaagagcaatcatatataacatctctgcacccttggctgagtacaggcttctctctttgcccatttccttctcttgtacccctgtccttgtcccaaacaactcaaatcatacttgtcccagtatacggactttccagcccatctggcaggtttcacatcaagaaggtccattatatatccccttcatcggggacattctggtgtttgcctcttgtccaggtgaaaatattaatggatcccccttccactcttgaaagtgtcctagtttggaagataaattttttggtccccttactcagagatgatgctggacagtcaagtatgatgaggtctcatctcactcctgaaggatgccctccatctcttcctgacttcaggtggcttccacagaacagatttatataaccccaaataaacacacattccaggatcaatgtggcagacaccttccaaagttttctacaaaggaagtttcagaattccacatgggtgaggcttaagggtggtgacttagggtggggtggggacagctaagggacttgttctgaagctgcatttgcagagccaatacattattttaaaattgttccaggcctggtgcagtggctcacacctgtaatcctggcactttgggagtctgaggtgggcggattacttgaggtcaggagtttgagaccagctggccaacatggtgaaaccccatctctataataaatacaaaaattagccaggcgtgctggtgcgcatctgcagtcccagctactcgggaggctgaggctggagaattatttgaacctgggaggcggaggctgcagtgagtcaagatcgcaccactgtattccagcctgggggacagagcaagactctgtctcaaaaaaaaaaaaaaaaagtttccaaaatttttttcctttttattgatatgtaacttaggtatgaggtggacacctcttaagtgtacagctgatgaatttttccatctgtatgtagccaccacccagctccacgtattttcaggtccccagcaggttccctcatgccccctccctgctgataccctccaaagataaccaaccactctctcacttttatcaccatagattatttcctcctggtttggggcatcatataaatgaaatcacacagaatgtactcatttctgtttgacttctttcagtcagcattatgtttgtgagattcatatacgtggttgtatgtatcagtaatgtttttaaaaaaaattatgatgtaatattctattgtatcaatatattctaatatattctgttgatggggatttggtttgtttctagtttttgtctaacacaaaaaatgtctaacacgaacattctcatacatgagcccattttcacttagcttgcaagttacaaggtttaaaaaaagcagtttctaaagatgactttattcacttttcctaagtttgagataataccaacttgtcacctcaaatattattactgctactgatgtgattttacttggagagtgttagaggggttggagctggggctggtggtgacccggggtaaagcccactgttgcatggggcagaccacttctctccccaggcacaaggtccctgaggggtcttggtgtaacatggagggacatgtaagtaacattctgggtgtgtatgagctatttctcctgttcttctctacttgaggacctgcccctttgccttttatgctttactagtcttagctattatttctgtaggggcagaaaggggtgatcccttcctgacccatcataagggttatggccaatactcctataataaaagacagattaacaagagaaaagcataatacatttatttaatcaaagtttt

SEQ ID NO: 585414 - DNA, 4001 bp, Homo sapiens
atcatccctaggagcaaaggccatacactgtgttgtgatgaattgtttcaagcaaccagaagagtactgagaatatttaacccgcacccgtgcacccaccctgaattaagacgtgtgtcgcaactcagcatctttatcggcagcactgaagctttccattctttattttcatcaggttcaaaatcaatttccaaacagtctcctacatttttcccactgccatggggtcctgggcgtccgggcccccaatattcacgcactcgcaccacgcactcatattccctcaccccaccatcacggccccaaagaaggtcttccctctcgcgaagtccaccatatcggggtgactgatgttgacgtacaccctctcgcccctccggagctgcaccaggccgccgaaccccacgctcgtgtaccagagaggcccgtacccttgtctcctggccgggtccagcactggagtcaccgtctcggcgccctcgagcagcagctcgggagtgcccggcccgtaggcgccccccgcccggtacagagagctgcgcagcgtgaccgagcggccctgggggtccccgccgccagggggcgcccggccccggtagccgacgagacagtagaggtaatagaggccgtcctgcgggagcgccagcccctcggcgtccgagaactgcgtcccgctcgtcagaaacgcctgttccttcgtcgtctcccagcctagcccctgccccttcagcggagcgcctgcggagacacgggccgacgcgctcttgggaatgcgatcctaaaggcttgggacttctggggaagtggcggcttttagcccctgcgggagccgagccgggccgggggaggagggatggtgctgtttctgggatgagtgcgagttgggggccgagggaacacggatgtggggtgcagaacgctgtagtggggacctccaggccggcttttgcttgcaccggagggaagaagaaactacactgcggggacgagcgtaagagtgggcacgagcgacaaaaggtcgtgaagcgggtgggaaaccgagcactggaatcatggagccgaaggactctgggcgagcagaactggaaccttcggattatttacactcttattcaggtcttggaggtccttacctatgaggtgggcagctgggagcccggggctgagatctgtttctggctcctcctctggcagcttctgaaaccctggaaggggcaaagagtccacgattgggggcagggcagccacccatgcaggctacccttgagagaacagggcgcagggatggggagcctggattcctagaggaagaggtatctggggacgcagcagggagctgggagcccctgagggtctgaagcggggaaggagagacagtctgctcttacccagtccttgctgggcctgtgccccggggtcggccgtctccgttacctggttgggtggggtcacagtgcccagagttcagattcagctcatgtcacccctacccctctgaaagtggacccaagctgcaggcctggggtttctcctaccagcaccatccccaacacacacctccttagaagggagaacaagcaaggcataggtacttgggcggagaaacagatgtacctcgggaagaggagaggagacacaaggggcttatgtcgggacacaagcacaacatcacaggaacatggaaagagagtcagcaaagagacaagacatccccaccagggacagccgagccagctgagccagagggggcaaaagaccacaggcacaaccagagggagccaagcatccgcaagatacaactctccaccagggcctgttgcagccactcaccagtcctccctgatcctggggcactaaggccagcacagccaggacagtgataggcaccgccagcaacaaggtcaccagagaagtggctcctgccacagctagcaggagggaacccctcccctggagcctcccacccctgccctccagccccagtgcccccattgagactgaaccagagccagagcagggggctttcatacctcagggacgggcccaccccctccctgtagacctgcacacctggctgggactttccgcacacccctgctcccctcacccagcttcctgtttacccagagctggggtggggcagctggatgcctgggttctctgaactggggaagaagttgaggttagggagacaggctctcagggtggaaccaaaggggtctttagacatcttctggctcagcagagagagaaactgaggcccagggagggaaggtagcttgcaggaagccagtcagcagagctgaaatgagaacacagatctccaggtttccaatgtggtttgcattcttctataccctcaaggtaggtgctggaggaagagctgatcccgtctctgaggtcaagggccggactaggacaaggactggaatcttgagggatggatgtctgggttccctgagaagaactgattcccatactgggctgacctcctcccgttcccttgctcatctccagccccctgtgctgagtgagaaagggagaggtaagccttagcctcaccactgactactgactcactaaggagggatggaaatggagctttacctcccttgctacaaaaagtaaagacagatggacgaggcatactcccaccctcagagagcttccaagtctacaatgagccctatccattagtaggtgcttactaaatgtttatacataaatgaataaaaggacaaataaatgcaggaataaccaaaacaaagcagcaaggaccacatgaatggtagatgtaggcagcatgagtggttaagagtcaagggagtagccggggtagtggcttacacctgtaatcccaacactttgggaggctgaggcaggtggatcacttgaggtcaggagttcgagaccagcctggccaacatggtgaaaccctgtctctactaaagatacaaaaagttagccgggcgtggtggcacgcgcctgtaattccagctacacaggaggctgaggcaggagaatcacttaaacctgggaggcagaggttgcagtgagccaagattgcaccattgcactccagcctgggcaacaggctgagactctctctctcaaaaaaaaaaaaaaaaaaaaaaaaagagtcaagggaagaaagaccaggtccaaggaagctggaagtggctccaatcatctccccttcttggtaacatctctatgtgtttccgtaatactaataataatatagctgacccacaaaatgcacttaacatgtttatgccactgatttacacactttaataatttttttttttgagacagggtctcgctatgtcacccagactggaatgcaatggcaggatcatggctcactgcagccttgacctcccaggatctatggattcacctacctcagcctcctgaatagctgggactataggcacatgccaccatgcccagctaatttttgcattttttgtagagatggatttttgccacattgcccaggctgggctcaaactcctggactcacgtgatctgcccgtgttggcctcctaaagtgctgggattacaagcatgagccatcatgcccagccaataattataatcctgacaaaaaccctaagaggaaactgaggtacagagaggttaagaaacttatggagctcacagagtcagtggcagaaccagaatttgaacccaggcatctggctccagagccttgataacaagacagtttaaaaactgaatactggggctgggcgcagtggctcttgcctataataccagcactttgggaggccaaggaaggtggatcatctgaggtaaggagctcgagagcagcctgatcaacatggtgaaaccccatctctactaaaaatataaaaattagcggggcgtggtggtaggcacctttaattccagctacttgggaggctgaggcaggagaatcacttgaacccaggaggcggaagttgcagtgagccgaaatcatgccattgcac

SEQ ID NO: 585415 - DNA, 4001 bp, Homo sapiens
gtatttatatgcaaaaaaacccttctcaacatacaacaaaactggctttactgaaaagctaaacgtggcccatgtcccccagtactctgtttcccaacactctgtttcataatatctacacttaataagtgttgtgtaacattaagagtcttaataagtagagtctaacattaagtcaatctttaccaggctcccttgcaaagttccctgagctaaccaaggagctcagatattttacatttcctaagatgagcaagcaggaggcaaaatgcagtttgcggttatgaaacggcaggatcttagagaaagcacagtttgagcatatatcggtgccctaaataacatcatgccgcattgtagctggtgctttggtaaatatttaccattattctacaagatttgctcgtttaaacatctcaaataaagatctttgtcttcccaatcaaaataatgtgaatgatgtaaaaatcaccaattgtactgaaaattaacttatagattatttcccagaatatcagttatctgagaataacagctggctaacaatttattaaaaactattaacatagcaaggcgtggtggctcatgcctgtaatcccagcacttttggaggccaagctgggaggactgcttaagtccaggagttcgagaccagcctgggcaacgtgctaagactctatttatttaaaaaaaaaaaaagaaaaaaaaaactattgtctacctacaaactgactggctaaagaacaggacctactttttgtgtgggcaatagaaccctctggggtgcactctcatctgctgctaaaggatctcgttggctccggtggaccaagtgaaaagacacagctttcttcttctctataaagggctttttcttcctgtgaggcttcaaaggaacaaaatcacaacaattaattaaaacagaacaaaaagacggagaataattccatagtccacacatgcatctttagtagtcatgttaaagatactttttaaaaatctacacttctagggcaggcaacatcagctgtgttctgcagaatccatacttaaccttccttcaacaaacattccttgagcacctactttgtgccagaccttgttatgggaactgagaatacagaagtgggaaagtcagataaagtccctgttcttagcaagaaaatcaagataatttccggtgaagaaaatataagacagtgacgtgaaaatgccttaaaagctactttacactggctgctcagggaaggcccctggccgactgaactagaatgacaagaagcctgccacaacataatctggagtagacagctccacacagagcatctaccaaccagtaaataaaatcacgacacaaacagctaaagtttaataagatccatcacctctttctacattcttacttcgctattcaattttgattctctaaactgggaaaccaattaagtggctttactttgggcccaaccttatgctctcccacaagttccctttctcagaggaaacagacaggcagacacctgccactccaacgctgagggagaccagcagctccctctgctcgaccccaagaagcacagggttgcgcgtttgtgtcggcagtcaccagcttttagttaaccgaaatcacgcagggctgcaggctcccagggataaaacaaaaaggccattctcctctccgggccacatcccagggaggctcggcggtgggagactgtaacttgcaaagaatgcccacggtggtgacgttggcccatttcggggtaccgtgccgcaagcagcctctggcatgacccagacccgggccgcagtagccaaggtattaccggaagcagcctggcctctgcaaaaccacagcgctcggccgccgaaacaagcaaggcttgctcaccatgctgcagccgcgcggcgctcacccccaacaggggcggcgatgacaccctcgaagtccggcggggagaccaaggtccagctgaaggccgcttctgtaggcctcaccacacgtgcagccccaggacccggcgataacgtcacccagccggccgtggaaacggaccaatcgccgaggagctgatgggtcgcgaccggaagttacataggctcgctgcgtctccacgatcgcgagaagccaccgggaggtggggctagctcggctcccacccctgggcgggctgtacttttccggcctttagtctcccgccgggcaaagggaatcgtgggggtccttaacgttgaggcgccacagaggggtttctgcttgtggacgaaccttttatagctccctctacggagaccagaggggacgaatctagcatcccccttgacttgtgtcccttacctattcccaaccataaaaaacaaagccgcggacacggaagggaggcgaccaccccgctggggtgctggggtcgccaagtttcaggttccctctccgggtgggggcggagtcggttgccgtagcaacggaggctggggccttgcctttatagactgcatcagacttgatcaggttatattttccactgtttcatgaactgctttcatctgccctgttaaccaaacccccgagactctgttaactgtagaggcatttgaactaataaaatatattcagaatctctggtgtttgaatgttaactttctccccctgtttaaacaaataggctataagcacgcattcttaggaagatttcaggccggcgttggcgtactcacatagcttttcttggacgaaagtgtgtggtaaatgcagtcactttcatcagcagacctttttttcaaatttgtttccccaacttcccagtttctggtgacctctcaatgaatggcttaccctggattgtgtctttatgccgtaggcattatcactgtaagtatttgtggagtattattcttttattacagtaaaaattatagaaataggccaggcgcggtggctcatgtctgtcatcccagcactttgggaggccgaagcgggtggatcacctgaggtcaggagttcaagaccagactagccaacgtggtgaaaccccgtctctactaaaaatacaaaacttagccaggtgtgatggcaggtgcctgtaatcccaactacttgggaggttgaggcaggagaatagcttgaacccgggaggcagaggttgcagtgagctgagatcatgccattgcactccagcctgggcgacaagagcgaaactctgtctcaaaaatatatatatatagaaataatttaggttaggaccataaaacttgtcttaggatattgctttgtaacagagataatacatagcactcctatgtgccagagattcgttgttattattcattatatagaattaaaagatccaagggggcagttttcatttcctttcaatcagttgtacttactgctgtatcatcaggggcctgatgcatggggcatatatgctcagtaagtatttatttaaatgaattaatgttctggcactttatctgaatcatctcatttcatcctcactgcaacactatgaaagagacgcaattatcttcagcatcttacaaatcctaaaaatgaggcaagagaaatacaaactaagtactaagccccccagctgactgaacggactcccttttggccaaggggacccagagtaaccttgaaaactgagttcttgctttgccttgttatatcccctccctcactaaccaggatcaggctttcttccctaagggataaatagaaaccatccctttcaaaagactccaccactgatatcagcctgttgctgccctccgttttgtgcgtaacagactacccactatggaatggttctggccaatctacggagcaggcacagtaagggttttattggcctctacttcaccttttgacatcagaggctgaaaactcttcagatcatgctgatgccccattgtttgtacctaggacccatgaaggggcaatgaagctcaattgcacatgtacatgtttctcctttcataaatattcatgattcctccta

SEQ ID NO: 585416 - DNA, 4001 bp, Homo sapiens
tactgggtcttagagacatggacaagacaggggaaacagagctagatgtcaataggcaggtgactggattgagagggatgggggatactggaacactcagatgatggggaaggaatggaggaaccactgtgcctttctcaggtcagcctgtctgggcagaatccacactagagattcttttctagggggaagaacagcaccagagctcagacaggcacagtggctcacacctgtaatcccggcactttgggaggtcgaggagggcagattacgaggtcaggagttcgagaccagcctgaccaacatggtgaaaccccgtctctactaaaaatacaaaaaattagccaggcgtggtggtgcacgcctgtagtcccagctactcgggaggctgaggcaggagaatcgctggaacccgggaggtggaggttgtagtgagcagagatcatgccactgcactccaccctgggtgacagagcgagactttgtctcaaacaaacaaaaaaacagcaccagagttcaagagagaaaattacacaaaagtcatatagatgctagtggtacaacagacggaggcctaagaaatcacagtgaccaaagaatgtgggtgttttcagagagggcagtgcaggatgctgagggtgttacagaaagatatttgcactgtggaattcaggaagggtgaggtgtcaagagtccagcctggggaagaaccaaaagtcctgaactattgaggaacaagtacatgcggcgcagctcagcaaaagacaagcccaggttcagggacagtgtgaccatggggtccaggccatcaggctccgtcccagcatggaaattggggaggggcagggagaggttcagggcctggtagaaccactgaatctgggagtcagacagaggcagggccaggggcctgtcatggggctccggcagagagctctggagttgggggcttgaccaggagttgcaataatcgtactgacagcactgggcctgataccagtactctgcaaagtaggtgttgcgtttttcttggcagcggtaggaaatgtactgtccacagcctcgaacgatgaagcgaaccttgacatctgagggagaggggaaagctgataaccccttccaatagcttcccatagtccaagaacccctgctactgacttttcccatccttcacccagacctaatttacttctaacccagagtccttcaagaggctagaaaagtgagctctgctggccccctagaaccttagacccctccttccaagattcttctggttttttttgagacagggtctagctctgttactcaggctggagcatggtggcgcaatcttggctcactgcaacctatgcctcctgagtttaagagatctcccacctcagcctcccgagtagctgggactacaggtgcataccaccatgcctggctatttttttgtagagacagggtctcactatgttgcctaggctggtcttgaactctagagcttaagtgatccacctgcctcagcctcccaaagtgctagggttacaggcatgagccattgcactcagcccctcctctcttcttgtaccccatgcccggagcagccctgatctgtgagaggagagaagaccaagccattggctgccccaccagcagccccttcctgggaccttatttaccataatagatggtgatcaccatgcacagggatgagctgctgatggtacacttctctgagcctgaaatgcatcctacagaagggtcttctacgaggcagaagtggcacgtccggatgtcgggaacaggaactggggaggcagaaggagggatggaggcactgggtcactctcaaataccctgggccagtaggaagcccgattatccatggccacgctccacccccttcctggactcagttaccccttcctccctccctgcccctgggccccacttaccctttcctactgtgaagcccaccatgaccagcacacctacaagcatatggaccttcattttggaattctggggagatgggcagttcctgaggggatgccctgaaaccccaccttcctgtgaccatgctccttaatcctaagctgcagggtggttttgacaaggtctgagcaggagctgctgtaaatgcagagctatattcctacttggggcaggatcctggctgggaaggaagttattacttggcaggagggacagcatgtcctcacccacaacgtctggttcctgagtgtgggagtaatggcccagatggggtaatacctgggcactaccgggttctttatccagtgtctacctttgtcttgcataccctccaaagacctattccctcccttggaaagtccatgggttagtatctatctctgccaccatgtgctgtcttcgtcatacaacagggccaatccccactgtgctgggacaacctggccaggaaatcaagcatccccatccttctgagatgagcagtctcagctccaccagcggcaggcacacacacatcactgagcagcaattccggaccttgtcccacctcgttccaccctttagttatactgactttaggctacttttcctttagaactaaaactaaaagatggagctgctgattaagccccttacagtataaacagacagtcatagatatccaaacaaatatttctcatctttgaaatatgctttgtcttttccttttgaccttgcatttcatcacacgcagtcctaggaattctgttctgctccatactaaaaacaccacccaatccactgagcacaaatctgtcctggttttcaatctggggagggtgggctgggccatgagggcccctggagtccaacacaccatcaccttcccttccccaacagcaagcaccagcagactagctcatggccttttcttctactttatttcatattcccaccacgataacgactcctttaatttaaactaaaaaccatacagggttcctgaaagggtggcaaaaaagaaaggaaaagtcaaagactgcaggacaggtgggggagggaatcagcgaatcgtcttgactgggctcttgaagttgctggcggcttggagctgcagctggtaggccatcggatggatcttgaaaccgtagagcctaggccagggcagaggtcagagaggcagcagcatgagccccatccaggccctgccagtcacctgcattcccacctccccacctgagctcctctatggacctgctcagagctaaagcctcgtggttcccaacttctcagctcaagaacattctacaataaggtaactcaagcacagataatcaaataactttcccacagtcactcagcagggagatgccctgattctgggagaagcagacctcaagaaagggccatgccctgtcctcccctctctgggggatcttgggcctttcctttgacccttaatgactctccctgctccctacctgggcacaaactggttggcaggtctcttgggccggtactcgggatgcaccatgaagagcatgtgagggaaaccagtgccgaagtaggcgccatccgtgtgatggtgtcttgatgacttgggtgtgtacacatccatgcacttggggcagtagagcttcaccatggcttcacctgggatgtctgaaaggcctgggagacagccagactcagcaggccaggtatccccctattcctacctaacctcccctcaggactcaggctccaatgtgttgagccccaactccttcccataagactgccacacggtgctttcctttcccttcttcaacactcaccaatgggaagcattggctggttctcacagtacacacgaggacagtaaccaaagtctccttgctggtacttttccaactgaggtgaatacaatggaaggggttggcaggtagatgtaaagaagaggcaactcccttcgcagcccaacccataccactctgtcccccactcctcccacctctgtccagaggccccttctctggactagatgggctctcaaactt

SEQ ID NO: 585417 - DNA, 4001 bp, Homo sapiens
tcctctgcttttgagtatatgaagtgggaagacagctaaggaccaaaccttggtgaacatgaaccactaagggtcagagagaaaacgctccatgaaggagactgaagaagccgtggaggatgcaggagaagagcaacaccagcagtaactgcagacagatgcggaagcagacagcttgaggacaggcaagggcacctggagatctggagggtccccgtcaaagctgcgcaccttgatagggtagaagctattcagctacagattgaggagagaaggttagtggaagtggagacagagtgtggctctgaagaaaagggaagagaggctgggcacggtggctcacgcctgtaatcccagcactctgggaagctaaggtgggtggatcacctgaggtcaggagttcgagaccagcctggccaacatggtgaatccccatctctactaaaaatacaaaaaattagctgggcgtggtggcgtgcacctttaatcccagctgcttgggagactgaggcacaagaattgcttgaactggagaggtggaggttgcagtgagccaagattgcgccactgcactccagcctgggtgacagagcagcaaaaaaaaaaagacaggattggagcaatgtcttatgggattatgggaacaagacttggggtgcagcttaggaggctgagagagtttccgtttgggagagtgctgggcccatgacaggagaaggccacttactgttctttttgtggagagtgatgcagctgctgccagctggggtgaggcagatgtcagatcccagaaggcaccctaactccttggtctccaagaggcatcggtagcagcgcaggtatttggggaatggaagtggttgagggggttcccaattgacaggaacaaacttacctagaacacagagaagtgctgaccccactcacaccccattctacctcacaccctaccactgcctgattccaggccactcagccccactcctccctcccttcctgtctcagaaaaccatcaaagccccaattctctgcttccttccccaactgcatacacatacatcccccttttcctctggtcctaaggccagaccacatgttaacaaatccccagacccagcagagcacttggtgttaggcagaggaaagtgctaaaccaacactttgaatcctgtgtctctgtggctggtgctttgcagccaagtggggagcccagcaggctggactcagtcttgttctatcctgtggattctggttttctcatccagcacactccctaaccctccctattctatgttgccctcagatccagagaggattccttcagtatctctattcaggtcactgctgtgaagtgagacagccctggggtggtcactagaaatctccttcagaggctgggtgcggtggctcacgcctgtaatcccagcactttgggaggccaaggcgggcaggtacctgaggtcaggagttcgagaccagcctggccaacatggtgaaaccccgtctctactaaatatacaaaaattagctgggcttggtggcttatgcctgtaatcccagttattcgggaggctgaggcatgagaatcgcttgaacccgggaggtggaggttgcagtgagccgagatctcgccactgcactccggcctgggatacagagcgagactccatctcaaaaataataataataataaatttttaaaaatcttcagattgcacatcagtccatgagcaggcattccctaccaaacccatctgtcccatctctcctcctgcatgggtttacctgagcatcctggacaggtgtacccagacacttggtgtctgtgggtttctccatccaggccaggagacccttctgaacccttggagccacttaccaaacaccaagctcatcatgaccagcactattaagaggaccgtgtagagggcttgggggctgctgtggaagcacaggggacccagactctggctccctgcagggcctgccataaaacgcatgactgcctgctggcctccagtttgggcttatattggtggaagagaggttggccaagaggaaggagagaggcaacaccagctcagggtggaaatcagtgccagaccagccagaggggcagaatgttcgcacccacagccactctggggcataacatcctgcttgagggcaggggaccagcaataggggaatgagaaaaggaactgtctttcctattaattggacagatgtttattgaatcactgcatcagatgctggggatacaaccctgcacaaagtctccaccctcacagggcacagtctagtaggggagacaagtccaccagcaatgatgtggggagggcagagtgctgccaggagcacctcgacagttaaaccactgaccagagggatttcggcagaggagtaacttgatcggatttctgtttataaaagattgccatggctgcacattgcatttgggtcaagagtggaggccgccgggaagtaggacgctattcccgagtccggtcacaagatggcggactggtccggcagaagacgagcagggacgaggaagcggggctaatgaacctgagatacagttagaagactggacagatttgctgttggactgaacgaggggtgagggaacaggggtaggcttgcacaaggaagtggtaccattttccaagataggaaacatgtggtctgtctcaaaaaaaaaaaaaaaaaagcaaatagggggtgcccagtcccacttctcataccctggggacacctgtcagacatcctaaaacaaggacacctggatcccaagcgatacgtactcagctcagtgctcccttggggttccaggaacccagcgccttccctcacctcatcctttttcctgccccgcctgtgctcagctgcggctcagtgggcctgaactccggagcccacagaatctggcgctgggcgtccgctctccgcgcctgaccgcacctcagaactccggtaggacgggggggtggccccccgctcaagctctgttccctggggaagaaacctggaaagtgcgaaccgcgcgtcgggacccaagcgtcgggccccagcggacatccggagcccgaagcggctccccaggaaggcggcgccgtagcgccactctccctcccaggcgaattctggagaccgcggccccaggcgtctcacccattttctccgctggggacccgctgggctccccatccacgcctactcggtccccaccccaccagctcagtcttgactcagaaactcagggtttttacttttaggatcgttgggctgtgcgttaggggaggaggtggtcctcagcgtcctggaacgacaccacctgctccaatttcccgtctggaggttctggtcgaggctccgaactcgggttccctgctacctcccagactattcaagaattatccagtcccaggatgataagggggaagatgggaagaaacagacgggagacgcccgcccagaaagactgcgggaagaaagaaattcgagaggaaactgcacgccactgagcgcctcccaaaagccttggaatgaatgaatttaaaaactatattagggccggactgcggtggctcacgcctgtaatcccagcactttgggaggccaaggcgggtggactacctgaggtcaggagttcgcacccagcctggctaacatggtgaaaccccgtttctactacaaataccaaaaattagccgggcgtggcggctcatgcctgtaatcccagcactttgggaggccaaggtgggggatcattcgaggtcaggagttcgcaaccagcctgagcaacatggtgaaaccccgtctctatcaaaaaatacaaaaacattagccaggtgtggtggcgcacgcctgtagtcctggctactcgggaggctgaggcaggagaatctcttgaacctgggaggcagaggttgcagtgagccgagatcgcaccactgcactccagcctgggcgacagagtgagactctgtcttaaagaa

SEQ ID NO: 585418 - DNA, 4001 bp, Homo sapiens
ccatgttggccaggctggtcttgaactcctgacctcaagtgatccaaccaccttggcctcccaaagtgctgggattacaggcatgagccaccatgcccggctgtgttactgtctctttttgaggccgttttctcagtataataatagcacccacatcacagggttgtcatgaacattaattgaaaaaaaggcatgcaaagacataggatgttgcctggcacacaaccatctttggccaaatattatcattgctataatcctctgcttctccatctcagtcttagacccatttgggcctcagtcctggtcatagaggctcccacctccctgttcaccccactaaggaaggggatgttaccaaggtatgcatgtgttgtcaggcattgctgtcctggctccaggcggcaggactgccggtccacacagcccagcacagggaccttgtagcaggagtgacagcgaatgtcagctgggaagacacaagtcaggctgaggtgatggggtctctgacttacctggggataagctgagctgggggcaggggtggagggtggagaagagcccatcccgtaggtgctccaacctgtttggctgtttggtctagcaagcacagagcaggtgagtgatgcagggaaaatggaaagtgggcggcaggtaagggtagagctgttgctttgtgaaaggcccacgccctacatatcttccatcactccaccccgtttggaggtgagtcaagagggacagaactatgaagaaaaacatggggctggagatagatggaatgtgaggaagataccatggggaaagaatgtggatggtgaaggaggagatggaaacttgaaagaaggagaaataataaaaatgaaaatcatgagggttacaacactgtcagaaatgccttggaacttgaggctggcgagaaagccatctgtggccagctttagcaatttacaatttactcttcacctcctggagctggcaagagtgtggcaagaggaaccagacctgaatagaatcctctcaccccagtagctcttcagcagaaaggaatgatacctgagagacagatcaccagattccatcttagcaccttatcaaaatggagagggtggatacagaaggtggcaccccaagtttcctgcttcagttaattcaaggtttgggcaggcaagatttggtgacgcagggtccgagggtggaagagcctggtaagtgtacctcagtgaaatccacttcaccctggaggtaagtggcccagttgtcccctcttcagaaggctcaagaaaacgctctgtttccatggaggctcttagatgtcactgcaaccatctagaaagtttgtatcccctgtatgggaggaggtatgcaacccaggaggggagtagggggtatctaggaaaggccatggctgagagactgaacatgtgagtccctgatggagtagatggggagggtaggttacaaaaggagcctggggctggatgcctaggtcttcgagaggacaccttactgagcacagcagatagaggagaaggcaggtaagctagactctggagagttgcatattgaagtggggctggttggggaactggataccagagtttccaaggaggagacaccttggagtggggaacaggggacccagagccctggcaggtgagagaaatgggtctttcttggaggtggggaggatggatggagacctggctttttgagaaatagagcaaggaggctgtcatagggaagcctggtcttggtggcacaggagagctgagccagttggggctgggggtgttgggatcccgagtggtgggtagggccgggaagtgggtagagcagggtgtaaaggtcctgaccaggcaaaccaggtctttggggcccccaggtgctcacctgagacccagcagagcagaacagacagggtgagcagcataagggctttcatggcgagggtcctgagaatggtggcaaccacagcagctgatagagtagattttcaaggatccagctctaggagttgagtggcctttttggaatttataaacccaaaggctcctcccttccctgcctctggtagcccctcccttctcacttactacgcagctgaccagagaaaagacaaggggtgggaaggcactgagcaggactgagtggggagtagggatgggagagagggatgggggaaggcaggtgccactagtggccaatgccattgtggttcttggtttcaggccaagatgcccttcctggtccccagctaagagtcctgctgctcagtcctctgaatgagcatcatcaaaggcctctgtgatttacagtgtccatggtggcagcttctgctggttcctggaaaatggacaaaaggatgtggcccaaattaattgctgaatttgggtccctgggtccctgctgggcattgataggggcatgctggtggaaattgggggaggaatgggtcaaattaatctccattcagcccccactcggtctttccaatgcctgctcagcaataagtgactcactgatggcttctgtgatgccacagcagcagaggcaggggctggggctactcatccaggagagccaccacaggtctgctaagtagggctgcctcaggctcccatgaaggttctcaggatgtcacccgtgctccacttgcgcttggtgtggccttgttgctccagtccagcagcagcaattgtcctaggtgtggctgtgtgcacctgctccaaagcacctccccagtcaaaacctgccaacttgggcagggtaccaagccaggaggaacagcatgggcacagagaggtgaggtagaagctaaaataagaatagaaatagtaggccgggtgtggtggctcacacctgtaatctcagcactttgggaggccgaggtgggtggatcacaaggtcaagagatcgagaccatcctggccaacatggtgaaaccccatctctactgaaaatacaaaaattagtcaggtgtggtggcatgcacctgtagttccagctactcaggaggctgagacaggagactcacttgaatccaggagccggaggctgcagtgagtcgagattgcactccagcctggccacagagcaagactctgactcaaaaaaaaaaaaaaaaaaaagaatagaaatagtaataataatggcaagcacttacatagtgatcctatgtattctaagcagtttacatgtattactttatttcgttatcacaatcccctacaaaacaggagttttttttgttgttgtttttgagacagggtctggctggctctgtcgcccaggctggagtgcaatggcctgatcacagttcactgcaacctcgacctcctgagctcaagcgatcctccctcctcagcctcctaagtagctgggattacaggcgcacctgaaaagttaagcaggccaaagcatttgtgtaaatggcccgagcacacattttaagtgagaaccatttgaagactccgagtttgcctgcgaggattcccaaagggatctgggcagctggtggccccgccccctctcttatcggagccccccagcccctccgttctccccacgcctaacttccctccggtccccccccaaccggccccacgccgctgattcgctcgcagcttctcctcaccacatcctaaccatggctgtgtttctgcagctgctaccgctgctgctctcgagggcccaagggaaccctgggggtaagcgatccctgggagagttgtgatagacgcagaggggctgaagcaagataagggccgcctagtagggtgggttgtgtgtgggaagatccaggatggctggagtgcagaacagagaagagaaagaggagacgggatggagggtcgtcttgccctgtggacgtgccctaaccacagcctccggcctctcctagcttctctggacggccgccctggggaccgggtgaatctctcctgcggaggagtctctcatcccatccgctgggtctgggcacccagcttcccggcctg

SEQ ID NO: 585419 - DNA, 4001 bp, Homo sapiens
catgacctcaatctcatcatggcaaatatcagataaataaatatcgagggacattctataaaataatttttagtatttcaagtatctgtaattttttttttttttttgagacggagtttcactcttattgcccagctggagtgcaatggtgtgatctcggctcaccgcgacctccacctcttgggttcaagcaattctcctgcctcaggttcccgagtagctggtattacaggcgggcaccactacacccggctaattttgtatttttagtagagacgagatttctccacattgatcaggctggtcttgaactcccgacctcaggttatccacccgccttggcctcccaaagtgctgggattacaggcgtgagccactgcatccggcacgtaatttttgtttaatctaaaaatgattttatttaattttagagaaaagatcttgctctctcactcaggctggagtgtggtggtgcaatcatacctccctatagcctcaaactcctgggctcaagtaatcctcctgcctcagcctctcaggaaactgagattacaggtgtgtgccactatgcctggctaattttttaaaaacattttttgtagagatgggggtctcactttgctgcccaggctggtgtcaaactcctgacctcaggtgactcttcagccttggcctcccaaagtgctgggattacaagtgtgtgccaccaagcctagcctaaaaattattattattattatttttgagacagggtctcattttgttccccaggctggagtgtagtggcgtgatcatggctcattgtagcttcaatctcccaggctcaagcgatcctccctcttcagccccctgagtagctaggactacaagcatgtgccaccacacccaactaattttttaatctgtttgtttgtttgtttgtttgttttttgtagagacagggtctccctatgttgcccaggctggtctcaactcttgggctcaagtggtcctcccaccttggcctcctaaagtgctgggattacaggtgcgagtgactgcactggccctaaaagtaattttttaaactccaggtataaaataatttatcagggctcttcaaatgtgtcagggtcatgaaagacaaagaaaaacagaactggcacagatcagaggagactaagaagacatgagagctaaatgcaatgtaggatcttgctaaatcaaataaagtctgtagattagttagtagtattgtatcagttattttgtgattttgataattgtgctatggttatgtaagatgttagcattaggagaagttgagtatttctgcaacttttctgtcaatccaaaattatgttaaaataaaatattaaaaacatgtacacacacacacacacacacacacacacacacacacacacccctccctggtccttaactaatgccgaaaatttgaagtttggttttaactttggcctttcagggccagagctcttcatttgtgagctaatgggcctatgagattcttttaggagaataaggaggtggggaagtgggggcacaaggactgtgggcctctcaggggctccgtgccaggagccagaaggggtacagactgctctcctctaacagctgcaccatctgcccagagccagactgagcctggagggttctggaagccagaaggattgacatggggctggaggcagggaaaggctgctggaagagggagaaactgaggactcacggtttccaggtagcttgatctgttccaggcctggctggggtctgccctcgccacaggtggtcacggcctctttgcaagaactgctggggcttccaccacagttgtagcaccgcattcggtttcctggcaggagaaaagaggcgctggacctgggccctcggtggagccggctggcagaaggcctgtgtgagaagctagctggccgcctccttacccaaggcagcccctagcagggagctgagcaagatcccaacaaactggggtttcatcgcagtctgcccgtgtcaggaccgcctctacctcctgcccacccccctccccagcccggctctgcctgccttatatcccccgtgccttgagctttatagggctataaaaaaggaagaaagagtctcccccagcaggcaccaagggccccagtggggacagggaggggccccacagcatgctctcagcatcctctggagtcctcaaactcctttatcctcagcagcagtctgtggaccaacaagaacccctgaggatccctgataccctttcacagggtccttgagggtcctccttttgcaactatctgtgtaaggtcagattttcttcatatactggacttcaacgaaaacaacatatcccaacagactgaatgcagaagcagataggaaaacccaggcatctcccacgaagcctgacactagattcacaaaaatgtaaagcaatgctcagcttctcactgtgctgtggagaaataatagttatttttcacaaaactgtattttgttagcatgtaatactttattatttttattgtttaaataaatcaataaatacctactttaaattttctgttttaatttttaatgtagtaaatattgatataacctcataaagaaaagctcttcagagtcttaagtaactttgaaaagtgtaaagaggtcctgagatcaatatttttgaaaagagctgctctcctgggcacctgtgtctcccctatcttcactccctgttcctagtcttactcctcctggtacatgctggctctgattccccagatgggccttcctccttcccagtctcttcaaccccagccttccaggctgtatcaccacccccctaccccaaatcccatccatgccttcctttctagtgatttctccccagtgcaagcacatcagcaggccctccagccccacccgtggttatttctttcctccaaggtagtaaagctggcagggataattacagggtaggaatgttgaagcttggggggatcaaagggatctgaagctgggtggggtccgcccttacacagctgggctttgtgtgtgcatgtgggtgtgtgggtgggggtattgttgattctacactcaaacagatccacgccggggctgtttaggagggtgactttgagagacatgaaagcactgagggggaaagacagagaaaacaaagacagagagaagctgagagagccagggagcagcttgagacatggggagggagggggaggagtaggagggaaggcgacagacacaactcaggagcaggagaggaagctaagttacagagacaacatgctgagagagcagaggagaccctccaggcaagggcagactccttgcaggggcaggctgggggcccccgctgcctgctgggtcaggctggtgaatctggtcatggttccgccccccagattcactccctaggtgtgtttgtttactggttcctcactgtcttgctcaaatgctccaactctacaaatcccgggatctcggggtgcagatcacctctcccagattcctgagcctgtgtctggccatgggcacctccagcatcttcctctgcgtgctgttcctctgtggggcactgggtaagggtgggctggggaaccttcagtggtcagggggctgggggtggggacaagggcatgtggaggaacctgagggctggggaggagaggggtgtgggtgctggaagaggccaagaagagagctgggggagtgggggacttcagggagaccagccactgggaaggccagcctgatgaggtgggaaaggaagagtttcctttcaaggcatttgagaataactgtctcccccttgctgcatctttgatccgcccctgtctcccctatcccttatttcacgtgttgcttctgtgctgggccctttggtcaatgtcaatttctattttcctatctgtctctggtgccatttacttaactttttcactgaccccctcaacttccctgctgctgggtctggctttttgtct

SEQ ID NO: 585420 - DNA, 4001 bp, Homo sapiens
gttgcccaggctggagtgcaatggcgtgatcttggctcactgcgccctccacctcccaggttcaagtgattctcctgcctcagcctcccgagtagctggggttagaggcatgtgccaccatacccggctaattttgtatttttagtagagacagaatttctccatgttagtcaggctggtcttgaactcccaacctcaagtgatccgcctgcttcggcctcccaaagtgctgggattacaggattgagctaccatgcctggcctaataataataaaataaaataaaataaaataaaaagtagagaatggcaatgccccctgctcacgcatgggcaaccaactacagagcagaccaccagccataaccacactttcccctcacaccctttatagtaattcaccctttctttcaagaaaaaatagccagatgtgatggctcatgcctgtaaccccagcactttgggagaccaagataggaggatcatttgaggccagtagtttgagaccagactgggcaacatagcaagatcctgtctctacaaaaaatttaaaggtgcggtggctcatgcctataatcccagcactttgggagactgaggcaggcagatcactagaagtcaggaggttgataccagcctggccaaaatggtgaaatctcgtctctactaaaagtacaaaaaattatccaggcatggtggcgggcgcctgtaattccagctacttgggaggctgaagtgaaagaacatccctttccgtctccttcctcagtttacctgccaggctaaagctgacccctttgttgtgagtcatgaggcagcggatgattcttggtcttcggctcctgggctcagaaagcccctccccaggacacaccaagagcagggcagcctcactgccccagaaggactgaacacggcccctcacgggacccttcccttcctgccaggtcacagagtccatgcgtctgctggggaccacagagcacaggaggacattgcagggggatccatctgcagcccttgcagataactgggatcctgtaggggagagagggattcctcagttcttcacctggacttcctgggccacagtagcccctggtctgcatgcccccactcacctttgagcaccaagacgtcgtacaccctccagttctggtagttgtggtgctgacctagcacagcgcaccagtaccgcccggcatcttcctctttggatccctccaaccacaaagaatagttccccagcagtctgagcctggattcccttcctggttttccagggtctggggctggcctgcccacttggacttgggctaccagggtggtgaaggagcctgctgcagggctgcagaaccatgacaggtgttcgtccccatgtagagtaggtggtgagggacatggcagctctactgcctcccccaaggccacatagatggcctgcatgttgtctgtgggaagagggttgtatgaggccagagacctccatcagatcaataaccccccatttgatcttcaaccctggcttccttcccttctggggtcccccagcacaggcctggctggtgaccacatttctcaagtgacagctacaaaaataagacaggtggagagaagagggtaagggctttcctcctctctcccccagccagtgagggggtctgagggcaagagggaaaaggctgaaagttggcaaatgcccacatctcttctactcatttctacttttctggaagcatttactcattcttcttattttataaaggaaactgcataacctggaccctcgttgcctctgggtcttccctagtgtcagaggcaggaggaggttggttggggtaattctatcttcttgagtcagatgccttcgccaggctcctaggagaaagagcagtagtccctccccaaccttgcaaatagctaaggaatcccgtacctcttgccccttacctgcagcctggggagttccacataggaacaggaggaggaataagactgccatggggagagcctgccaagttctcttgctccaagacctggtgtccccagggaggaagcagagtccagataaaggcccacactcgctggtctggagtgacaaggggctctggaggggatgggaatgctggggcgataaagcccagcagcatgtctactagggataaagtgaccaccacttttctatcctggagagaaaaggacccagcccaggccactctgaagatgacctttttgctcttctgattccacatcagctaaggggctcaaataaagactttccatgcaaaaaaccatgcagagaagtggtcctgcctgtctagctcttgtcagtctggaagtacattctgaggtctctttcactcctaagaaaggtcagccatgagttgggtggatcacttgaggtcaggagttcgagaccagcgtggccaacatggcgaaaccctgtctctacaaaaaatacaaaaattagccaggcgtggtgacatgtgcctgtaatcccagctacttaggaagctgagaggcaccagaatcgcttgaacccgggaggtggaggttgcagtgagccgagatcgtgctactgcactccagcctgggagacagagcgagacttcatctcaaaaaaaaaaaaaaaaaaaaaaaaaaagaaaaagaaaagaaaagaaaagaaatgtcagctatgagtgaagaaactgagtttgagtttttatgttggtcctccacagaacccagcacaagactgtgtatcgagtcagtgtcccgtaaatgatttggaatgactttccctgtggttgtctggcataccccggacctctcctgaaaccctaataagtgtattaaattattactcagggacaaggctaacgggctgattcatccttctgaacggcaaaaactcctaaggcagatcttcatgcagttattacagttttaatgtgtaatttatttatttttaaaattattttgatgaaatattccatacataccaaaaactatatgaagtacaactatataatggataaatgcttaacagagtagaagactggacagcaatgagaatgaacaaacctagtgatttgcaacaaagttgaatctcacaatataatgagagtaaaagaagcctggccaggcatggtggctcatgtctacaatcctaacacttttggaggccaaggtgggagggttgattgaagccagaagtttgaggttgggcaacagagcaagaccccaactctgaaaataaaggccagacgccgtggctcacgcctgtaatcccagcactttgggaggctgaggcaggcggatcacgaggtcaagagatcgagactatcctggccaacatggtgaaaccctgtctctactaaaaatacaaaaattagctgagtgtggtggtggatgcctgtagtcccagctactcaggaggctgaggcaggagaatcgcttgaactcaggaggcagaggctgcggtgagcagagatcatgccactatactccagcctggtgacagagcgagactccgtctcaaaaaaataaataaataataaataaataaataaataaataaatagaatattccaggccggactcggttgctcatgcctgtaatcccaccactttgggaggatgagacaggcggatcacctgaggtcaggagttcaagaccagcctgaccaacatggagaaaccccatctctactaaaaataaaaaaattagcagggcatggtggtacatgcctgtaatctcagctacttgggaggctgaggcaggagaatcgcttgaaccccagaggcagaggttgtggtgagccgagatcgggccattgcactccagcctgggcaataagagcgaaactcggtctcgaaaaaaaaaaaagaaaaagaaatagaatattccaggccaggcacagtggctcatgcctgtaatcccagcactctgtgaggccaaagcaggaggttcacttgagcccaggagttcgagaccagcctgggcaacatggtgagacc

SEQ ID NO: 585421 - DNA, 4001 bp, Homo sapiens
cccccatctccctccaaagtggcagatatcacaatgccatgcgtttgcacaagccagtccctctaacagcagatgtgatcctgaggctgggctcctgagttgctccccacttgggagccctgtatgggatgaattgcatcccctcaaatttatgtattgaagtcccaacccccagtacagtacagcccccttatccaagatttcactttccaaggtttcggttactctcagccaactgcagtccaaaaatattaaatagaaaattccagaaataattcattagtttgacattgagcatcctcctgagtagcatgatgaaatctcgtgctgcccagcccaccaggaacacgaattgtctagaatatccatgttgtctctactaccggcctgtccgtcacttagtagctgtctcatttattgggtccaaaaaccatagtatatgtagggttcaaaacgatctatgatttcaggcatccactgggagtcttggaacgtattcctagcagactggggggggactacggtatcttagaatgtgactgtatgtggagatagggtcttttttttttttttttttttttttaagacagagtttcgctcctcttgcccaggctggagtacaatggcacgatcttggctcactgcaacctccacctcctgggttcaagcaattctgcctcagcctcccaagtagctgggattacaggcgcgtgccaccatgcccagctaattttatatttttagtagaaacagggtttttccatgttggtcaggctggtcttgaatgcttgacctcaagtggttcaccctcctcagcctcccaaagtgctgggattacaggtgtgagccatcatgccctgctggagatagggtctttaaagagctgattaagctaaagtgaggccatggaggtgggccctaatctgatatgattgtgtacttataagaagaggagatgaggacacagatgtacacagagggaagagcacatgaggagacagggagaagatgccacctagaagcaaagaagagaggtctcaggagaaaccagcccagcttccagagctgtgaggaaataaatctgttatttaagtccccagcctgtggtggtttgttatggcagccctagctgactaagacacagcccgattggttggttctgacacttcttaccacagttcactgcattctcttcactgaattgcaattatctgttggcgtattgggttggcccgctggggtgacaggcctggcatatgcacttttattatctctagcactgagaaaccctggcattgatagctgcatgcgaagtgcttgctgaattcatgagagctactgctgcagtgaaagctctgaaagtgtccagagagggacaggaatcttctctttgggcagaagtgatcttttcacttcacttgcaaagtacatcagatggaaaggtagcccaggtgtacggtgttgaggaagggcctactggaagctgcttttcctaattttcagctggtgaggtttgatgatttggtagactcactgatcattttgttcttttttgggttctgtggtgttagtaaatggctatatttagattcaatttctctttcttgtactctttgttgttctgccattctcttccgctcccagtcctggccccaccgctccttcttccaaaagctcccagtggccctcccagacctgctgcaggtggagaaagtgttcagctgctggtcccctctcccctcccaccccaactccaactgagcactagcggctcacatctgtgggccttgctttccccataaacacacatgggtgtactgcaagggcttaccgcaactctggtagagcacttccaagccgctgtcgctacagaccacgtgtgtgggccaggctttcccaccgccgcctccactgcagctgggaaaaatcagagtccagaggaagagagtggctgtgaaacccttcatggtgggggcctgtatgggacacacagaaaaataaccggccaataaaaagcctgtaaaatttcttcctctcccctcaccaaggcagttggatgttcagtttcacttctcaaattttagactcgctgggaaccacagtcagaagtaaaaggctgagagcagaggcatttgaatactgttcccccaggaccttgaatctacaggtgtggctggtctggtctggggtaggatgcgtgctgactttctgctttcacagggagagggtcagtagtgatgcgtgaacttacctcttgggggcccctcagaacagcctccacccccaggtgaggctgtaaacttgggaaagacaaagcgcaggccaccatctgtttcccatctccagcccccgagtctctgcaggctcttgatgcaggctgtgtatggacccagggacctggctgcagccagcaggcagcagttgatagcacgagggctacagaatgacatttggaatctggaatgaggctttggccctattgtcactttcctctcctctggctttggctctgctcttaggtttgggattttagcagtgaattgtccagctgcagaacagaccttgttttgggagctgcagatgtggtctctggagatgaggcagaggcaatagccctgagaagtgagccgtgttctatttctgggtttggcttggtagaaaaagtaggaagggtggggaggtggggccacccttaaggaggctggtttgctggttttggtgttagtgggatcattgacatcacatctcactttctcttcaaagccaagattctgtcttccttcttccatgtatctctattctgctgcaggacagcaaggtttctcagtcttgattcctcaaccccgccccagcttcaccttaatgtaagaggaccagagtcagtgccaaggtcagcagatttcaggagcaatagaaaacactattttccctgggaggaacagcatttttctgaatgcactaggtaaatttactatttctgctgatggctaagcaaaaattagagttagctcaaaactttttttgaaataggtggaacataattaccaataaattaattggtaaataatttggatttcttgatagacatcagagagtggtcatttggagaaggaacagttgtggattgattatttttaggtacctctgcaaataagttcagtgatgatggctttcaacagcagttctcaaagtgcggcctgggaagatgacagcctcagcttccactgggggcttgttagagatgcaaattctgggctactcaagacctattaaatcagaaactctggggggcgggactcaccattctggattttcacaagccctccaggtgtgcctgatgcagtctcaagtttgagaactgctggcttttacagaacataaagcgaaggttgagccccaagggagtggtgggaagttgctctaagaagagacaaggtggcccctctggcctgtgtgagcggaaggcagctgcgctgtgagcaagatctcgggagatgagagtctgaagcttatggtgagagcagcggccctggtggaagcgtggtagcccctagaaggtccaggatggaacacagaagctttcccttgggatatgtgagtgctccagcagttgtaaagagagctctgaacatatgtgagtgaggagagcaattgagggtgagaacttccttccctgcaaagtgcgtcatgattgacactggaggaggagtccaggagtgcagggcagggagcagaaaacctagcagagagctgtgggcagctgtggcagggaaatggtcttagtatgttctggctgccataacaaataccttagactgggtggcttaaatgacaagcatttatttctcaccattttggagggtggaggtccaaagttggagattaaggtgctagaagattcagtgtctggtgaggggcctctggttcacaaatggtgccttctggctgtgccctcacatggtggaaggggcgaagggtttctcttaggcctcttttataaa

SEQ ID NO: 585422 - DNA, 4001 bp, Homo sapiens
tgcaacctccacttcctgggttcaagtgattctcctgcctcagcctcccaagtagctgggactacaggcaatgcaccaccacaccaagctaatttttgtatttttagtagagatgaggtttcaccatgctggccaggctggtcttgaactcctgacctcaagtgatccacctaccacagcctcctaaagtactgggattacaagcatgagccactacacccgacctcatagtagttttgatttacacttccctaatgattgtgtccagcatctactggccatttgttagtggtttttttcttcttttaagaactgctgagacatccataaacattttcaaaatgcagggtatgtttttcagtgttaaggcaactgttctgatgtgtttttcctttgctctctatcaccaaatactgtacatataaatagtaagactgggctttgtgttgtccattgttaatcctaaatgcaacaaaacacatggagactttgaaaatccttcagaataatgctatagttaagattttgctaaagcaagtgttttttctaactccttgagctgcatattgccttgagtaatcatcatccggattgtatcctgtagaataaagtgaaatctggttatagttttacctggttaaacaaggtatagctataccattttatctgttaaaatcaagaaccaatactacctattggaactgctgccttttagaaaagctaaaagagttccacatacatacatataaaatgtacaacataaaagtcaagtgatgatgctgaagagtgtagatactcttttatctacatattttaaaatactaaattttaaaataataatttaaaatcggtaacattacaagcaatgatcaagatataccagctcagtggcactatattccaagatgtctgctaaacttaaaaaaaaaaattcactgatcaataaaaagggttaggatctgtcctcaccatgattttgttctcacctcttcggtggcacttttgtttcttctgaattcttctcttgcccaatctttcaggtatttgcgatcagaatcatttggaacttgccgaattgtttgcaaaatccttctgtagaggagaagaacttgttgccttcttacgaactgtaaaagggaggagtaaatagcaattactactgcacaatcgccagcctggaaagttctacttcagcaaaccaagctgtaaccagagtacttctcgttggtcaattttgaaaaaggcaaagaaaaacttttttttttctttttttggccagatgcagtggctcaggcctgtaatcccagcactttgggaggccaagatgggaggatcacttgagcccaggaggtctaagctgaggtaagccttcattgcgctactgcactcagcctgggcgagagtgaggccctgtctcaaaaagatgttttaaagaaagcatcacgaggttcatctgatctttttgcttactgctctgtcaaacctaagaaccattaaaaaatcaggagctgcctaccgggctgaaaagggctgccggtctcctagaagttgttattacaacgacagcactttttctaaattaacagttgttcaaatctttggtaatctcatttgctgtttgccacagctcagtgcaatagacttttaccgtgggcactgggcagctgaggcaccgggactcagggaaatcaagcgcctgacgctgtctcacgcgatcgcaccaaaccaaggaagcagccagtgcctcccgtcaggccccgcggagcgaagcaccgccccgcaggcatcgggccaatctcagagggcgcgcacgccgcatcaggaccccggaacccgccccgttggggatagggacagatggagaatccagctcagacccaggtaagctgctttggaaggcagagaaccgccggtacctgctttaacgttagcgtcgctgggggtaagcgggaagcagccatgtccaccagaggtccgccggagcctcagcgcgcaggagcggaagtggggttcgaccaaggggtgtggcgagcccggtttcctaggagacggcccgcgggttgctctcggactgagagcgcgaggcttcgggactgagccctagctgctgcgctggccgaagttttctcgtcggtaaaataggataacagtgcaccatagggtcgttttgataaagaagaaaggtagggcacttaacacagttcctggtaaagagagttcaaatgaaagtgaaggaggccgggcgcggtggctctcacctgcagtcccaagcactctgggaggcctgtaaggtgcctgtaatcccagctcctcgggatgctgaggcaggagaatcgcttgaacccgagaagtgaaggttgcagtgatccgagatcgcaccactgcactccatcctgggcgacagagcgagaccctgtctcgaaaaaaaagttaaggtttttttgggggaaagaggtgaaaacgtatttaaatgttctttcgagcctttaaaaatgtgtatagttgaaaatactaaaattgaaagtgttaatttcttttacagtttgtgttggttttttctctttctcgtttttgtcctgttcttttgtagcgcaaaggttttccgggagcggtggccttcatgatcatttgaaacaaagctttgaatggctcacccacttcagtcttaagcacttttcatcactaataacgaggagcctaacatccctaagcctcaggcttttgcttttatttccttatagttgttttatctttcccacaatacacatgcctttgggttaaatcactagaagtggagttagcgaatctttgccatattaattttccaagtggtgttgtatcgaattaaaatagaacgaaaaatgttcaattactagtttactggggacttgcttgcctcgcctgttagcatcctggggctccctattcctagctgtgttctggctatttcccctctcctggcctattacctcccctgtaaagtgaaatatagcatctacctcagttgtgtatctctaatgtactgagaacaggtcctggcacatgtaagaactctaatcattagctcttttgaactttaccaggcattgtatgaatgatgctaactgcatgatcatattatcaataatatatgccaaattttgtctaatacattagctgtaatagttaattgctaactttttaaaaggagtgaagttaaatacccctcgccatttttagttatactgtttttgtgaattgttcatgacttgggtccgtttatgatgaggacatttatatgggctctatattttttgtcatttctttatacatacagaaactttatacaatcatgtatttttgtgccttttgaggcttttcatttcccattcaggcctttgtaattcgttttttaaaaactttaatttttaaaatatttactccatctagaatttactttggtttacagcatcacgtggatctaagttcttttctagatgttaagctgtatcaataccattgattacataactcattcctttttcggggctttatgatggatgcctttttgactgtatgataaattcttttagggtctgagtaatctgtccagaattgtttcatttagggttaagtttttactttttgttttatatgtttttattatctggcaggactctagtttcttgtaaaaaatccattagtactgttctctataatctttagaaatgttttgtatcatttccctccaaatcatcttgtgatcttggttggaattttgaagtagtgttgaatctatacattaatatgtgagaaagacatttttacattatttcttcttcccatcaagaaacactcaggccaggtgcggtggctcatgcctataatcccaacactttgggataccgaggtggatcacctgaggtcaggagttcgagaccagcctggccaacatggtgaaacctcgtctctactaaaatacaaaaaattagccgggcctggtggcgcacgcctgtggtccc

SEQ ID NO: 585423 - DNA, 4001 bp, Homo sapiens
gcttgggcctcatttgctcataaatcatttccaaagagaatttcagaaatggaagggtccttagagattgtctagtccaacagtctatttcataaacaagaaaactgaaatacagagattgagagacttgtccaagttagtcttcgagggctccaccttgactttcttacatgctctcacataaaccctctccctgccactttccttagtgtgtgaactgcctgctgattccaagtccttgtgtatcctgagtaagctttaatgacaaactattttactccagactatggtgaaatcaaatggtttctatttatttaacttgcatatttcatgtgtttcctcaacagacttggttaagtacttggtgctaggtgtttggttaattcttgctaaaattccaccagtatgcttattattacactctttattctccaaagtcaaagtcattaagtaaaatcattctctcccgtgaaatttaaccacttaactgggtggatacaacctcagtggtatgacccagatgctgttttcaaatttgcagcatgagtatattttccaggcgggtttctaaaaatttgagagtcattgcttaagaggcttagcgttcctgtcctctgacagaggttgtactgggcagacccatctcagggcctgccagctcacacacgtgctggaggggggcctacctaaccaggtgtgttccaagggtaggctctgctcttatgacatccaatccacagtctggccagtcacctaagtgaggcttgaggtaaagagatgagttgatccaaccagattctttctcatgggaatatggctcaaactcagagagagacaggtagttagtaaaaacaaaacaaaacaaaaaacaaatctaaaaaaaaatgcagagagagaatccataagaaaatgatgggtcagaaccagcaacactgtgaaagcagaggctctgaattagaaaaaacatacaaagagtaacaataaaagactcataggcaaataggggagtggggaggcgtgagaaaaagtgaatgtgttatattaaagatgtgagtttaggccctcaatatcctgctgtcaaggtccagtaagcgggatctctgtctggtgagccaggagaaactgaggtttcagctccaaagcttgtgagaccctttttccttttccgctacgcatttccaccataccctaaatagaatggattcttgcaaccaaaagaactcattacgacacctaggaaattttagggaggtgctagagtgtgccttcagctttgtcgcagtgtactactcactggccacttccactctcaactcttccagtgctcaagggaagttttacatatgcaacacactggccttaacttcacaaatgactgatttccatcccttttttctcttctgcagaaacataacactaatcatgctcctagaataactaccaagatagcctttagggggaaaacgtcacaagacatgaacgtctcccctggtagaaagaaaggctcctccccgaggtctcagaggccacacctgtaggcaggagcacgcttttcgatggcggagcccggtccttgcctcgcagccgccggcaaaccacggtggctcccagtccccggggatattccgcgtcagcccgcacccccggtccccggcccctggccccccgcccccggcccccggtgcccgctgggtcacctgtaattgtaggcgctgaaacgcttgctctctctcagcatcgcccggtacagagataacacttgtgcgcgactggaggctgccattttggaaagaaaaaaaaataaacgggtcctcttcgccgaggtcccaagtacgacccaacccacgaaactccagcctgtgcggaaaccacgaacgaaataaaatgctgcggctcggctttgccagcgggccgggcctaagcctaagcgggcagccctgcggatcgcggacggcgccaggcgtcccgcgccgcttcgggggcgggcgcaggcagggctcggggcagctaagggggcggtgctgggagggagatgcctccgccccgccccgatcccgcccccgcccggaggctcgggacccagcagccgctccacgcggcgggagggcggggaaataagaggactggccgcccgtgcatccagccaagctcctggcggacggatatcggaggcccaggcattcgagggacgtgcagttgcatcacggagagcctttgggaaccgtctggggtcttggcggagacatttgtgtttcgggggcagcgccccttcctacatccaggaggccgcgttgcccgggttaccgaaggccgccgcaccgacgccccgcccctgaccgccgatgcccctcccacgccggctgcggtcgccctcggcgctgcctgagagagtttgcgggatttcaagggtgacttgatttcgcctgatcctggtcggcagggtggggtttcttggcattcctcaggccgggggatgcgacgtctgggtgtggaggtgatgagctaggggttctgtggcactccggctctgctcagggcgacctgcgtaggggcctctggggcaggcccgctttctgtcaaaatggcagcgcccagcgtgcgcgggtatctctgaagttggggtttaagattcttgcccgtgagagcgaacgagcctgccgtacttctgattttgaaacacctgggtctgggcttcccgggcgagcggtgggtgagtgccggcctcattgcagcctggggtacgacgtgggcggttggtgttgtagggggtttacattggccgtggattttttcctctttccggatgtgtttttgcttttgagtgaagagttcccgtggttttgtaacctaataaatgcataaaatgcagcttgggttgtagactttggagaataattagagacctttagggctttaggctttctccaagaagcggagcaagttttcaaccatggctttcttcagaagactgcagcttttttgaatcatcttattaaagtggtggataaagttgcttgttctgatctttgagcatggcactggacgcaggaagcttcagccagtcctagttactgtgtttgcaaagcacttttcttgtttttggaatcttgctttatgtaatcaaccttaggaagaaccacacctttctgcactcaagcacagcgagaagtacgttatgcgtgaaaacaaaacaactttgcattaaaatccatctttctccgaaccacttggtcacggttgtgttctcatctgctttagtgtatttggttttgaaacgatatacctgctgtatgtctaaacaactttatattttcaggaacttttctgtttccttttcttttttttgagatggagtctcgctctgtcgcccaggctggagtgcagtggcgggatctcgggctcactgcaacctatgcctcccaggttcaagccattctcctgcctcagcctcctgagtggctgggattacaggcgcgcgctacctcgcccagctaatttttgtatttttagtagagacagggtttcaccatgttggtcaggctggtctcgaactcctgacctcaggcaatccgcccgcctcggcctcccaaaatgctgggattacaggtgtgagtcatcacgcccagcctctattttcaggaactttaaaggcagaaaaaacacttctctgaccttaccattctttagtgtacttgcaacctggtgtccttgcatccagatattcttactaatcctgatgcaatgacattttttaaaaggcactgaagagaaaatacttttattaagatatctttaagtctcctccctgatttcttgaaaatctcatgtctgttattgtttattattattttttaaacaggatagcaaaacttctattacttcctggttggtcaggtcattgagcaaatctagcctctgctttattgaaaggacttttttgagttttccctttgctatttcttaaaggatccaagaccaaggcaattgcacattgttataga

SEQ ID NO: 585424 - DNA, 4001 bp, Homo sapiens
cactgcacttcagcctgagtgacagagggagaccttgtctcaaaaaataaataaaaataaaaataatccatgtatatgaagggacacatgttatcagacaagtgcagcaggctctggttatcaagagggcccagggctggtcatggtgagaatgttgggagaatggtcttatctcttccttccaattctcatccttcttgagatctctcactgagttccctagtctctgtctctaagcagcagtttccctagtaggcctgtgcccctggctagcattgacctctacggcataacctttccttcagtggcacaggactaagaaaagtcacatgtgctttcaaccactgaagacccacataattggcctatggtcagctaggcccttttgcagattttggtctctctgctctcactgctttgggaaattatgctatgtggacagcatgatcagtaaacctgcctccctccttgtggccctgggaggaagccatggactctaccaagtctgaacccctgaagggatcaccagaggtaagtcattattgctgcttctagttttccaaggacaactgaggtctggagagaagagttgcttaatttctttttctttctttttttttttttttttttttttgagacgaagtctcgttctgtcacccaggctggagtgcagtggcatgatctcagttcactataacctctacctcccgagttcaagcgattctcctgcctcagtctcccgagcagctgggaccacagatgtgcaccatcatgctgggctaattttttttttttttttttagttggagtctcgctctgttgcccaggctggagtgcaatggcgtgatctcgggtcactgcaacctccgcctcccgggttcaagcgattctcctgcctcagcctcgcgagcagccgggattacaggcatgcgccaccacgcccagctaatttttgtatttttagtagagacggggtttcgctgtgttggccaggctggtctcgaacacctgacttcaggtgatccgcacactccttggcctcccaaagtgctgtgatttacaggcgtgaggcaccgcacccggctgagttgtttaatttcttgaccgtgtatgagcacctcgcagttcgagaagaggggagaagtggacacactgtgagtggtctgagtcatgagacagccatgcggctgtgaattgagccctagcgtcctgactcgcagctcagcaacataactgcttttccaccctgcctttctgtgttctgtgcactggcttatgtcgctgaatgtatgtactctgtagagtgcaacagcactaaagagctggagattgcttcacaagagagtcaaaagccaaaaatcccctgtggccctaggccaagtttctattcccggccactgccccgccctcgtggtggttggtgtaacccgagccctagccccgcccgaagtaggggccaggcccctcctacagtcttggccgtttaaaaccaaactcagttcttcccgattggttctgcttcaaaacaaaggggaggaggaatactcgctttgggtatgcttgcagccttcggggaggaagctggtttacgggttcgggtctcgtgtcggggccaccgcggtgcctccggttattaaaaccagcccctggacggtgccagcctggtaataaagcagtgactactatgtaaaggtagcataatcatcccaacaataacagccgtaatttggctaatcaccatccgcctccgccctggcgttcgccctgactcaccccagcggcacgcgggccataggggaagaaactgaggcagaggcggagccagcaggctggcggcaccagtagcctcagttctgcagctctcgaggtccaaaacctgttgtctaggatccgcgctaaagggccaaatcccggagcgcccacaaagctcgattctgatgtaagctcttctacgctggtgtcctcgcgtccccaccccaggcctcgaggctctaaattccccccaagtcctagaaaaagaacatagcgcgaggactggaagtcagactacagctcccttaagcctttgcgcgccaaggcgcgctccttccccacgcctccgacgactcccgcggccacttgcgccgcgatgcctcctgggagttgtagggcggcgacgtgtcatttaagtgaattcccaggcctggggactctatatcccgtggtgccccgcggctgtttctgacgcgacccggaggccagggaggtggggggcgtagcttgtgcagagccccaccccactctgctcaggccggccggacacggcagtggcagtaagggcggcggcgacggcggcggcggtcgggggaggggccgggcggggggctggcggcagcggcggatggactcgcgggtatcggagctgttcggcggctgctgccggcccggagggggcccggccgtgggcggaaccctcaaggctaggggggccggcagcagcagcggctgcggggggccaaagggaaagaagaagaacggaaggaacagagggggcaaagccaacaaccccccgtatttgccccccgaggtgagcacctgagaagtggtagggcgggaagaagccactctttccggcccaggactctagggaggcgggacccagataattaatctccccttccggtgtcgagaccccagggaggaggggcacgggaggagaacacctctttcaggtcccgggaccccagggaggaagggcagagactggactctcaggtgacaggacctcagggaggaagagtggagagggaggactcccccttctgatctagattaccccaggagagaagtagagaaaggggatcccaggaagagcaccccgaccaactgcgtgtgccgccatagggcaagagagactgcatcctgggacgagaggcagacagtaaccaccacttcttctaaacttgttccacagggagaaggggagtacccgggaaaagagcaatatgttccacacggacacacacacagtactcgggaaaagagcagtatgttcactacacacacacacacacacacacacacacacacacagcctaagccagtggttatcaaactttggcatgtatcgaatcacccggattgctggcccccaacgcctggccaattttatttttttattatttatttatttattttttttgagacggagtctctgttacccaggctggagtgctgtagggctatctcagctcactgcaacctcggcctcccgggttctcaagcgattcttctgctgcagcctcccgagtagctggcattacaggtgcccgccaccacgcccagataatttttgtatttttagtagagatggggtttcaccatgttggccaggctggtctcaaactcctgacctcaggtgatccacccgcctcggcctcccaaagtgctgggattgcaggcgtgagcctccgtgcccagcctagaatttctgattctttcttactagtgaggatgggcctgagaatttgcatttcttataagttcccgtgtgatactaatgctgctggtcccaggacctcactttgggaaccattggtctgggccctagactgtcattcttgtaccacattttttgaagccacccatccccagaaaaatgattaaaaggtttttattgatggggaaaaaaaataatctccttaacacaccatgaagtggagattatgagtgaagacctgttagggcctgggagccagacagccttgaagggatggaatgataggaagggaagaggaaaactaaaatatccagagaggcgggtagaaaaatgcagactggccaaacaggcaaatcccatatccctttgtacctgggaggggaagcctcaggtaacagggtgcttctgtgctgtgctacccactggagctagaagagactgtggggtggattcaggatttcacctccactgaggttagggggcaagaggtaaaggccatagcgagtctgtccgcttcattaca

SEQ ID NO: 585425 - DNA, 4001 bp, Homo sapiens
gatcacctgaggtcaggagttcaagaccagcctggccaacatggtgaaaccccgtctatactaaaaatacaaaaattagctggacatggtggcgcatgcctataatcccaggtactcaggaggctgagacaggagaagcacttgaacctgggaggcggaggttgcagtgagccaacatggcacgactgcactccagcctgggtgacagagtgaaactccctatcaaaaacaaacaaacaaacaaaaaattagctgggtgtggtggtgcatgcctgtaatcccagctactggggaggctgaggcaggagaatcacttgaacctgggagattggggttgcagtgagctgcgatcatgccactgtcctccagcctgggtgacaaggcgagactctgtctcaaaaaaaaaaaaaaaaaagaagaaaaaagaagtccatacagaaattaaacaacaggatgctattaaagaaacatgcaggccaggcgcggtagttcacgcctgtaatcccagcactttgggagaggccaaggcgggcagatcacttgaggtcaggagttcgagaccagcctggtcaacatggtgaaaccccgtctctaccaaaaatacaaaaataagctgggcatggtggcacgtgcctgtaatcctagctactggggaggctgaggcatgagaatcgcttgaacctgggacatggaggctgcagtgagccgagatcacgccattgcattccagcctgggcaacaagagagagactctgtctcaaaacataaaataaataaattaattaaaatacaaaaattagctgggtgtggtggcaggagcctgtaatcctagctactcgggaggctgaggcagcagaatcgcttgaacctgggaggcggaggttgcagtgagctgagatctcgccactgcactctagcctgggcaacagagcaagactctgtctcaaaagaaaaaaatgcaaagagccagttcattaagtccaaatgcaacacgtgagtttcagaaagaaagaacagttgaaaaagccagaagggttaggctaccaaagactagagtggggagaaagtgaccgaagccctggaagctgcttattctctcaggctttgaagatttcttagaccccctttctacctgcctcccatctaagagccacaaagtcttcccaccaacttgctcccaaagcctgtgcctacctggggagaaggttttcggtaaaagtgcttaagctgttcatagggcagagggagctgctggcgttgatacatgatatgctttagaagttcacaagtaaactgacagcagccttcctggctcacaggcccaggaaacaccactggtaccatgcagtctcttgggcaaaaggcctccgaagcgttgagaggttcctgcgtagagcttgtctcaagtagttctatctgggaggcgtgagtttcttcggacttctcataccactccaaatctggtagatgaaaagagggacaagagagaaaaattaaaaacctaaaagccagtcagtcttctcattccctgtggccgacaaaccagccaccctgaaaaagcaggcactccgacatacgcccatatcctccgcagcctacagtatgggccgtggcagggagagattcctgatccctgttgcctgaggagatttaatcgactgcaagatagtggggggatttcggagggctccccgctcagaaagctgcgggacttgatctggggaaatgagtcaaaagtgtagtcaagcagggtccagtgcgacccagggcgatggagtcacagccagagccgtgtaggacacccggaagacagggaagacgggctagggagaggaccagcggataaacgaatggatggcgcggcggtagggaagaaacaagtccccaaggctccccaaactcttggccccacgccttaccagggactgcggctgaggacagaacctccgcctccggcgccgccatcacgacctcccctccgctactccttgcggttagaataaaggtctcgcggggcatcatgggaagcccgcgcctccacttccggctcagttgggtcggaaaaaaggcgcggcgtcgccgcagtgtgggggaggttaagtggagctgggatttgaaccctgcgttcctcctttaacaccctggcaaatgtacgcctaacccttgcccagcagggaacccaggagttctcagccactgagcgctgctttctaaaagacaccagccctcttgcatctattcactccagcattcactactcactgtgcacctacttcgtgccaggccctgtcctaggtgctggagacagcggagaacaagccaggcgcgggccccgtgctcaaggggttcactgcctgtagatacaatacaatgtgatgaattatacagaaaagtgtacacggggtgtggaagtgaaaaacaagggtggctgacccacagagggtaggggctgggaaggagtggtcccagaagaaatgtgtgaagctgtgacctgtaggataagtcaacaaggtaaagaggagggcctagtgctcctggagaccttgagacaagagcatactctgtacaaggaatgaaaagagttcatattataaagagttaaggctgtagtgaataacaggagccagatcatggcaggaccgtataagccacgtgagagtttggacttgatcctgtaggcagatggggaagccttgaaaggtttaagtaggagagtggcatgattaaatttacatcttataaatttaatctctaccctggctgcaggatagagattggattacagagaggataagagaggaggcagggataccagttagaggtagtgcaattacccgagtacttgatgaaagcagcctaacctagcgtagtcacagtggggtggagataattgggtaaactcgagatatttaggaggtccagtgaacataacttggggattgatttacaaggaggaggaggaatagaaatagactgagaagaggccaggcacggtggctcacgcctgtaatcctagcactttgggagtccaaggcaggtggatcacgaggtcaggagtttgagaccagcctggccaacatggtgaaacgctgtctctactaaaaatacaaaatttagccagacatggtggcatgcacctgtaatcccagctactcaggaggctgaggcaggagaatcgcttgaagccgggaggcggaggttgcagtgagctgagatcgcaccactatactccagcctaggtgacagagtgagactccatctcaaaaaaaagaaaaaaagaaaaaaaagaaagagactgacaagaaaacaagcaggtttctgacttcagcaattgtatgggaaattgtaccattcaatgacagagggaagcagggtgccgaggccaggagttcaataccagccaggacaagattggggaccctgtttctgcaaaattaaaaatttttttttaaagttagccaggtgtggtggtgcacaactgtcgtcctggctattctggaggctgaagcagaggattgcttgagtccaggagttcgacacttacagtgagctatgatcatgccactgcacttcagcctgggcagcagagcaagaccatgactcaaaaaaaaaaaaaaaaagaaaaaaagaaaaaaaaaaaggatggaggaaacactaaaataggaaataagaccaggtttgttggggtgggaggtgagtaggagaaaagatgagttcagcttttcacagattgaatttgacatctccataggataatgaatagagatatttaggaatgccatttgcaataaaggtatgtatttaagagccatcagcatgttagtgaataagatcacccagggagggtgtagaatgagaatgggctaggatattgaagacactaatgtttaggggatgaccagagagacagaagctatggagaagactaaagagtacccacaggaggataaagaaaaatagacaaatggccgggcaaggtggctcatgcctgtactcccagc

SEQ ID NO: 585426 - DNA, 4001 bp, Homo sapiens
aagcagtctatgttccttaaacacaggcttcccatggttctccagttcacgcacaataatatttctctacaagttacatatattcttctctgttgacctatggaaaactaatctacaaaataggaatatattaacacagtttcttatgtacatgaatatatatagatatgatacatatgcaacaaaaaacccaagtaaatataactatcatcctcaatttaacagaattgttaaaaacttggaattttctacaatcaagctataacatttattgaccttcctatgggttaaagaaaaagatgcttatttagaggcttaattatagacctacacaaaaataaatacccttataatttatctctcattctagttttcaactttttaatctaagttcataattaccgtttctctaagtgcacaattgttgtaaatatagcctttactctcaacagcttttgccagctaataagagattcagataggattaaagaagattagcaaagagggcaaatgaagggtaaaacaagcgtctgccaaaaactgaagagataaggcttggatgtcttcaacgtggctttctagaacatattatgtcactccgaggctggcttaacgcttctaatacacaacaaaagagtaattaacgttttaaaagtcaccaaactctttaaaaagcaacgcaggaaaaaaagatcccaaactaaccaagtcgaagttttacagaaattaaatgagctattacaatgggaaaacaaagactgtatcttaaaatataaaagcacagttctctgtgctcatattcacaaattatttcaaagcttatacacaaaaaaagtccaccccgacgaagagattaaacgtcctgcccggtgcctgcagtggaagcaggcggtggcgcggttgggggaactttctccctcccggtcaagcctcgggaattgaagggccggggaggcggggcccgatcgaaaagctggaaagtcacttttgttttcaccattatttcacttaatgggttgtgtttctgaataaataaagtcagataactttggcttccctctttgagaattccgttatcattagaacaaatgtctgtttcttttaaacgattatctaaccacatttgcatacagctctttccttgtaggattgagattactaaccactaaaaaccagttttattgctctcgacaccgcactctcgacctgtccctaaattaaaacggattacttgcagaaaagggacagttttcgtcacacactttctgatccgactctgcaaaccagggctcttaaaaggctccagggaccgcgtggtggaaggagggggcgtccccgggcgccgggagtccggcgccgttgggggggacgggggtgtgcggaattccactttcacctgagcgtcctttgggatgcaccagcgagggctggagtcggacctaattcctgtttttctccctccttttagattttgcaacagttctgaactcagttccgctgcctccctgagacccaatcctgcctctctgtcctaaaaacagtttccaccgccagcccaagcagcaggggagcagaggtgggagatcccggaggagagtttaggggcgggggtctcaggctaagggacgcccggccgtcatcctcccacgccaggccggcccccgcggtccaggaggcgggaaagtggtcaagaggtctgggagacaccgaccgccttccctcgggctgaccactcccgcccgctccgcccctccggggaccctcctccctccagtccttcccctaccggcgtcagggaccggtctccgggcggagattggccctggtagcacagggcgccgaggggacatgcccggccagcctcgcaggtcgggctccggctgggtcggacagagggtggtggccctgcagcccgctggggattacctgtccgcgcctgctgcttacctcgttcgctcccttgtgaagctccggcgtcttgtgtgtttcatctcctaggaaacggcgggggcagcaggcgggcctacggccggcccagagagggcgtggcctcgcgggaaatccccgccaattcccgcaggccccgccttccccggggcggggcttcatggagccgggggactgtcggctgagctgcagcaagtgtgccatttagacttggggtttaggggagttgattaccttttcagtcaggtctttgtcagaagttggtttgtttgccctttattttgttttggttttgttccgattcattctacaaagtcttgattaattaaaatatggttcccagaccgggcagagcaagagaaggaagtctgtttgcctcatacttgcacttgtttacttgtgcctggggaaaaactgttcttgtatgcagttccttaaattggtcaattccttgggtatgtattacctcttgagctgcccttctaagtttgtttccatttattcattcagagaacctgcctagtatcagccacagagttagatagtggtaattccaagaaaaatgactgaatgtgtgaataaatgggtaaattgtaactagtctagaatttagagaggaaggcacacttgtgttactgcaaatagttcagattggctggcaaaaagggtctacgaaacagaaacataagtgatgaagcagtggtgcggcaagttagtaattattaggtgtcaggatgtgggcttgggaccaagaatagcgccaaggtagacacgacagacatgcctgtggccctcacagcttaaagtgaagtaggctttcacgcgtatgtttatggcagcacaattcacaattgcaaagatgtggaaccaatctaagtgcccattgactaatgagtggataaagaaaatgtggtatatatacaccataggctgctactcagtcacaaaaaaagaatgaaataatgtcttttgcaacaacttggaagagtgggaggtccttattctacgcaaagtaatacaggcgtggaaaaccaaaaactgtatgttctcacttataagcaaaagccaagctatgagtatgcaaaggcatacacagtgaaataatggactttggagactcagaaaggggaggatgggagagagcctagggataaaaaaaactatgcactaggtaccatatacactactcagatgatgggtgcactaaaatctcagaattcaccactatataattcatctatgtaacaaaaaaccacttgtaccccaagagctattgaaataaacatttaaaaacagacggggctcagtggctcatgcctgtaatcccagcactttgggaggcccaggtgagtggctcacctgaggtcaggagttcaagaccagcctggccaacatggtgaaaccccatctctactaaaaatacaaaaaatatctgggtgtggtggcacatgcctgtaatcccagctactcgggaggctgaggcaggagaatcacttgaacccaggaggcagaggttgcagtgagcggagaacgtgccactgcactccagcctgggtgactgagcaagactctgtctcaaaataataataataataaatggccaggcgcggtggctcatgcctgtaatcccagcactttgggaggccgaggtgggcggatcacctgaggtcgggagtttgagaccagtctgaccaacctggagaaaccccatctctactaaaatgctaaaactacaaaaaattagccaggcgtggtggcgcatgcctgtaatcccagctacttgggaggctgaggtaggagaatagcttgaacccaggaggcggaggttgcagtgagctgagatcacaccattgcactccagcctgggcagcaaaagcaaaactccgtctcaataataataataataaataaaagattcattgctctccaataaataagtgaagtaggcaggcaaagtaaaaagcataagttagataggtcatagcagctttatatacccagttatgaagcctaagctttaacatgtgtcaatgaggaagaccagtgaagaatct

SEQ ID NO: 585427 - DNA, 4001 bp, Homo sapiens
aaagatgtatcaaagtccatgtttatcctggattaactttgtcaccattgtgctgctgtggaggcaaacctgttgcatcacatggaataccctatttctggctgtgcattagaaatacaagaggcagccgactggctttttatattttcattttttaaaaaagtaaacaatagtatccctcgatgatgggaagttctcaggtttcacctttatagtctgaaagtacacacagaatgccacctggcagacaagggccacacagctgaacccggggtatgctggctagctttaccacgcgtgaagactcactttaaagccacgtccccaatccttaccagggggctgatcagtgccgtcgctgttactggtggggcgattaaccgtgtagcggccagagaatgaggtttgcgtattacctgcccatgtatttatacccacctcgtgtggcttgtggtcaccagagcaagagcatgcaaattaaaagcaacgagatttgaccttagatcttactggacacatctactactatattggaaacaggaaaagaaagagcttttgacacagcacctggtggaaggggcaaacctccatctccccatacattgcattgttgcagtcttcagagtttcaaaggcttgccgtttctccctgaaaaacacggccggtcgggagggatttctggcgcggcccactcacctctttgatctttgcccttttctcgcggatggcggcgtcggcgggctcccggctctccaccccgattgggggcacgaagtccaccgggggcaggcctctgaacggcgccttgtcacgcagctggtcctgggccaccttcttcttctccagtaggatgtctctttggatctcctcgggcagcttctgcagggtctccttggcttccctgagagcccgctcgtggttttcgcggatcctggccaagttgtcctccagggcggcctccgggtccccgggtgccccctcctcgcggcgccgggctcgcccctcggccgcgtcctcggcgcgcgccccgggcccgggcttgtggtcggcggccggctgcaaggcggggctggagtggaacaggaccccgctgagcagcttggaggagtctggcaggaagaagatcgccccgaagcagagcgtgatgaaggcgctgaataccagcagcagcacgaacttctccgtcaggcggagggcggcggggcccgaccccttcctgccaccgccgccgccgagccccccgcccaggacgccgcccgcggggctgctgaagagcggcaacaggccccccacgggcatcgctcccgctgtccagtggtccggcgccgcgccgctcagcagccaaacttcgccgccgctgggagtccgcggctgcggggctgggtcctgcgtagccaggccgcccgaccccctcggctgggctgcggatcctccctgggggaacaactccgcgccgggtcttctccccggggcggctcctcgggcacacaggcacgcgcgacagaccgctggctgcagcccctgcggggagagaaacagtaaaacgtagtaattacggcgatgataaagtttccagcgggtctccgccctccgactcctggcgagcctccaggaccgctccccttaagcagagtcctgtccagtccgggcaccgccctcgcagcccactctctggacttggggtgaagttatcaggtcccgtgggtaggggaggggtgtcccgcgcaggaaggggtcagggcagcgcgcgagcacctcggggaggggcagcgcacctctgggcaggaggggcgcagcgtgggcgggagactcgtcaacttcgcccgctccccatctccgcgctgagactgctgcctctttcctaggctgggctgagcgcgctgtcccacggtcccgcagccccggcgcggctcaggtgggcgagcgcgccgacctgcgggcgaatggcagcgagtagagcagcacggtacactccgccgcggccccgcgagcactaatctcactgccggtcttggggcggtggaaagcgagggaggcgacgcggccggagagtgacggcgcggccgggccaatcacgcgccgcccagggtcccgcgggggcggggccgaggcgaggagggggatgcgcggggcggggagtttacgggaagcgcagcctcggcggggcccggccggcggcggggaggtcgcggggccgggaggcgcgaggtaggcgggagccgcggtgaggaggacggtcgaacccgtggctgaggcccagcgccgagaagcggcaggcagagttcggggtcggggagtttatcctgcgctggcctcggcaggggtccccggggtggttgatcctcgactggcccgggaggcgcctgggtccgcgcgggacctctctgcctcctcctccgacccgtgcggggcggtcgggggcgctcccgagggggtcccgggaaaggcggggtctggcagggggtcctgggcgctgggtcgttcagaagcacggctttactccagttaccctctttttatccaaggccggggttccccgggtgcctggtagcagtgaaaccccaagtccctcggttaggggagccgtgaccctgggagcttttgagctctctggtataacatccttttacatcctaagagacacagttctgtgcttgcttaggacttttttcgtatgcgccctttcttcccccaaaaaacaaaaaaccgaaaaaacttgtatgtctctcccgcccacccgtactttcactattcatttacctcatagaagttggtcaaattttccattcgaagacgagttttatgctgcggtagcttcaagcaataagtcgaacactgtgttgaaattaagtcttggatccgactacttccagcgaagtgaggagttggtccaatagaaattattttccaaaatgtgttgtaattctcctgttgctccacaaataaggggttatcagagaggaaaacgttgactgacttcgcatttctgaaagctggtttgtagtcgccttatttcatccttacccttctctggaaatgtgacattagttctgtttgtgcttaagacaaaggaaacagctggcacctttcgggaaggtggctccagtacagttgtttccaggtgttaagctgtatgagaaagtagaaaagtaatcagaaatccttactagttttcatttaatcatttaattattaattttaaccatcattatttgtcgtctacttgttttgtgtaaaatgagtaatacactcaaagttcttgttaataggaaattattgtttgataaagctggctttatggcttggttattttgatacctgctatgaaattctatgtccagaagagtgcagcatatccaagcagggtaataagttcagaaggactgaaaaagaaaacaaagatgatttttctttaatgatggaaaggcaatttttatttcaaacgattatgcatttgtaggttgtgcataggctgaaaggtttgaatcactgtgaaataatgtttctaacaacatccttaaaactgagttacctcttgaatggatagataaataggaactgggttaactaccccaaacgctaatctctttatgatcatccttttttggaatgatttattattttaaaaattatgttgtaagaatggaattatagccccggaaatatttagaagctttatttcaaattaatgttattaagtattccagcaaaacaataaattccacttttaagtatatgttaaaatggtgataaataaaagttataacttaattctatttctgacactttaattttgataccaaatcagtttgggcatttaacttctgtagtggaaatattaaaaatttagtacgtgggtttaaggattttttcccctaaaaactttaaatttatctatgttgtttctacatcttttaaagtaactattctttttaagttcatcatgaagcttattttaagatttttttcttattttccgtatttcttaaatgacagggtta

SEQ ID NO: 585428 - DNA, 4001 bp, Homo sapiens
tttcaaaatcagtttcaaaatcaatccttgcccaggtcagttttattgtaaacacttgtaccctctggttaacagaaattcagtgaggtttagtttctgttttttgttttgttttgttttgtttttgagatggagtctcactctgttgccatgctgaagtgcagtggcgccatcttggctcactacaacctccacctcccgggttcaagcgattctcctgcctcagcctccagagtagctgggactacaggcgcacgctacgacgcccagctaatttttgtatttttagtagagacagggtttcaccatgttggttggccaggatggtctcgatctcttgacctcatgatccacccacttcggcctcccaaagtgctgggattacaggcgtgaggcaccgcgccaggccgcagaattttttttaacctcattttacaaatgatgaagctgagcagttggtaactttttcaaaaatctctgggccagcaaatggccaagaaaccaatctaaggttaatcacctagcaaggagcagatcgagtctggctcaagaactcaagttcttgtccatgctattctgccttcctttaaggtattagacaaatcaaatttagaggatacaccagttatttttgtgacacaagatgaaagctgctgctatatggttatgttttcaattaaggattatgtacctaataaacaatgattaactgttacctactccataaactgtgcccaaacttcatctaaagacagcttattctattttatgatcatacattcactattcgtcacacgaataacagcaacagctctggaaatggtgttttcattgttgtgattttttgttttggggggtgtttttctgcattgagcctgaaaatccacaaattcacagcactcatgtttttttcaggtgtgatacacctgaaatagatgtattgtcatgaaagtgatttgcaaacaacgtgatacagtatcaccaatatctaggttttactttatatttttgtttcaaactactgcctcaatactttaacgtgaacagcctattccagtcccatttttcttattttcaagttcttaatcaacattatcccccccttgttgttgttttatagcacttccacattttctcctaacacttatccgtagggtcttacaacaacaaaaccaaacagttatacctgcctgtacttcaagttgcttctttggaaaaaggaacaacaaaaacactaatccagcactgttgcatcccgacttagcaaaggctaagagtctaagatgacagtgccaaacacgttaacaggtgaactgaaaaaccatctctagcggcctcgccatcgggcggtctcctcccgatgcccagaggcgacagctacctttccgttgcacccagagcccagcaggcctcgatccttctactctcccggtcggctcaaggcccagaggcagtctgggggcacaaggagaaggtgctgaaaaaggcttccatccgacccgaaatttccaccttgtcggggagacaaggaaaatccgaggcgacaggaggtaccgtttcaaagaggaggcggcgacgaggccagtgaggtggggataaagcagtgtaaaaggcagtaaaactaacgcagactaaaacaggcctaagagtgacagcctaggttaatcgagggggctacaggctcgccgctgggcgccaccagcgcctgccagaggggcgccgggtcaaagggcgcccggaggaaagcggccaccagattggctggcgggcgagcgcgcaggcgcccgcggtggacctcgtgcctgccgccgctgctggcgccgccgcctccaagaggtctgactcctgcagctactcaccagggtcgggtaattcacttcttgcaaggactcggccagaggagaggttaagaccgcgaacatagagctgactgccgccgcgccccgagcccagacagcccctcctccccgaaggcgcgcgcacagcgttccgggcgctttcaggggcgggacgggtgggggcggggtcacggagcgggcggggctcggggtcttccggagcctccggtcgcgggtctaagaggactagggcgggagcggcgcggaagaaagagaggactgcgttttggggcgttctgtcagaggggaaggacgtgtggattggagtcagactgcactcccgccctatttctgcaagtagaactcactgcctttagaaacggtcttctgaggctctgttgggaggctctaactgtattacagaggacacatttttgtttgtttttatgtgaaacattcagaagttgcttgcatcaagtgctttacaagtacactggttttcaaacttttaaagttgaggaactgttttgatttttgtaaaaatagaactttacttggaagcccaaggtaggcagatggagatggcgtttttaatttgcgaatgtattctataaaatcacatctgtactgaagtactagaaataattgaggataagtcagatgtgaagagcaagaacttttgaaataggattacaactgaaggtttccatcttacattagcttcagaaaacaagaaaatgctatcttttgtttggttacatagtaacaggaagtccttattcaagctagaacttgctgatgtgaacagtttcataagggctctccttaaaaagattttgtacaccaattttaattgggaaatatacatatgagtatatctcatgtgcatatcttaaagaagaatgaaaaatgcccaggtacccactacagagcttaagaaaaaaaaaatgccagtatttttggagtcttctagaaagaagactctctaaaaacatctccttccttccgttcaccattatgctgaattttatattactcattccgttgtatttctgaaaatagttacatatgtacgattccctaaaaatactattttcctagttttatatttcatatgtgaatcattcttcatttttccccttttttcactaatttaggttttgagaggttttgagattcgtctgtatacaagtccatttcccataaactagactggcacatcgttacccttatgctattgttagactttttaagtttttgctgataagagcatctgattgctcttttaatttgcattttcccttttgctaaagcctgttcttaattttatctcattttttattaaattgcttgcttttgaaaattattttgtagataatatttattttttctagtttaattctctcttgtaagttacatgtgttgcaaatgtcttctcttagtttatggactgtctttccagtttttatgatgtttcttgattgccaaaagctttatgcttcagtatacagctttttgaatttaataatattttacattttaattttgtgctttttgctttcttgcttacaagattcttcccaacataacatcagaaactattctttcttctacaagtttaaaagtttaattgtagcaactttaaacacagaaaggacaaataataatataatgaacacccatgcactcaactctatgtattaaaacattttgcaaacccctcctcctaatgattcttgtctaaaattgccttaactatacttggctctttactctttcattgaaattttaggatgagccagccaagatccatttaaaaaattggatttcaattgggcattttattcaacttgagaattgcatttagagatttagtgaaatgtcttcttatctatgaacatggtatatttattttattcaggtactttatgtgctactatgctttgtaatttattgagtatctttcattatattgcctcctagttttattactaaaattagagatctctctctttaaactctattttctaattgtttagtaacattgtattaaaagagcatcaatttcaatatattggtactatctccagaagcttcgctgaatttttttgattgcttgctttatttccctgttacatctttggatgacctatataggtaatc

SEQ ID NO: 585429 - DNA, 4001 bp, Homo sapiens
agcagcagtcatttttgcagcacattttcatttctctgcccttctcgcttttacctaagaatgctcatgtccatttctttccggagtagggttatacagaattctaatttctgatccgcccatttggataatgaattcttcatggtggttaaagacatgggctgtgcagccagacctttcttcattaccagctgtgaaaccctggacaagatacttaaactgtgtgcctcagtttcctcatctgtcaaaaagagagtataacaggacctacctcatagagttgttgaaaagattaaatgggttaatagaaataaagacaatggcctattttaaccgttaagtgttcactattaattttaaagaaaaaggtatcaaaattgctcgaaaactgatccgttaacaaatttataataaactttctgacaaaatttctaaaaatactagatgtattcaaaaggaaccaaaggaattctcattacaccctgtaccattattcagagaagttgttccttagaagtacccagaactatctcagaattaaaagaggcaactaatttcttcacagcttataaaaataaaacaaatttgtttgggccaactgaatgatgacaagcaagaatatggctcctgtgttcagttctaactacagttacaggtgtgaattttctttaagcaggaaaaagaggacactttactgccttattcctagaaccatagagcaagaccataagatgccaagaggagctgccgaggtattttcattacaggggacagggggcagcagtttgcaagtttactctgggatgcaaaggacagggagtaagaggacatttgaacatacaaacataggcacgtaaaaagagggaaattctcagttatggtgagtttgttctctcaattaaaaaaaaaataaagacataaaaataagttaatagagtatggaagaaaaagcaacaaatgctttggttaccgaagttccaccttagagcttcctgcagtagcaaagttttagacaaatgaatccttacttttgtgcacgtgtgagcaacaatctgcacaatactagcactaaaggacagtaaggggccctcagaacaggaaagcaacgtatctgtctgcatagtctaagtgcaatttctcacggaagagatgacaggcattctctggagcgggcaaaaggagaggaggaggagaacgcggggaaatagccagtacgcactcgatttccgaatgtctcttttactcgaatgagggcagaggggagggaccactttcgttcagtaatgatgagaggcacttcagtgaggccactcttccgaagctagcggcaggggaggcagccgcactctgctcccagcccccgcaacgttgagggtgagctgggggagtctacaagggaaggggagccggcaacacgctcgagcggaaccctgcggagctgcaaccccgggaggagtcgccggacagactcagacgcggtcccctgggacccagggatgcaccgcgcccctcccgccccagcctgcagagactggatgcttccctccccacctggcgggaagcagaggccctcgggcccgaccgagttcgggccaggacccgccccgctttctgcgagcgaccgactgcggccgccacactcacctcgccgccaagcagcactcgggttctgactcggtctcgggttccggtggcggtggtggcggcggcggcggtggcggcggctcctccatggcggcggcaggcgtgacggcaaaggcgggaggagggaccagcgcggcagcggcttctctcatccgtgcacggagccccgcatggccgcggcgggcagtaagctgcagcctggcgcggggcaccggagccccgaagtgcgggagtgactcgactccgcctccgcctctaccccgccgcaggagccgtgcgcgccgcggccatcttggaaacggcgaccggccgagcgccggggctacggtgggcggcgagggacaagcctcccagatcggcggcggtggcggcggcggcggcgggcgccggaatgcgaccggacgggggcggagacggcggcagggaggggcggggagcgccgtcaagtgtcggcgcgattcggtcctggagccgggtctcgccagctcgcccggtgtcgccccggccggtggcagtgggggactgtggagcggagccgggctgtgcagcgggctgggagctcgaggcttcccaggcggtcgtcggtctgggagggacgctgggtagggccgatgagcggggcgggcgcgacgctatgagcccggccggagtcgccgcccagggacctgccacccggatcccaccttccaggaggacggacgtcacccagacgctcgcaactccggtctcttgacagcgcagccttccacaggctcgaatttttaagacttgacataaagtctccggaattccagattattaaagtgaccccctcatttcaacccggcaaaacttctcaccccagtgtcataagattcgatagcgatctcccagaaacttggactggaatgctcctacactgaggggatggggggaagaagaaatgctaaagattatttcagagttacagaaatcctgttgaaattccaatgcatcgtttactcttagcgctggggcttcacagtttttttttaagttggaaatatttacaaaatttcccatagggtgaaatccagagttaatccaaaaccagaatcttttaaaattaagtacattcaaatgtgcagatttcttaaacctcatttagttgagctttgataggtgaaacgcacgttttgaacaactctggtaacaaagaaaaacattaaattgattataggtatgttatatttaaagaccagttgtgaaattagctatattgtgctcaaagtatgttactgacatttctccgtcgttaaaaggaactgctccattctagttttttataatagtctgtattatgtatatagcctgatagtgctgaatttctgaattgaccttcatcttatttactcaataatattcatttgacaaatacttattaagtgcatatatgtgtcaggaactgtactagatgctgaggatatagcagtaagcgcaacagaccaagctaacagcttagtaaagggtgaggtaaaacaaaacaaaaaagtattcaaaaaaataaactaatttttatcttaatttaaaaaattacaaatttttaaaaatcacaaattggtatccatgtataattcatttccgtgcattttcttgtgtgaagaaagctcagtaaaagtatttcttaggtttctgtaattctagttctctactcgattttcttctgcaattttctgagccagaacccttcttagaaggcatattagagactttaaaagttaaataataaaataaatctcttctttaaacagcattgtactacgtattctttggtatgactaccgaatttaagctagctgataatgcagacacgtgtgtccaagtcacaaaacacttagcaaatataatcagcatgcgggagacctgtggcttgttcttgtgttttaatttccacttgaggatactatgtattttagcaggaaccaagtaaatttacacttacctaatcaagtaatgcatcatgtatagaaacctaagttaactggtactaaatattcaatataagtgttgtgacttttcgccccacccccatgctgggtccaggaaagctgtttctctggctgacaaccctctcatctcaccccgtgcccccactttgtcttcagggctcccagtgagcgcctcacagcccccagatttcttttctgccttctccaccatagtgtaagctccttcaggaaagaagctgttcttccttcttctgacctttgcctagggatcaaatgtctctggtgcccaacatggtgttagtagaactcagtaagtattgttgcattaatgaaatagttattttttttaagttattagatttttgtctctaaatttttattcttgtttag

SEQ ID NO: 585430 - DNA, 4001 bp, Homo sapiens
ccagaacgagaaagtcctagtttatttagtctggcttccttaacatgaaggtcttgttgttctcaaaatattcagctttggctgaattccaaaactgacataagcccacttcaggtgtttggaagacactaaagagaatcagaattgaaaacaagattggaaaataaagccttttatgtgatcacaaatgcaagaagtgtattgttttgaaactactaaaccaagtttttacccacaaatgtaaacataaatatgtatatattctcaacactggacgtacaggggactaaaggttaatttccataatatggtattattcctaacatttgctaacagctaagtgcttcagttactagaactgccttaacattttctgaaatttgagataggttgaaagatacatttctttcatggattatgctagcaatcactttaatggcgaaactaatcttattattaggatagcatacaggtgttttagacaatgttaaattacaaactttctagcccaccatggtttatggggtaataaaaaacaggccctggttctttcaccaaaatccttacaaagataacacacaagttcagtgtaagttgtaatgttattgcctttggaagcactgtaattacttcaaagtctgggttggtgagaggaaattcaagctactaaaacttatcgaaggtaaggtgagttgggaagatcatcacatggcatgcaaattaatatagttacactctgcgtgcatggtatgtcatcgttcccgtactctcaaaactacacagagaaaaggagaacctcatctaaaacggtcacaggtatatgcagaaagaaaacagggaccaaacctcacagaagcgaaaccgagacactgaaaggagaaagactgactggggcaaatatctcacactgctggagaacagttcaagtcgatcgcatggacccagggctccagcgctgggcggtgggtggatccataggtctatcgcacaagtacacacagactcttgcacaagcacacacgctctctccggagcggcgagcgacaggagcagtcacgcagcggcgctcgctgcccccaaagtggggcaagaagtaaatgcttcccgcccagaaaaatgaaatgccccgaagaccgccagattaaacgcgggtcccgaccgcgcgggatgggaaaggggtcacacacgcacctgcattgtaaaagcggtccagcacggtggtttctccaaagtcgagtttcccaaaatgcagggtttccagggtggcgcccactgtctcgcacgcctcccgcaagctctgcagggcctcgctctcggccaccaccagttgcccttggctcgcttcgttgatcacatatgccaccgtggtccgtcggctgcccccgccaacagagctgccccggcctcgggtggcactgctcgaggaggtggccgccggacaaccgatgccaggggcagcggcgctctccacgttccagaagctgcccggcggcggcggtggcagctggtgctcctcgccctcgcccaccgccgccgctcctcccctcctgcagatgccgccctcggggatggtgcagaagcccgagggggcgaagggtggcacagagaaagtgatgccctcgtccgcctccgtgctcatctctccgggccgggcagcaacggcggcggcgtcccccgcccagccgcaccgcctggccagccacagctcggggctgctccgcgcccgccgggctaagcagctgccatcgcgcgccgcgccctcgccgccgcgccgccgcctcctctccggcgccctctcccccgagggcacgccgctgcccggcggcggctcgctcctcctcggcgcctccgtggccgcgccgctcgccctctgcagagtttagagtacaaggggtggggaagccgggtgagcgggaagggacggagcttccttttcttggccggctgacaagtcggctcgcaaacctgcgccgcggtgcagctcaagggcgccgcgctcggggtgcagcccgccctcgccacccgccgcgccgcgccgcgccgcgccgcgcagctccttccgtcccggccgctctgggaggggccaggaagggcgccccctgggtgcggagctacctggcgcgcaccttacgagcgggctggctccccaggcggcgtcccggaacagcagcagcggcagccgaaaggaccctcctccctcttaggcggcagctcgccttcatcgggtggatttcctcctccttgcctggcctcgtttctctttcgatcgcctccgccgcgtggtcccggcgccagcctcgtcgttccttgcagacgctctccctctccaccaccagcttctggccacccactcgtagcggcaccgagggtcagggccagcccccaaggagggcgctgctaggaagctcgagcccggactgaactgaccgcgctgcggccctgggaccccagccctcctctgagtgctgcgcgtggcatagggtcccagtcttcacccacccggcccccacctacgaagacctggagcgcaagcgattacggggtggcgcagaaagtccctcgaggcaatactcggtcttcggagtccgcccctgaagcatttccagtgttccccgcgactagggcgcccccctccgggccttggcggcctggtggactgggaccgtgcgcggcgctggcaggataggctccgggagacccacgttgcgcgaggcaggaggttgtacatagcgccctggagccagggcctgcactggaggttgcttcattagtgactgtggcactccagaagtggctggctaaattgatcaggttctcccatgtacttttccttttaaaatttccagtggctcattccgttatcagtaatgagtaattgattagtgccaactgccgaaggacttagtattctcatttaggatcttaattcccccacaagcgccagatacttaagatagaagatggagtctctacccgactccacaaattatcaacaagatgaaacaggggaataacgtgacctattctattttttaaactgcatcacgcgaggccgggagggaaatacccagattgtttaagagcaatcaaaaaaagtacctgcttatttggggagcaaagaacagatgtgtaagttcccagagaaccccagaatgctgtaattgttaggaaagccagtgcaagttacaactgagtaaagaaacaggttttgtacttcccatctccaggaactgagactagtgagtcctgtgaaaaaggcagaagaaaatgtaaattacttttttttttttttgagacggagtttcgctcttcttgcccgggctggagtgcaatggcgcgatttcgactccctgcgacctctgcctcccgggttcaagcgattcccctgcctcagcctttcgaatagctgggattacaggcatgcgccaccacaccaggctaattttgtatttttagtagagacgggagggggaggggtgtggggttcaccatgttggccaggctggtctctaactcctgacctcaggtgatatgcccgcgtcggcctcccaaagtgctgggattacaggcgtgaaccacccagcccagccatgaattacatttcaaactgggtaagaaggaaggataaaatagctgaatagtaaagaattaaaggaaagtctgggcgcagtggctcacgcctgtaatcccaacactttgggaggccgaggcgggcagatcacttgaggtcaggagttcaagaccagcctggccaacatggtgaaacccccgtctctactaaaaatacaaaaattagctggacgtggtggcagccgcctgtaatcccagctactcgagaggctgagacaggagaatcgtttgaacccgggaggtggaggttgcagtgagccgagatggcgacactgcactctagactgggcgacagagcgagactccatctaaaaaaagaaaaagaaaaagaattaaaggaaagagttctttaattttctccaaggtgggag

SEQ ID NO: 585431 - DNA, 4001 bp, Homo sapiens
agttactttatgtgataaaacatatataattcagtaatccattactcttccaaaacatgcacaggaaaaaaaatttatttgttgaacgttatctcactactttgaacttgctgacacttaaaaataattttagaattttaaagtagacataactcgttgacaatctataatatttcactaggtttttcatggactatataacgcaaagtgcttaataaatttaaaaaatggcaaataaatggtaagagatagtattttcaaccaaagtttttaacaagttctaaagtgtctttaaaaaatatatatgcagtttttacttttctaaattttatagtcattagaacccaatttacctgttaatttgaaaaacgacgctttaaagtcactttgaaatatcttgttctaaaataaattactgcagaataaagaaaggatatgggttttctgatagcgatttctagtctaatattatattctgattgtcaccgaaatcattcgttatctcttcagaatatgctacttgaaacatcttttgatcgtagaccagtctatgttacttatggtgaaattcacctacattagcccaactgaaagccgagcatttaaacattacgagtattgctgtgcggtatcggagaaattgagaaccattcggtgctaagggaaacactttattagacttgatgatctactaatttaacaagcatttattgagcatcccctacatgccaggtactgaagtagaagtcgaatataatacaatctttggccattaagaacattacgtccggccgggcccggtggctcacgcctgtaatcccagcactttgggaggccgaggcgggtggatcatgaggtcaggagatcgagaccatcctggctaacaaggtgaaaccccgtctctactaaaaatacaaaaaattagccaggcgcggtggcgggcgcctgtagtcccagctactcgggaggctgaggcaggagaatggcgtgaacccgggaagcggagcttgcagtgagccgagattgcgccactgcagtccgcagtccggcctgggcgacagagcgagactccgtctcaaaaaaaaaaaaaaaaaaaaaagaacattacgtccagcggactgaaactccagaacggctacgatcttcgctgaaactactacttacagatacgagaactggtggaccacactatctcaccagttcattctcctgtttatcaccggaatatcaaatccaaaatcaagagtacccaagagaggaaaaaaggcagctactcccgagcagttgagctcagagagtaacccccactcccacgttactgagggctgtggggtctcccgggtggaccccgcagggtcccgcgaattagaggggccccgggaggcaccttcagagccggcaccaggcagaggcgggggcggggcaggccgggaccggcgtctccatgccgggcctcgctcacctcttccacctcgatctccttgtagtcgatctcttcaaagttgaggacctgggaaggggcttcgatcatctcaccggccgaagacgaggaggaggaggaggcggcagaggctgtagacatgatccctcgcggcgcccggtggggccgggaacggtgccacccggacaatccgggtgagacccgcgcccacccgcctccggaccgaccctcagcctggagccgcgcagtcctactacccggcgatccgtggcgggggtagaggcagcggccacagccgtgtccggctctggctccgctgcgttttccgccgacgggccccgcccactacacttccggttccgggctgaaatcggaaacaggaggagggccgtaaactccggggtaggggaggggagaattttgtgacttggaaagaaaaggagggacaggttgggggtggggtggagtaagctaagaagcaaacttggacctctagaacaaatttcgcgagacctttattacagggcctcagcaaccggatgataccgcgagagaggacgcctgacgtaattaaagtgcgcgaacggaagtggcgcggaacatgacggaaaatcagtacggttggtcccttaaggaccagcgggaaagataaaagctggggtttagtctgtgctgcgtgaaatatgtcttggcctcacttcctgtcctctgagctgcctgcagccgggcgaggtggtgttgaactgtgttttttgtgacgaagcttacttttaagtttcatccctaaactaagttgacctgtttctttaagacggcttgcaaaatgtgttttcctcaatgtgggatatggaaagaagcagttgctcctgttattttgagctagtacctgacgctatgagaaattctaaaagagcgaatcagatcatgcaacatgaataactatggaggctgagtgatcaagaacagaagttaatattttggtgttacaaactttccacggattaggtgaataagatatttataatttggtgtgttcatctcaagttatggattacgagtgcggggcactagtgctttagattggtaaatgaatcatcaacagtcgccttgaaaatcgaatatttttgtcaccattttcaggacatgagaaaacacgctgagagtttaaagcaattatggtcctcacaaactagatcattctgtccccaagatggtcagtattgctcatgttgtactaccagcacaagttttagttttaaactaactgttgaattttatatagtccgtttgacataaagcctaactgtggaattatgttaaacacatttgggattgcaaatagatcattggatttgaccatcaagaagttacaaactcctgggaaacattctgtcactttttattcgtagttctagtgacacgcagtgacagtttgatgagtggataaaaaaatgaaagaaacgataatttcttttcactgtacactctctctttgcatgctcttacccaaggtctctgtttctcatactatttttataatgatgactcctaatctccaaatactcaagatttttcctgaattctggacctattggtcatctctacttagacaaacacctaaacttcaagataccacagcaaattcaaaagttgtcacccaccacaaatatattcctatgttattttcctatgtcacttaaggatgccatcacccagttggttgtccaagtgagaaatcagggcatgtgaaatgatgcgtggtgcactgatacccagtagaagctgatataatcagtgggacagtcattttcacctgtcattccccttgcatttccaaacaaggatggtcacttcttaccttgtgctataactctgcaggtctatatccgatttccttttaacaccttgatcttgctgccaggtgggaactcaataaatacttagatattctgtacaaatgaatagcttttgtcagtcctccctttccctggagtgtaagatatgtttcctgtaccttcagtttaggactggaatcttgacaaaggactaattaattaccacagccatgatgcagttctcctgcttgatttttccccccaaaattttgttacaaaaatgtcaaatatagagaaaagttgaaagaatttatggtgaacacctatatgcccaccaccaggattctacctttaacattttactatacttgctttatcataatatacatatgtgcatctcatctctccatccatatttacatccatctaccattttgctagatgcatttcaaagtgaattgattacatgattttgaatatcttctaccccaacacttctatgttttatccactgatttggacttctaatattgatgccagtctaaaatcaatttttgtccaacttgcttgcagattacttttttcttttttgtctgcctgcgccttttccctagcttctagtaatagatggaaagtttcatcagtgtttatgtctctgggttcagtcattcccaaggtccaatccatctcttacattctgtgatttggttatgtgagctagtaaa

SEQ ID NO: 585432 - DNA, 4001 bp, Homo sapiens
agcctgggcaacagagcaagactccatctcaaaaaaaagaaaagaaaagaaaattattaagaataaaatggatggctatcctaagttactgtccaagacatccaaggaaaagtaccacaaatcaagaatgtttccaaaaataccccatgagaacaattcaacaaatctacattaattttaaaagttaccaacttttcagaggcaaaatgatttgctgctaaaaatttaaagtcctgagttttcatccagagcaacacactctggttcaatgatgtaattcacaggcaaataaaagaatcacattaagtcaccctccagtcatagcatcatttgatttctgaggtcatttggttctcagacaggagccaggtctgatagtaaataaaaatcaactacagtagtaagattctacttattagaacttccctgtgtactgtctcataaaaatgaagtaatatgcttttggatttaatgtagacagtttcaattatatttaagaaaagcaaagtaagattaattcgagaaacaggaaaaagaaaacgagtcctcagacactggattctatttaacactcttcactttatcattgcttaaatatttgctttctactttgtcatgctacctctctgcatcacagaagaaaatttgatacctcagtgacagaataatttaagagcaagctaaaaattaatcagcacataaaagcaagaaaactcataacccatctgtttaagaacagcttatatattttggggaaggggaagcaagacttaggatgctggaaaatgtaaaacacaggccttaaagctcctttttcaaaaatgtctgatgttgctgtctctggctgataattacagccctgggagggcagctgtgagacaatgctgacaatgatgcagtacacaggctctcaagaagctggtaagctgctgctacctttcatactgtgaaagaacaacacaagggtcagacttcccttttctgtaacctgtgcatttcaactgccatacacgaattcagttatcatcaacagttatacaacctcatgatctcctccctgctccctagcttcaccctccacattcgccctcaatgtttgctgtgctcctctttactcttgacattttagtatagaaagggaagtgacattttgaccctctgcctagaaaaggttgcactcttgagtcactttaactcatcctttaaagcagaaactcacttcattaaaataagcaaaaattatctgaggcacctaaggaaggtggggagatgttcgtttaaaccttgataactcagtatttcctcctcttgatgaggacagagtgactggtcactgctgaagtgagcatgggaaaaattaaacatctctaggccaagaaagtagcttaagtcaaaaaaggcaactgatctgaaatacaccgaatctacaaaaactgtttcccatttcatgcatacacaaccctacagagggtataaacactaccagcaaaccgtgctaggaggtcacaagcactccctggagcatgcacgagcagcacagtttataaaacgttctataggcagtgtgggagacaagggctggatctggctccgaccaaagggtggagctaatgcataccttttggtcttctggaatttccattcttttgctgttcgtcttcctcattaatggtgaataaaccaagaggaattggccttgcattggtcttcttcagtctctcatgtcggagagctgtagctgatccaggcataccgctgctacttgttttttttttttttaattgtgattatattaaaaatatatgcttatgtaattgcagctcccaggaagctgctagttcctaagctgcctgttcatttgagcacttgtaatagatcccctatgggtaaacagtttgcaaacagctgacagatagtaccagccacttggcaactgaggccctgcagttcccctcacctagcagcagcttccccacctcccctaccagccccctcccactgactccccgacaggcacatgcgctggtgattgctccggctcatgcatgcacgtacacgcgcgcgcacacacacacacacacacacactccttccagaaaagccctactacagacacgcagggtctgatgcctcccaccactgcacaacctgttcaatcagatcccagcttcttcctgctgcagcacctttttccaatcttcttcctgctaccacacagtaaaatattcagcccacagcagagaggggaaaatatgatatgctgccgttaacagttgccctgacaaccctaacatatcctaatcaagaagggcccagagcggctccatctccccagctgagaagcggcagcttgcaggatgctgggttctgggaactcaccagcagagggttacagcgtgaggccgctgggcagctccctcttcctctcagcggcagcgcagcaggatgggaggagaaagagttttgcttgcacaagcagcagtagactcctcagtatggagacagaagcctgaggaagaaaggctttttcttcttttctgggccaggttgtctatcataacaatgtttgcaagcccctggatgaatgaaggcatggctggtacccacagagcagctcactttactttcctgacattcttaccaccccagagcatgtataagaacagggttggcagcaccagtcatgagggccaccagtgccatgtccctgaaaccctctggtgaagacaggcaagggaagaactatgctggctcccaccagagatcacaacgtggagtgtctcctctgcaactcaagtttcaaggacagaacctatactggggaattctccaaaggagaaaaacctgtctctattacacccagcacaccccccaccctcaatccctaccgctctgggcagttgctaccagcggtgctgagcaatgctcaacacttgacccaattttagctcttttttggatcgttttcttcaaagcacagaatcatgtgactattgttttctcctgaaataagctatctcactttaagactctccacttctagactgcttaaaatgtgtgctgtctccaaaaaaaatttacaataaatgacattaaaacatgccaactgccaaattaagaaaaaacattttttttgcttttgtgttttaataaaaatcaagtctgcttagcaagtcaaaagcaatcctcccactccccaactactcccttactttttctcagtacttaaacctacttacccaaaagagggcccaagggagtctaaggcaagtacaatatcctctctaaatctcttgcgtggaacagtaactttggacaattcacttaactctctcagtgcctccgttttctctgtaaaattggggtgatgactatcatttacctatggtattagggtgaggattaaatgcgtgtagtgctagcaacttgaagtgcttaataaataccaactattattatactttataatagtttgctgtaactagtccattttttgctttgtaattattttcaaggtatttccagttcaactatcaatgctaccaggaagtacttctttgtatctactcttattgtccagcatggtgctgggggatgtactaaattgtgagcaaacacatgctgaaaaaaataaatgaatcttaagaactctttccctccacaggctgcttgatttaattaagttcacatgtatttagatctctggcatgaagaaacgcaggaaatttcagttttagagtttattttaaattgtgtcaatctgtgcagtgggtctttggaataaaatagaatggagttttggagctgaatgggcctgagaaagcaagtgagtcagcatcgttttacatgcgaggaagctgaatctcacgaagtgaaattccttgcctaggtcaaatgttagttggcagcaagtctacaattaaaatttagaccatcttcctcctagtccagtgcttctcccgatgacaaatgtttgacccagatgttttagaatcctagat

SEQ ID NO: 585433 - DNA, 4001 bp, Homo sapiens
tacagtagtaagattctacttattagaacttccctgtgtactgtctcataaaaatgaagtaatatgcttttggatttaatgtagacagtttcaattatatttaagaaaagcaaagtaagattaattcgagaaacaggaaaaagaaaacgagtcctcagacactggattctatttaacactcttcactttatcattgcttaaatatttgctttctactttgtcatgctacctctctgcatcacagaagaaaatttgatacctcagtgacagaataatttaagagcaagctaaaaattaatcagcacataaaagcaagaaaactcataacccatctgtttaagaacagcttatatattttggggaaggggaagcaagacttaggatgctggaaaatgtaaaacacaggccttaaagctcctttttcaaaaatgtctgatgttgctgtctctggctgataattacagccctgggagggcagctgtgagacaatgctgacaatgatgcagtacacaggctctcaagaagctggtaagctgctgctacctttcatactgtgaaagaacaacacaagggtcagacttcccttttctgtaacctgtgcatttcaactgccatacacgaattcagttatcatcaacagttatacaacctcatgatctcctccctgctccctagcttcaccctccacattcgccctcaatgtttgctgtgctcctctttactcttgacattttagtatagaaagggaagtgacattttgaccctctgcctagaaaaggttgcactcttgagtcactttaactcatcctttaaagcagaaactcacttcattaaaataagcaaaaattatctgaggcacctaaggaaggtggggagatgttcgtttaaaccttgataactcagtatttcctcctcttgatgaggacagagtgactggtcactgctgaagtgagcatgggaaaaattaaacatctctaggccaagaaagtagcttaagtcaaaaaaggcaactgatctgaaatacaccgaatctacaaaaactgtttcccatttcatgcatacacaaccctacagagggtataaacactaccagcaaaccgtgctaggaggtcacaagcactccctggagcatgcacgagcagcacagtttataaaacgttctataggcagtgtgggagacaagggctggatctggctccgaccaaagggtggagctaatgcataccttttggtcttctggaatttccattcttttgctgttcgtcttcctcattaatggtgaataaaccaagaggaattggccttgcattggtcttcttcagtctctcatgtcggagagctgtagctgatccaggcataccgctgctacttgttttttttttttttaattgtgattatattaaaaatatatgcttatgtaattgcagctcccaggaagctgctagttcctaagctgcctgttcatttgagcacttgtaatagatcccctatgggtaaacagtttgcaaacagctgacagatagtaccagccacttggcaactgaggccctgcagttcccctcacctagcagcagcttccccacctcccctaccagccccctcccactgactccccgacaggcacatgcgctggtgattgctccggctcatgcatgcacgtacacgcgcgcgcacacacacacacacacacacactccttccagaaaagccctactacagacacgcagggtctgatgcctcccaccactgcacaacctgttcaatcagatcccagcttcttcctgctgcagcacctttttccaatcttcttcctgctaccacacagtaaaatattcagcccacagcagagaggggaaaatatgatatgctgccgttaacagttgccctgacaaccctaacatatcctaatcaagaagggcccagagcggctccatctccccagctgagaagcggcagcttgcaggatgctgggttctgggaactcaccagcagagggttacagcgtgaggccgctgggcagctccctcttcctctcagcggcagcgcagcaggatgggaggagaaagagttttgcttgcacaagcagcagtagactcctcagtatggagacagaagcctgaggaagaaaggctttttcttcttttctgggccaggttgtctatcataacaatgtttgcaagcccctggatgaatgaaggcatggctggtacccacagagcagctcactttactttcctgacattcttaccaccccagagcatgtataagaacagggttggcagcaccagtcatgagggccaccagtgccatgtccctgaaaccctctggtgaagacaggcaagggaagaactatgctggctcccaccagagatcacaacgtggagtgtctcctctgcaactcaagtttcaaggacagaacctatactggggaattctccaaaggagaaaaacctgtctctattacacccagcacaccccccaccctcaatccctaccgctctgggcagttgctaccagcggtgctgagcaatgctcaacacttgacccaattttagctcttttttggatcgttttcttcaaagcacagaatcatgtgactattgttttctcctgaaataagctatctcactttaagactctccacttctagactgcttaaaatgtgtgctgtctccaaaaaaaatttacaataaatgacattaaaacatgccaactgccaaattaagaaaaaacattttttttgcttttgtgttttaataaaaatcaagtctgcttagcaagtcaaaagcaatcctcccactccccaactactcccttactttttctcagtacttaaacctacttacccaaaagagggcccaagggagtctaaggcaagtacaatatcctctctaaatctcttgcgtggaacagtaactttggacaattcacttaactctctcagtgcctccgttttctctgtaaaattggggtgatgactatcatttacctatggtattagggtgaggattaaatgcgtgtagtgctagcaacttgaagtgcttaataaataccaactattattatactttataatagtttgctgtaactagtccattttttgctttgtaattattttcaaggtatttccagttcaactatcaatgctaccaggaagtacttctttgtatctactcttattgtccagcatggtgctgggggatgtactaaattgtgagcaaacacatgctgaaaaaaataaatgaatcttaagaactctttccctccacaggctgcttgatttaattaagttcacatgtatttagatctctggcatgaagaaacgcaggaaatttcagttttagagtttattttaaattgtgtcaatctgtgcagtgggtctttggaataaaatagaatggagttttggagctgaatgggcctgagaaagcaagtgagtcagcatcgttttacatgcgaggaagctgaatctcacgaagtgaaattccttgcctaggtcaaatgttagttggcagcaagtctacaattaaaatttagaccatcttcctcctagtccagtgcttctcccgatgacaaatgtttgacccagatgttttagaatcctagatcgatctccaatttatgtggagatggaaggaaagggaggacgcatataagatcttattgtttaagaaataaaaaaatggatacaaattgtaaacgtaacatacttccataattttctatatttgtaaacttttattcttgaatgagacatgatttgttatttcctattatttttctttaatcagatgatcaataaacacaggtgtaatatacatcaatatcatactatttgtgaaatgaaaatattttcaaatccacattagcttctttcctctacttcaagagagtcaggtcagtatttacaatagcaaaagcataacaaaacaaaaaagcaaaataataacaaaaaaaaccccacatacaaaataagcatacttgaaactaccttttggtaa

SEQ ID NO: 585434 - DNA, 4001 bp, Homo sapiens
attctagtgtgaggaaagacaataagcattaaagcatcaggtagtgaaaagtgctgaagtcagaccaaacaatgacagagagcactttttgtctagaggaggtcacgtgtaccatgctgttcattattccacagcagcttgatggtgaaaacaggttctgctcccacaaccatgtggactttcatgaatgagcagcagggctgccgtatgtcgagtacacacacagctgcgaagtgtgcagaggacagctccccctgcacctccactgaaatttgaatttatggaaacatgcagcttctgtgttatctacttttgcaggaaattggaaaactaggaccaaaatcaagcatacaaaaattgagtattttaagccacttatctaggagtttttgaccaattatctggatttttaaaaaattctcccttcaattttaaatttcttaattggacatttatccagttttcttactgagtaacctctatttcatctgatagaagcaatcctattttatcacattcaaataataatgaaattcagtgcttatgcatcaactatgtcttatcctaatacttgaaaagatatgtaaacatgctttctgcaaagaaagatacgtctccataaaacagaatcattaagggcaaaaaaaatggaaagtcagttagccgattaaatatcaggcaaggcatttttactcttctttaatgtatatacaaccctgaacatttgagattattctattgtttaatgatattgacacacttatagaatataaatcacctgtctgaaatcacagaactagtaaatgtcagagctaaaagacaaattcagatccaaccccaaagatatttctaatatgctgcccggactctatattttataatcataaaataccaaaagcaaaccacttattgacactaatccatcttctaacagttgctggatactggcaagtatatacctcacgtatgtctcctacatgaaatgtaggaggtgtgtttttataacacaaatttgcaaatgttatctgtgaaaatgaagatttatatttttaaaaggcaaataatttagtgaataaggcagctttattattctaaaaattaaacttgatagaacatccacataaacttctagaaaagaaaataaagtgataaaagttactccccgaaatgtagtctataaagttccaatgcttgtattttctctgtaaagcccatgtgtgactcactgtttacatatcatgaaaatgagagcattctggggaaagacataactgggcagcacaaataatgtttctgatataaaacaaaacaaaataaaaaaataagtaggcaagataaatgtgatctttctttttaataagcaaacaacagcactccccaaatacacctctctaaatagaaaagcaaccatttttcaaaaaccctgatctgatctagacacaaatattaagaggtctaagaaattatcagtaaattatatactgaaattttttttggacagcagcataattgtgtatgtttgtctagtttgctactgttcagcttctcactttgtttttgtcaaaaaaagaaagaagtatggaaaatagagaatgatgatggtttgcctttaattttcatggaaactatcaaacggctctaggacatgaaggtagaagtataaatccatagtttatataataaatatcattttatttaattaaattcccactcctttttctaaggacattaaaacaatgattaaaaaaaaaaagattagaagatttcctactctgtacttccacttgttataagtattaatttgtcaaaatggatttaaagattgcctgattcttgaacgtccttattaaggttttcaaaacacattttgagcccaagaacttacagtacagtttagtgtcttccatgctaaaatccttctttcttgaatatcctgcaacatatctgcatgtctccctcttcttgctttgtgtccctcagccaggcaaagaccaaatatcagtgaaggggccgtttaatcatgctaactattatctctcacacagcttgaggtagctcaagaggagagcaaagggtggtgagacatacaactcgacagccactgtttttaaacagtaaccgtgttcactgaaccaagcaaaaactgggaaatgcttctgttcaaaaaagccagtgaagctcaaatggctatgggctgggagtaggggaggcttttcctggttaagaaatggttgctaaacatcagctcggtctcagggattcaaactcagaggccccaaacagaatgcacattaaacatacattaaaaacttagctgtttaccaaaatcatctaaacattacatactatttctccagactgtctgtctttgggcttcctgatgcattaacagtgacatttaaaaccctgaaggttatggctgattttgtttccatactaaaagcatctgaaaaaggcgatcatttaaaatcagtcaggcagagtggcctctgttctcccttcactgctgagaacagacatggagtcactgagaaagtgtatggaatgacatttaggtgccctgttcagaaagtccaaaaacttgacttgctttagtaagttctgaataattctgaaggctttcccaggggagaagaagaactagtgaatttaaatgctaaagttttagaagttatttctatatatgttaaatattggtcctcagagtttatcattttttagtcagtgatatattgcattgtaaactgtgaactcaacatgtctaccacacttttgacttgggattatctttagaagggctttttgtttagggtcatagagtgggaaccgaggagaaaggatcaggttaaaaccttgccttgccctcacagcatttaaaaacatgtgacttgggggccagaacactttgattacaaccaattaacttaatgagtttgggtgagcagtgggcccaatgtgaaaaggaaaacacaatttttagaagaaaataaaacctgccaagcccctctgaactagcccctttgagcagttggacctgacccaataaagagattggccactcatggtttctaagacgcgtgagggtcaagtgtgggcactggacttggcaactaaccttgttaatacccttggaactaccgactccttaggaggagccagtggagtgccccttctagcccagcaccacccctacagccccagagacccagcatcagagcgtgtgaccaccactccccacccactccattttcaaaagtagcctatatagacatgggcaacaccttgcgtgcatggctccttaccttggtactactgactttttttttctttttatccttcttatggtactgatcctgacattatagactggataattctttgttgtgggtggcagctgaaatttattgatcatctattatgtgtcagatattattttaagggcttttacacatatgaactggtctaatctcacaacaaccctattatgacgccagttttacagatgaggaaactctgagatgcagaagaactgctgaagatgttaagtggcagactcttcatcccgatacagatgctgctcgacttacaatggggttatgtcctgataagcccattataagttaaaaatatcataagttgaaaaagcatttaatacacctactgaatatcatagcttagcctagcctaccttaaatgtgctaagaacactgacattaggctatagttggcaaaaccatctaacacaaagcttattttgtaatacagtgttgaatatctcatgtaatttatttaatactgtacccaaagtgagaaacagaattgttgtatgggtactcaaagtgtgttttctactgaatgcatatggctttcacaccatcataaagctgaaaactcttaagtcgggacctggctgcactatgttctgctgcagcatctaccctccctctaagtaaggaggtgacttctcacttccgagcaacaaagacattcaggccagtgct

SEQ ID NO: 585435 - DNA, 4001 bp, Homo sapiens
ggttaggaacgaaaatcatgccgtatatttacaaatgaggatgctcctctcccggggccctcacttgggggagccccgtcccagcgtctagctcatcaaattcccgaaagcaattacaaaggcatctcttctccaccccaaaacaaaataatgatctaccaatcttgcgaacacattaagacaaactccctacaggaaggagcatgacttaaacaagttcaagatactttgtcagtcttaacctcaggtatcttggctgaagggattaaatcattagactttacgtacccaacctcttcctagcaatagcagatacataatttgcaaatactgtttcagagctctctggacctttcacgttaaaataagcatacttgatggtggggagacagtgattcttacatttaggaaacaaatgcttccgattgtgaccgtatggaagtggaaaacagcttgcaattggagagtctaagaattgaatttctttttaaagtaagaaactgcctcactgcccccatccccaagtgtaggaagatatagaaacagcttactggccaagaatagaagagggaaccagtggagagggacggatttgcaagatagcctctggagaaaaaaaaatcacgagggagaaaaatcggcttcatactatggagagatgggcggggttgggaagccttgctgctggtcttgggaagccttgctgctggtcttggggacgtgatcccctgtccctaagtgtgcccctggaggttgtgggggaggggtatcctcaacacagaggcctgaccaccaaatcccgggctgcagagccaacaatcctcctttgggctcctgcacagactaaaaacaaaaaactctgagaactccgacaagtcaacgaaagtctgatcccgtcaagcccgcactcgcaaacccccaccgtgctgcactgggccccggccctcccgagctcggtcccctcggacgacggtcgtcgccactgcgggcaccagattggggggcgggccgctcaccccgcggtcctgccccacaccgaccccgctgaggagcccccggcacccggggcgaccagggaaggcgggaggaggtgcccagaaactgctcgtcctgccagtcgcacctggccgacgactctctggccactggtttggtctgggggatacgatttcccattcaactgaattagacccgaggccgcggcggggagggcagcggccggggtctctccgtttcctcccccggctcgcctccacctgttgcgggaaagtcgcggtggagcgcccgagggcggccgcaaccccggccggggccgagccgggctggccgagccgcggcggcgaagggcgggggaaggcgctctcggagcagggtgcgcggcgcgcagggccggttgttccgggccgcggccgcgcgggcggggagggggctgccggcgccgggtgatttcggtgccagcccgccggccccgctcgccgtcccctgcccgacgggacccccactatccccgctgtgcggtcacctgtttcgcttcgcactgcgccgtcgccgcccctgtggccgtcgccgccagctcctagctccgccatggtgctccgatgacgcgcccggagagccgctccgccctttcctcggcttggctcccgccggcccccgcctcccaggccagcggcccagacaggtgagcgcagtccggggatggcggagggcggggacagagagcgcggcagtcggctgcggcctgggcctggcgcgccccctcgcgggcaggtgcggcgtggcagccgctccgaccgccgctgccgagtctcggctggaagagcggcgggcggaaccagtacctcagtccggagcttccggtcgccgcggccgaccagctgagggctcccggagatatggagcggggtcagcgaggcctggtggcgcctcctggagtctgggacgagcggcggtccgaggagcagcccaggtggggcgagggtacggagacgctatttccctccgaactctgaagtagccaggtcagtgtcggctccgcgagggctggagttcacggtgacagccggcagagcatctgatgccacgtggagaggcgaagtacatgggtcggattccacgctgggagccggcctggatctgcgctttaggaagccactgcgggcgaccctatcttgtcgccaggacttcgcatctgatgagcctcagggcacacaagttagagaggcttgtgccggctgatgtggcttttctttttcttagtttccgtttagtaaacgaccttgtgacttctggcttgctcaggaagaccagaaaaaaaggcaataggtaacgaatttttctttttttaaagaaacagattattggccgaggaaaaaccaatttcgctctaaaggataagcaacaaaatactgaggggggaaaaagcctacacaaatggaaacatacggcacaaaatcaaggagcgaccagttccgcatggttacactaaaatgcactgcactcccactctctggcttggctgaagataaccagcaagctctgaacagtttaaaagccttccaaggactgcagcagcactggacacacaagagagtcgagaacagtattggatttattgttagggttacaattttcacgatctttgcatgcaaaacttgccactctgagcccagtgaactatttttatttggtttacttactggctttctggatgactaggtagagctttaactaaagaacacttctgctgtggtctgtgatgatgaattttcccgtagtgtcatttctataatggaataggcaaactgaccatttagaatgtgatattcctaaatcacattcaaatcagtcttatcagagacttctaatcaataaaaataaagcaccagatggctagaggtagtttttgacctcagcttgggcctcagcaaagattttttgtgttttttttaactacattaaaacatcagagtttaagacacttttctttgagcatcagaaatactctcagctgaatttagagttgaactatccggaagaaccctggagaaggagggtgatttattttcaactttctgatttaccaccgacttaaatcaaccaatgagttctttctttgaccaaaaaaaaaaaaaaaaaaaaaaaaaaaaaaaaaaaaattcaagacttgtgatgtttctatttgttttgttttgtttagtttggtgtgtgcttactcattgtcccattcttttgataacctgtatttatctgccacaagttaaacaaaaataaatgaaataaggaacacaccaaaatcctgcacttaggccctgtatagacagtgtgttccaaacctaaggaggtgtctgcaacaggggaggctgctgagtgactctgcagagaacagatgacatctgttaaatgtcaaacaccatcacgtcgtacttcaagttgtactttacttggaacatggaagccatctgtctggagctcccacatccatttcaaatcttcagggttccccattccaggggaggagctgaacctcctgacaccgtccacttccctcctgcctccttcaaacatcatcccttttttctcccgaatccctaaatgtttctgcacccaagggctctaccccaataaacacagctaagactctttgattcttaaaatgtcttcctttaacgtcccaccctccagaatctattgtcgtatgttttgttcaccaaaggtaataaaaataaatgtggattttggtgccgttatttttcaaaaaaagctatatattaatagtttttcttgcttatgtatacaaatcaaattacttatttttaaatccatcattcccctagagtttctgcagcacttgatcctctaatcaccttgctcttggtctaccattggcttggtttttctccttcctctgtagcagtcctttcgtctttgttgactcagattcttcctcccttctaatcctccaatatttttaccatcccctaattgtaaaccacaggctt

SEQ ID NO: 585436 - DNA, 4001 bp, Homo sapiens
gaaaagcaaagtaagattaattcgagaaacaggaaaaagaaaacgagtcctcagacactggattctatttaacactcttcactttatcattgcttaaatatttgctttctactttgtcatgctacctctctgcatcacagaagaaaatttgatacctcagtgacagaataatttaagagcaagctaaaaattaatcagcacataaaagcaagaaaactcataacccatctgtttaagaacagcttatatattttggggaaggggaagcaagacttaggatgctggaaaatgtaaaacacaggccttaaagctcctttttcaaaaatgtctgatgttgctgtctctggctgataattacagccctgggagggcagctgtgagacaatgctgacaatgatgcagtacacaggctctcaagaagctggtaagctgctgctacctttcatactgtgaaagaacaacacaagggtcagacttcccttttctgtaacctgtgcatttcaactgccatacacgaattcagttatcatcaacagttatacaacctcatgatctcctccctgctccctagcttcaccctccacattcgccctcaatgtttgctgtgctcctctttactcttgacattttagtatagaaagggaagtgacattttgaccctctgcctagaaaaggttgcactcttgagtcactttaactcatcctttaaagcagaaactcacttcattaaaataagcaaaaattatctgaggcacctaaggaaggtggggagatgttcgtttaaaccttgataactcagtatttcctcctcttgatgaggacagagtgactggtcactgctgaagtgagcatgggaaaaattaaacatctctaggccaagaaagtagcttaagtcaaaaaaggcaactgatctgaaatacaccgaatctacaaaaactgtttcccatttcatgcatacacaaccctacagagggtataaacactaccagcaaaccgtgctaggaggtcacaagcactccctggagcatgcacgagcagcacagtttataaaacgttctataggcagtgtgggagacaagggctggatctggctccgaccaaagggtggagctaatgcataccttttggtcttctggaatttccattcttttgctgttcgtcttcctcattaatggtgaataaaccaagaggaattggccttgcattggtcttcttcagtctctcatgtcggagagctgtagctgatccaggcataccgctgctacttgttttttttttttttaattgtgattatattaaaaatatatgcttatgtaattgcagctcccaggaagctgctagttcctaagctgcctgttcatttgagcacttgtaatagatcccctatgggtaaacagtttgcaaacagctgacagatagtaccagccacttggcaactgaggccctgcagttcccctcacctagcagcagcttccccacctcccctaccagccccctcccactgactccccgacaggcacatgcgctggtgattgctccggctcatgcatgcacgtacacgcgcgcgcacacacacacacacacacacactccttccagaaaagccctactacagacacgcagggtctgatgcctcccaccactgcacaacctgttcaatcagatcccagcttcttcctgctgcagcacctttttccaatcttcttcctgctaccacacagtaaaatattcagcccacagcagagaggggaaaatatgatatgctgccgttaacagttgccctgacaaccctaacatatcctaatcaagaagggcccagagcggctccatctccccagctgagaagcggcagcttgcaggatgctgggttctgggaactcaccagcagagggttacagcgtgaggccgctgggcagctccctcttcctctcagcggcagcgcagcaggatgggaggagaaagagttttgcttgcacaagcagcagtagactcctcagtatggagacagaagcctgaggaagaaaggctttttcttcttttctgggccaggttgtctatcataacaatgtttgcaagcccctggatgaatgaaggcatggctggtacccacagagcagctcactttactttcctgacattcttaccaccccagagcatgtataagaacagggttggcagcaccagtcatgagggccaccagtgccatgtccctgaaaccctctggtgaagacaggcaagggaagaactatgctggctcccaccagagatcacaacgtggagtgtctcctctgcaactcaagtttcaaggacagaacctatactggggaattctccaaaggagaaaaacctgtctctattacacccagcacaccccccaccctcaatccctaccgctctgggcagttgctaccagcggtgctgagcaatgctcaacacttgacccaattttagctcttttttggatcgttttcttcaaagcacagaatcatgtgactattgttttctcctgaaataagctatctcactttaagactctccacttctagactgcttaaaatgtgtgctgtctccaaaaaaaatttacaataaatgacattaaaacatgccaactgccaaattaagaaaaaacattttttttgcttttgtgttttaataaaaatcaagtctgcttagcaagtcaaaagcaatcctcccactccccaactactcccttactttttctcagtacttaaacctacttacccaaaagagggcccaagggagtctaaggcaagtacaatatcctctctaaatctcttgcgtggaacagtaactttggacaattcacttaactctctcagtgcctccgttttctctgtaaaattggggtgatgactatcatttacctatggtattagggtgaggattaaatgcgtgtagtgctagcaacttgaagtgcttaataaataccaactattattatactttataatagtttgctgtaactagtccattttttgctttgtaattattttcaaggtatttccagttcaactatcaatgctaccaggaagtacttctttgtatctactcttattgtccagcatggtgctgggggatgtactaaattgtgagcaaacacatgctgaaaaaaataaatgaatcttaagaactctttccctccacaggctgcttgatttaattaagttcacatgtatttagatctctggcatgaagaaacgcaggaaatttcagttttagagtttattttaaattgtgtcaatctgtgcagtgggtctttggaataaaatagaatggagttttggagctgaatgggcctgagaaagcaagtgagtcagcatcgttttacatgcgaggaagctgaatctcacgaagtgaaattccttgcctaggtcaaatgttagttggcagcaagtctacaattaaaatttagaccatcttcctcctagtccagtgcttctcccgatgacaaatgtttgacccagatgttttagaatcctagatcgatctccaatttatgtggagatggaaggaaagggaggacgcatataagatcttattgtttaagaaataaaaaaatggatacaaattgtaaacgtaacatacttccataattttctatatttgtaaacttttattcttgaatgagacatgatttgttatttcctattatttttctttaatcagatgatcaataaacacaggtgtaatatacatcaatatcatactatttgtgaaatgaaaatattttcaaatccacattagcttctttcctctacttcaagagagtcaggtcagtatttacaatagcaaaagcataacaaaacaaaaaagcaaaataataacaaaaaaaaccccacatacaaaataagcatacttgaaactaccttttggtaaagaaaatgaaaatctgtattaagcaaatgactaatttcatttagaaatgtttgtcacccaaatacagcttacagcttccaaacaaagctagctgctgctctaat

SEQ ID NO: 585437 - DNA, 4001 bp, Homo sapiens
cttggaagcagtaaaaagggcagaggcctagaggaatcccctggatttggagggagtttgcaataaatcatgacagagagtcaggctggggagaagggaaggtggggagaatgatgtgtgctcattgctgtcaagtctggtgtcagggcaagcaacacaaacccactctcaactcacctaggcagcaggaaagcataaggggagggtggaagggaaaaaggagggaacagagaaggagcttttcagccagcaaactccctgcccctgaccttgggtctccagccacatccatccttgcctgccacagggctggttcagagccaagggcaagatcaccctggctggaggccataggggaggggtttgctggagaaggatgggcttaaaatgtacataacattttgaaatcattctttgaaatgtctgccctccaatctaggtatcctgcagcaaagcctggctgccaggccctgagctgggcccctggttttcccagctgcttctatcagacaagacaatctgatggtcatgtgctcagaccgggagcctcgctgccgagattgaaaccccagctctgctactgactaaccatctaatctgtgagccttgctgtgctttagtttcctgtctgtgacatgggggcagtagtactcatatatcatgaggactagacaagttagtgtatgcagagctcttagaacataggaagtgctcaatatgtgtatattgctattgttatcagggtcacgtggacacaacgctaactaggattctagtcccagctggccacaagctctcagacatggaaccaattacaaagttcccctgtgccaatttcctctgtaggataacacagtctgtacctcacaaagtgcattctgccaaaaataccctttgacctcttcctggaaagtgggcagggaaggtctcggcaccccctcctttcaatagtgaggcgagaggcaccgtcaggggagcagggaggagactgtcccgagctctccataccgggaggccccgcctgcgcctgcccctgactccccagggcagcccccaccccctccccggggcagccaccacctacgttctcatgctgcatgtgcttcagcagcagcagctcccggtaggcgcgcttggcgaagatctcggactgaaagggtcggctcagcttcttgatggccaccttctcccctgaccgcttgtcgatggccgagctgtcgggcacaggccggtcagcaggcgaggctctcctcctgggccgtatctcccagaccgccctgacccctcccactgggcagctgggctgagaggggactaggcccaccacctagaatatgggggagccgcgggacgcagggcagggagtaggaagccaggcaggagctgagagaggggcacagcgccaggggcagcaacgtctcattgcgacgggatccacggcagggcgggagtctcactctgtctgcaacttggcgagccacctccccctcttggggcctcggtgtactcgtctgtaacagtgaggatctgcccgatgaactctggggtcttgcaagtgtacagtcctggagaaccaggcccagtcccaactcaacccccagagacctcactcagccactcggtgagaaaagggagatggccgctgggtggccccggggagggcgctgggccttgaggtccgcggtcaaggtggcgctggcgaggggccagcccagggcgggctgggcggaaaggggagagcctggcgcccgccccccgccccccagcggcccaggggtctcaccacacggagccataggccccgctgccgacgtgcgtcggggacacgtaggtcttgggcagctcccaggctgtcttgttgacgtcctgcttgtagaagccctttttccggatgaggctcatcccgggcacccgatctcggcggccccagcgtggcggctgcgttcgcggcccaacgggctcccagcgccccgacccccgctgcgcccgccccgcgccgcccgctcctcccccgcgcgagggcgggggccccgggctgctacgctcccacctgccggctcgcccaggtgcgccggggccgccacgcccgggcctgtccagccctgcgctcccgcgcttccgcccggcccgacggagccactgcggcaggtgcggcccaggcacggggtcggggctgcccagcgggaccccggtgcctcccagccgagcgcgggccagcggcggggctggtgggtccaagcaggagcggggaggcagtgcttcccagttccctccagccccggtctccgtaggaagagctccctgtgactgtgaacacacaggaaagcagaacaaaaccccacaacctcttcattatggaaaatgtcaaacatgcaggaaagaattgaacagagtaagccagcgcttctcacacttcagtgtgctcaggaatcccctgggcattttatttgattaaaatacagatcctgactcagtaggtttggggtggagccgagattctgcatttctagccagctcccaggtctgaggcttctgaaccacatctgataggaggttctaatgaacccccgtgaccccaattccccagcaaccacaactcataatcaattttatttcatccacattcctctcccaccatcgttttgaagcaaaacccaggcgtcatatcattttattcataaatatttttgtatctctaaaacgtaaggatttttaaaagtacgtatccacaatactatatatatatattttttgagactctgtcggagtgcagttgccatctcggctcactgcaacctccgcctcccgggttcaagcaattctctgcctccgcctcccgattagctaggattgtaggtgcctgccaccaaacccggctaatttttgtatttttaatagagatggggtttcaccatcttggccaggctggtcttgaactcctgacctcgtgaaccacccgcctcggcctccgaaagtgttgggattacaggcgtgagccaccgcgcctggcccacaatacattcttaaacctaaaattaatagcactaattctataataccaaatatccacgcaggttcaaatgtgcaggatttttgtttgtttttgacatggagtctcactctattgcctaggctggagtgcagtggcgccatctcagctcactgcaacctccgcctcccaggttcaagcaattctcttgcctcagcctcctgagtagctgggactacaggtgcacaccaccactcctagctaatttttgtatttttagtagagacggggtttcaccatgttggccaggctggtcttcaactcctgacctcaggtggtccgcccacctcagcctcccaaagtgtttggattacagaagtgagccaccgcacctggcccaaatgtgcagttttgaacacagtttctgtggacttcctaaggctctatgaggacaatgactaattggggcccttgccacctgtctggtggcctgtgcagcctgatggagattctttgctcaaaccacaaaggcctctgaggagcaaggtgggcaggtggggggaggagatggctgcaagggctctggatgcccagcctgacttgtccaacccctctcttgcccaggcatggggctgtggaaggggcggggaccacctgcttcactttgtcaaaaagaaggtctattgaacaaggaaagaaatttgctaggggcttacagcaagccgggggcccacactagggagtctgcagcccccaaactctgtgccccaagccctcccgggcagtcctgcagcctcaggcacagcctggaagatcattctgagatgagggtggggtgccatcatcacacaacaacacctgccattatttcagtcaggcaatctgtctttttcatttctggcacatggcaatataacagcaaatgtgtggagaatgaatggaggagtcagcccattagatgtaaaagagtcatttaatacacacttgtgtttgccatgtgcccgtcattaag

SEQ ID NO: 585438 - DNA, 4001 bp, Homo sapiens
acccagaagattctaccaaacaggaaattcatgatgtgactttgggaaacacagaaatcatatttaaagattaacacatccaaaagcctggaatttgttccaaaacaaaaaaacgattttacaggcccgttttcaaatgacgcatacaatacgaattactaaaacacagaaaaagctaacagttaaatctgatacttagtttaagatccgtagctttcaaattatagaaaatctaaaatacagggtataaaaccttggaagttaagagagcagttagtgaaatatttcaggtctggaaattatatgctatcgacttaatttaaaacacactcacggtgtaaattaaagctaaaaagtatctcttcccttccttttctatgtggttccatatccttacgaaaaccatcgtgtacctcaggccataaatgcagataactagataactccctgcaagctctctaagggacttttaaaacacagtattcgcaggaattatctcaaaaaatatttacaatacctcccagcactgttaataactttttgatcttgagggcgccttacagatctgaatctttcttgctccaaatgagaaaattgttttgtcgaacaatacttaaatgagcagtggtatgtgactaatcagtgagcctgccagtttctcaagctgcagtgttcttgcaggcactaccaccgccgcccctccacggaaaggaaatacgctttcaaccgaatcggaaacacaccactcaagctggcacagtgctcaccgagataaagtcggtattttaagctctatggatcgctgttaattcaagtgcgaattcaaaaagaacgcttttcaagatgggatttcgacagagttttgaaaaaaaaaaaaaaaaaaaaaggcccggagagagctcccttcctggtcagttttgttcagatgaccgcagtcttcgggttgggctgtgcccttctgcttctcccggcagttccccgagcttgtctgctcagaggacccagggtccggagccccagcgtgggcgcatcacgggagagggtccttctgctccaggtaggcagggagacccccaaggaagcggcccttcccccggtgcctgttgccgagcagcaaccctccgagaggggaaggcgcagggtgctagccagaaccgagctccagcaccaccacctacctctcgcagcggacctgagtgctgcacacggtggaccgcatacctgcgtgagtgcagggcgaggggtgctggaggtgcagaacgggcagagctcgaaggggcagcaatgccctcccccgaggaaaattcctgccacttgacgcaacgctgagcagtggagcaggcctggccctcgggcgcgaggggccaccctgcccacagcggccccaggcccagcgacactcaccacacagagccataggcgccagagcccactggagacaggttctggtaacgctcgggcacctcccagattgtcttgttcagctcctgccggtagaacgtgggcctctcctgagacattttccagcggcagccgccgggcaagaaggtggccctgtggggcccccgcctgcacccgcaccctctccccggcccttgctgcccgcccagccgggcggggaccttgcgctggtcgcccgcgcaggtgcggctgccgcgaccccgcagactcccgcgcgcgcggctgctgtcagccgcagcggctggatgtgcccctgcgactggggcaagccccgctaagggcagggacgcgctccggcgctcaagactgcgcccgccgcgatctccctgcaccttcgcccctacaaggccgactccgggctgcgtcgcagtactcccgttccagctgctgcgcccgctaaggctccagtggtcgcggttccaagagccagcaaacgggagcctcccgcagtactctcgcgagaacagctcccgggactctccgagagccgagattttacccaatatggaacctctccgcgggcggggcttcgtgagagaagaggatgggaggagcagttctcgcgagaagagaacaataactggagaccaaaggcagaaactcccagggactgtctccttaagggcgcgaaggcggaccggggaaggaagagagaagctggcagcacacgcctcgcgcgcctcaccgtggccggcggggcaaatacctggctctgtggtggaaaacgacactgacaaatagcgtgtcggggaaagagtcaaaagatctttaactgcgagtagttaccagcagcagagcacctgctcacctgaacccccaaattccaaaaaacacttgcataaaaaagagacaagtggccgggcgtggtggctcacgcctgtaatcccagcactttgggaggccgaggcgggcggatcacctgaggtcgggagttcgagaccagcctgaccaacatggagaaaccccgtctctactaaaaatgcaaaattaaccgggcgtagtggcgcgcacctggagtcttagctattcgggaggctgaggcaggagaatcgcttgaacccgggaggcggagttgcggtgagccgagatcgtgccattacactccagcctgggcaacaagagcgaaactccgtctcaaaagaaagaaagaaagaaagagacaggttccggccagaaggctgttgcattcccatctgctcaaggacatatgggttactctttgagatgctgacgaaatatgtcccaaaggcaaatgttaaccctgcatcaaagctgaggctttccaggggctgggctcagtggctcacacctgttatcccagcactttgggaggccgaggcgggtggatcacgaggtcaagcgatagagaccatcctggccaacatggtgaaacctcgtctctactaaaaaaaatacaaaaattagctgggcgtggtggcacgaccctgtagtcccagcttctcgggaggctgaggcaggagaattgcatgaatccaggaggcggaggttgcagtgagctaaaatcgcgccactgcactccagcctggcgtcagagggagactccgtctcaaaaacaaaaacaaaaacaaaaacaaaccgaagctttacattaaaactctcccagttaaacttacatgcagaaaaatcaccctgggagtttaagatgcaagttcccagaactcacagggagtctaattgggtaggtcagaggaggtcttgatcaagagcatgcatttttataatacatcttaggtgattctgattcaggaaagtctctgatatctccctttgagaagcatttaaaaaaccgttacactgaagatttgaaactgactcctatcctgaagagccatcagtgaagaggattttaagcatttaactcaggcctcttcgagtaaggagaatagggcaggagtctcatcgaatttaggcaagtcaactgacctttcctgaacctcagttccagcttctacgagagaattcctgccctgcattcccgactaacagagtcatttgtaaaaaccaaacaagataaatgtgaatgggcaaggcattctaaccccatgcctacatccattatcaacctatgcctatgctaaagcttgttacaatgagcagaagaatcagatcctgtctcattctcttagtttcttgtattagaaataactagatccaagccaggacatttctcaacatttcccgtgattattctattttgtgtcatacacaccttggagggctcagactttgcatatcttgtcccaacatctagcacaatgtctagaacataaaacatgtgtcataaatatttgttgaaaaaattatgaacagtgaccatgatttcaagtggtacagtatcctcagtcctcttcaaggaaagcaatataaaaccaaaaaacagatagtcatgggtgattcatggaaagctgttttggatccaatgtagcttaggctggaattctcttatctacaaaaacatgttgcttgagaatgttccaaactagggaggataggaagctttctaagaagtaatggagggt

SEQ ID NO: 585439 - DNA, 4001 bp, Homo sapiens
ggcttgggggaaaaaaggtgccagggactagttgacacagcaaacgccctttggaagaaggcacagagccagagctggtggttcgcgcctacgtttcacatccctctttcgccctaaatacataaaggcctcttcaaaataccaggaattcccagggggatcacagcactcgagccaggagcgcccgcgcggggccctccgagctcctgcgcccacccaggcctttggcaccggcagggggcgctgtgcctccaccgcgccgcgttgggcgcaggcaggcgaggaggggcggagtcgccgggccaccccgccctgcccagccgggccctgcccgcaggccgaggcgcccccgagcccggatcgcgcagcccaacagtccgcaaacaaagctcaggtggtttcctggcctgccggtcgggctgaaaccaacaaggcagggggaaacccattatttctgaggtctcgcctctgcttccacgcccaccttcccctgcgattctgcgaagcctgggcgcgcctcggcggctcattttgcatttttaacgggtttaaagcctcttggcagacctcgctttccccagtaggttagagcaggcgaagcgacacgatctcttctctaggaaaagaggcgtggtgggtgcccagtgtttgcgaagcagccacccatggccgacctctcgggtccacccaatcgtggctatctgcctgggtccgggcagcgccgggcggcccctcgcgggtggtcgaggcgccacgcacaagaacaatcccgaccgaaaggcacgaaccgcctctttttgaccatctggaaaggttcttaaaggacccaccgagtgttcccaccccacagataccatttaaaaatcaaatggatgtgtaattccacagacagctacgaataaagatttaggacagtgggaaagcctcatcaaaaggtaccgaagccctctgtctggccccagccagccacctttccaagaacccagggcacgccgccgcggcatacaataagacagcctttccctcctcgcctttctccaccaccatccccattgcgcccccctttcccgactcccccccccgccacacacaatcacaccaccagttcagaaatctcgaagacaatccagcttcgacaacaaacccgagagacacccaaacaccattgtgcccccaaacacaaatgaaacctggctgggggcgggggaaggagggcacctagctagtcacgttctgccaatctccaaaccacgccattttagacgatttatcactcctttcctcccgtctactcaagaattctccaggattctaaggaaccactcctttggtgtggggggaccccggctatgaaaaatccacaatttaggctatccatttccattcaactttcagactagaatccagccacactcctctccacgaatgagccttgggagccaccaggagggaaggagagaaagacacgaaataaatgaccacaaccacaggtagaatttacctgtccgttcgctttggaaggcgacgaggccacagccgcctccccaggcctctccgcggcggcttctcccttcgctgcggtcttggagaactgggcacccatgctggcttcttcaacaaagaaactcaacagatccaagaggggaaacaaagagcctcgggttggtgtaacgacggggcgagcagcagcagcagcggcggcggcaacagcggcagcggcacacacaccggagggaggggggtgggggtggtggagaggacagaacagaaccgattaaatacactccggataaaaaaattttagtcgaagagatcaaaaagcagcagcacaggagggagggaaaaagggtggaaaagtcgagcacaaaaaaaggagcccaagtgtagttcgaaaaaaaaagaagtaataaaaaaatcccagatttgtagccgcactgtagacaagaggaaaatggagaaatctccctggttgctaataagatgcggggtccaacgcccaagtgcacagatgaatgggctcgcgggcgctgacgcggcccccgcgcgcgtcggccaatccgcgcgccgcacacaaagcagggggcggggtctgcgcgcctggcgaacaatggagccgcgctttgcaaacggtttgaaaatcagcctcagaccgagaattaatgtcctccaaataaataaatcaattaaaaaatacatggcactcgtctctctctgcttgaaaataataatgcatttcttgattggcttgctttgtttggaattaattaacacgggaggggggtacttgtgcatcggggcggagaaagcgttaacttgactcgcattgactctcgtcggtctatatccgtgtgtctctctctctccactcgctcccctcccccatctttccgtgtgtttatgtgtatgtgtgtgtatgcgagtgttaaagacaatggttgcgatttgtgtgtttgcagcatgttttctttcttttttccatattggttttacagataatgctcagggtttgttttttgaactgctgcaatggttaaatcgtcccaaattgaaaggtatttaaaccacgaagatcgaatttcatcaagcgagatcgcaagttagaattaggtctgtaggccagatgtggaaaatgcaaaagcggcaaacagcgaagccacactcccttccctctcccacattggcatgaaataaaatattttgagattggccttgggcgctcaacaaattcccccttctctggctattcccaattagtgatttttttcccccacaattcaaagtgagagccatttacagaagatcgaaactcttcgcgttttatcactgttttaaatgacataattttcctctatggtgaaatgagacacagcctcgagtagacgaatccatatttacagttgggatgttattcgcgtcaatatggatcgttttcagcctactgccagaatcgaatggactctttttgaacgtgtgtgtgagtgcgcacgcaggcgaatgtgctcctgaaaggaagggaggcagcagcaacgatgacattctaaaccggattgcagttctaaggagaaatgttctgtatgttgagagatagcaagatccctgagctctccaagtctaacttgggttagaggaaaaccttctataatggtacacaggatacctccatctgtcactgcactccttgccaccgaagtaccagacgctttttgtgcgtgagagacaaggcactgacttaaagtatgaggggtgaggggaaccaaggaaacagcttaataagcattttcttcccaaagttttcactcgtggcaaaatcagaccaccttttctcgtttacatttggtgatcttgcaaggaataatctttcgcttatgaaggtgagaagcagtcgagggaatggttcatttctcctggtgctggctctgaattctcaaacagttttattttctgctcattgtagggaaataggtcacactctgagtgaaaaagacggttggttcaagccagtaactctttgttcaagcgttgctttaaaaatcaccaagctgaacattgttacgtgaagcttcgtcttctcactgtccagttccttcagatgcattattcgaccatggtcatattccccagagctgatgtaaagacgtttccgtagaaatgcatcttgccagcaaacgtgttattacccttaagagagcccgctggcctggcccacgaccccagccgccaggatggacgcaaatcccttgtattagcagttccaacttgaaaagccaactgggctgatccgacaccaccatccaggcgattcccaaaagcccatttaaggctcttgatttccccccacccccaacgtgaatcatgccccttcctccgcatccccctcctattttaaattggggtgactgctagctcgctttcagattttctcccagacgcgtccttagccctccatttgggggctgcttttattgctcctttgttaccaggctgccgtgtagctttccccc

SEQ ID NO: 585440 - DNA, 4001 bp, Homo sapiens
cccgcacttggctgcaggtgagaactctggctacaaataacccacctcttcatgggggaggaaggtcccagtcacccccaggaagtcataaattcaactccattcgtaaaaatgtttatgcaatcaaaggatttcaaaacacagactttcatttcatctagtattcccacagagggaaggggagccatgagaaactcctctactggtggccaaatgtatttcttcacaacctgaaatgatgcactagcacatggcttgttagatcataacatccgcgatgtttttcaatagaggtgtaatgccatgaaatgctttcatgctgcaagcaaaaagaagaccttcgtaaatttacattcaacatgtaaaaacacataataacttctgtacatgatagagctgtgtgtgtgtgtgtgtgtgtgtgtgtgtgtgtgtgctttacaaaacaaaaatttatatcttgtctaccattgaagggagtgaggagagactgatatttgttgaacatccacaatgtgccaggtgctttacaagcctcatcttctcatttcatcttcacagcagaccaaggaggtatagactattgccgcaaccattttatgagtgagaaaatgaggctctgagaggtttaacaacttgcctgaggtcacacaggaagcgacccttgttcttcctgctacatcaagctgcctcctcaagttccaacaaatagttttgttaccttgtcccgtacacatctgtaaatcttcctgcaaaagtcatttttatggttcatggtaagatgctgccaaaagagctgaaagaaatagagtctttgtcaagtacagaaatgacaggtcatttccagaagatacagtacaagagttcaatttcatcattaattagtatctcatgcatatgggatgagatgttcttctgtatcacatttaggagatacttaagtcatattccaagcacaaactaaaaatgacctgtgttccaccatttttatccacaacttccctcacagttcttagacgacagtctcaactgtgaccgtattacaattgtctttctggcgccgaggttgcatttcatctttgaaagccctggtcagaacaacttttaaggactccttgaatctcttcttcttactgcttcccacaaagaagtaaatgaaagggttggcgctactgttgattgtggagaagagcagggaaatgtggtgtaggttcccaaaggtcgaccaatactcatagtacagcaggtaaaggagtctcatgggcatagcgaagatgaggaatataatgatggtgaccatgatgactatgtaaagcttggaggaatgggaagcccacgtgttcttccggatcttcacgaccaagatggtgctggacaccagcatgaggggcgtgaagaccaggaagctcaggatggctataaagatgatgactgctcggcagtcattccgagagtgactctcttcttctctgtcgatgcacatgacatactccatggtggtcaccaagcaagaaagagcccacagaagggcacagaccaatgccgactggtacttggggcgatggcatcggtaccagatggggtaaaggactgacaggcacctctccacactaatggccgtcagcagatagaggcccgtgttgtagccaaacagaaaagtcactgataatgtgacaattgtgtagtaatggccagaagaaagctcataatctaaagcatagtcgatagacaagatgaaaatacagaagagcagtgagatgtctgcgatagacaggtgggtgatgtagacagtgaagggatttcttctcatccggaagcacaggaaccagaggagaatcccattctcaacaaaccccactggggagatgctcataatgacccagtgcacgatggggatttgccgatgtgcattcccgactgaggcgttcctgccagttgagatgttcgtgggttcctcaacaacaaatgatgtcacgtttgacccatccatgaggaggcctcaggttggaactcttcaggtaattttctgtaaatatgtccagaacaaaacaaacacaaaaagccatgaaaattgttgaattggaataaaagggagaaattcagctataaatcataatcttcatgttattaaaaaaaagtttaacagactctacagttatctttgtcacaatgataagattaggcctttaggacctgataagaaaggaacttagacctgataagactgagaactgattgaatgacccttctggatccccagtgataaccattcattctatatcattgtgtgcttgtggcttagtgccaaaaaggagatggccaggcaagagtggccgagtgccctgtgcgggacccatttccagttctggcctgagctttcctaatggcattttgaaaatcatttcatcttctgtgcctccattcatttgcctgagggaccaggtggactgcattaagacttgatgacaaaacgcatgtctgggcaatgctgccactgtcattttttaatacatgaagtgccataagcagtaaggagagggagtgcctgggacaatgggtttaatattgtaccaatattgcttaaagtgtgaacaatcaaaaggcatttattttacacggcttcaatatctgcgacaaagctgggcacctgctcagactacgtaagccaggcaagccattgatgtgtggactggatggagagccctaacaagacgtatgtacgtccccacagaccacaggccagatggtgcgggaaacaccatcgccagatgccagacaaagcactcaaaaaaatttttttttctagtttgtgtgcatgcatgtgtatgtgtatgtagtaaaacattgttctttgctttctgaactttgtccataagaagttgatcaaaataacttttttttttttgagacagagacttgctctgtcaccaggctggagtgcagtggtgagatgttagctcactgcaacctccgcctcccaggttcaagcgattctcctgcctcagcttcctgagtagctgggactacaggcgcgtgccacaatgcctggctaattttttgtattttagtagagacggggtttcaccatgttggtgaggctggtcttgaactcccgacctcaggtgatccacctgcctcagcctcccaaagtgctgggattacaggtgtaagccaccgtgccggccaatcaaaagaatatttttagtgaatagatatctgtcttttcctcctgagctcacctgaagcagaataatacataaatgtgttatttcgtggcacttgaatggttctggtgatattagacatttctagaatcaagtcagcagagccccagcatgtgcagggccctgagctgtgatctcagtacagccgggcctggaccctggaccagcaggtagcctttgggttggtgaaacaggtgtttccttccagcgatgtgatccaggcacccaggaggacactgcctccgtggtcccaatcacacctatcccattgacacttccctcagctgttctaatgggatgcaggaaattactttcactggaggagagcttccttttacttcataattagtagacagagacccggaaaagaacccacacaggatgagagctcgcatgccctgtcatgcctaaccaaagccctgctgtagagaccaggccttgttagaagtttgcaagtaagaccaccatgttccccaaattctccccccacacatttagcccatgccaggcactgtgctaggcactgggacatggcagtaaataaaacaaagtgccggcctggtggagtctgtatcccagtagggaggcagtcaagcaaaatacaataacagcaacaacaatcaaactgatgtcagtgcgtgaacagttctatggaaaaaagtaaagcatcattaaaggaaaggagtggcagggacctgggggttccatcgtccatagtgtgatgggaaacgtctcactcatgaggtcacacttgggcaaagacatgaaggaaataggcga

SEQ ID NO: 585441 - DNA, 4001 bp, Homo sapiens
aaaggatgtgttccatttaacaaaagaaacccaatatgagagttttgtaagcaatgtaagcaagatgaagaattaaatggtattaagttggagagaggatgaggtaaatttgctttcttcaaagtaaaaggtttgggtgtaaattctaacctagtgaggagggattatattatccaacgtaatgtttttgtacatttattcaacacactgcaacatattcatcatccttactaaataattgttacacatgttgtaaataaaatccaaggagtcctgtatattcataaggttaattaatcctcacaccaaccatgcatattaaataccaactttatcctcctcttgcataagatgaaacagagttacagagagttatttgcccacaataacatgctttgaatgggagagccaaagtttggacaaaggcaatctgggtccaaaaccctgactcttactcttatgtgatgatgcctcttggtaattccgacaagctcaagctctatctaaggaggagatagacaaagggaggaaaatctgtggctggatttggaggatgttccaggataatgattgagaataatgcatggccttttgtatggtctttatttgggattccacaggtaccaggaaagtctcactgggtcccattcccctcatcgttggaactggagcacattcaaactgggcttactgcctaggaaggaagttaatgtctcttccaaccacaaacagcaaggggttgttttgaaagtccatgaaagctgaacttgattagaataaagcattgatttgatgcagcagccttatgatgcagaacaggctgggttactatgtgtacaattccccagctcagatgtgggaaattatgtttccacatcgaccctgtgctccctgggaagaaggttctccacatgctgagtagagtgtggttgctccattgggtcgatgccagctgcctttttgttcctccccacctctggcttatctgctaacgcccgttggagaatcactctgagagattccttcagccttttctttctgaggctccccacaaagaaataaatgatagggttggcgctgctgtttataatgaggaacaaggaaattaaataggaggtggtgacaaacattttgaaatctgttatgaggggtgccacgctcaggggtagggcccagagtaggaacatgggggccgagatctgcaccaccgcatagaccctggtggccttttgctgctgggagcagcacaggaatctaatgagtagagtcagactcgacacacacatcacaagtgaaaggatagcatggaagagcccagaaagctttagaaatatgacacatgcctttacatgtttccagtaagttaggaaaagtgattttactatgttgatgcaaaaaggcaggccccagatgagggtgcagacaacattagatgtgtattttgggcggtggcatctgtaccagatggggaagaggacacacacacaccgctctgtgctgatggccaccaggagacagagacacacctcaaaggagaagggagacaatatggccaggaaatcagggataaaaaacacgactccatgataagttagcagagtcacctgtaagaaccccactgccgagcagcaaagatagatcacgtcagcagcgaccaggtggaggatgtataccatgtagggattcgtggccccacagcaaagcagccagaagacagtgccattcaataagaccccacagagggagaccagcacagccttgggggcaatgatattcaagggcagggcctgctgtcccactgccatgctcatctgcatatgtatggtttcattcgtctcattttgaagaaagacgccacagagctgagataccaggtttgggttctgtgcctcctggtcaccactgtggagacaaaggctacatgagagagatatctgtgactcagcaaacactgtccatccagccctctggctgaaccagcaaattttcccccagaccatggggtgctgggacctgagtgggccacaacatcacagtcaggagcagtggtccatctagtggtgtcctctggcctcagaccccttgcctctacattttcctaggctggaatagaacacccattgttgggtgtgctttttaggaacagctgaacattaactacatatcagagtggatgggagtatctgctctgcaaatagctctccatgaatttgtgatctgttctccctcccctaacacatctcctgttgtacaggatgccccaggcctacccacatagacccaatatcttgttgttgggcactaatgaggcactaaacattgggaatggagatttgtgtctggtccaggttctactcatgagacactagtgtctcatctcttttttttttttttttttgagttggagtctcactctgtcacccaggctggagtgcagtggcgcgatctcagctcactggaacctccaccttccaggttcaagcgattctcctgcctcggcctcctgactagctggaactacaggcacccaccaccatgcccggctaatttttttgtatttttagtagagatggggtttcaccatattggccaggctggtctcaaactcctgaccttgtgatccacctgccttgacctcccaaagtgctgggattacaagcgtgagccacggcacctggccatgtctcatctctttcaaacccagtcctgggcatccttgggtagccatacaggatgcagcagtgccacagtatggcatttccctgggctcagacaggtacaagggagcactgagatttccaaggcaggcatttcacagcagttggcaccaaagaagtcctttctatggctggcaggacttgacctggaaaataaggaaatctgcgtttctccaggggcgtgagtctcaggcagtgtctgtgtgggcatcatcgactgctatgctccaaatgtcagctgaggagaaggaaatgaacagacttagggtgcaacaaatacaaaagaggcctaagaatattaatataaatattaatatagagaatagtattttaatgctatgtaaatatattaatatagagagactagcatattaatactatgtaaatatttatatattaataaattatattaatataacattgctatattaacatgttattaatattgatgttaatatattcacattatatatttatgttaatatattaattatattaatataacatattctcaattatgctatcaaggatattgataattaatattgacattagtttattaatatttatgtatttatttattgctgttgtcccaggtttattgaaaataaaatccagtgactgctgtatattacagcattggagaaagagtcaaacagctccacgaggcattttgaaattcatcccaactgtaggccgagtgacctgcaggttggacaggctgccaaagtccaaaagcttcagcatttccttagtgtcaggatctacttcgatgatctcctgatccagggctgagaccttggggacataattgtccctcctttctttctcctcctcctgtagcttgatggagatacctctcactggacctctctgaatctggttcgtcagatgcgtgacgcagcctgctctcctgttgtggagcttcttgctgaggataatggggatctcctcacacacacttgtttgtgtggaagtcattgcccaggcacatgtagtacttttctacgatgacctaggccaccttcgtcacagtcttgatgccaacacgacccatgttggtgggtctttggtcattaatattaattgatattaacattattcagtttattaataatgtatcattaataatatttatacaatattagtaaaatagtttatcagtacattttaatgttgatatgctttcaatattaagatattaatgtattattgattacatgtgaatatattagcatattaacagtatatattaatatatttggtatactatattaatattat

SEQ ID NO: 585442 - DNA, 4001 bp, Homo sapiens
aggagaatcgcttgaacctgggaggtggaggttgaggtgagctgagatcgcgccattgcactccagcctgggtaacaagagcgaaactccgtctcaaaaaaaaaaaaaagaaagaaagaaagaaaaagaaaaagaaacaaatctcttgctgggcaagaaacacgctccagtcaggaacctgcttctaaactttcaatttacacaggaatgattaatgactcaatcacccacaagcaaatggagctgtgtaatacacacgtcgaagcaattatacggaatgtgtatctagaaagcgttttagtatctgtaggagatattcttatttgtttgtttaacattatactgtaagcttcccatgatttctgtgtaagaaactggggacagacggccgggcgcggtagctcacgcctgtaatcccagcactttgagaggccgagacgagcgaatcaagaggtcaggagatcgagaccatcctggctaacacggtgaaacaccgtctctactaaaaatacaaaaaaaattagccgggcatggtggcgggcgcctgtagtcccagctactcgggaagctgaggcaggagaatggcgtgaacccgggaggcggagcttgcagtgagccgagatagcgccactgcactccagcctgggggacgcagcgagactccgcctcaaaaaaaaaaaaaaagaaaagaaaagaaaaaagaaaaaaaagaaattggggtcagacgggatagcaggagagggggcagggaggaagagggggagagaaactgaagatctttttttctatggagtaagaggtcttcctcataggaaaaagtctacgtggaatttttaacagaccacttcaaattatccaagtcaatatctgactcgggacctcaggtccacaccatcaaacactgccctgttacggaaactcgatacatgtcggcttgcatgaatgaacccatacatttgaattcccccgggagcagtgtcttgaaattagccagcaatcagtaccggttggttgtctgatcgttggatgtgtagatgaataaacgaacggtttgtcgttttacttagactaggctaccgaaaaacatgcaaaagtctaagttacttccgaagggaagtgaggggcgcgacccggggaaggtagggactgcggattgcggaaggccgagcagcggggctcggcgggagggcgccaagcagctcaccttcacgtgctcatagtagctcccggtgttcagcagcccgacgcctctgaacgcggagtcgcacttcagtctgagcagcaggtggtccacaacccctttcaccatccccgccgccgtggagatatcatcgcggctgagcttcaacttctccaaaaccgcccggagcttcgaggccccaggcgccgcatccctccgtacgagaatgggggccgagaccggcaggccggggctgggcacgtcccagggcccgggcggaggtcttggcttcgtggagcagcgcgcgcccctctggcggcaagaaccagccctggaaagagccggctcccgagccgcaggaggctccagcccctctgccccaggggcgctggtggcgtcagacggctgcgtgtcctgggcgcgctgaggggcctttttggcgcgggccccagttgcgcggacgggcggcctctcctgggtgtccggggcgctctttttctgccgggatcccgacttcctggcggggccgaactttcccgccttaggcagggcggcctcgggggcagccggagactcggtgggatccatcggggcgcccctggcattccgtgcggaagccttgggggcagtggctccggcctcggaagctctctgcatggcctttccgtgccaaggctgcatggctggcgctttctgttccccgaaagaagaatccgtttcaggaaaaggccgcaagaggaagagccagcagcagctgttggaaaccaagcactactggcgggcacacaagagtctgcgacccgaaggggaaccccaggctgggaagtcgctgggagccacgcccatgccgcgaagaggctggccgcggcctttcctgaggctacaaaagtctcgaagtttctaactctccaggcaatccgtgcccctgtcttaagaagatgaggtagggccgggcgcggtggctcacgcctgtaacctcagcatccgagaggccgaggcaggcgggtcgcttgagctcaggagtttgagaccagcctgggcaacccagcaagacctggtctttcttataattaaatatatgtgtgtgtgtgtgttgcctgggcacactgactcacgcctgtaatcccagcaatctgggagaccgaggtgggcggatcacctgaggtcaggagttcaagaccagcctggccaacaaggcgaaagaaaccccgtctctactaaaaaatacaaatattagctaggcgtggtggcgggcacctgtaatcccagctactcgggaggctgaggctggagaatcacttgaacccgggaggcggaggttgcagtgagctgagacgtgccacttcactccagcctgggcgacagagcgagactctgtctcaaaaaagaaaaagaggccaggcgtggtggctcacgcctgtaatctcagcagtttgggaggccgaggcgggcggatcacgaggccaagacatcgagaccttcctggccaacatggtgaaaccccgtctctactaaaaatacaaaaaattagccgggcttggtggcgcctgtagtcccatctactcgggaggccgagacagagaactgcttgaacccgggaggcagaggttgcagtgagccgagatcgcgccactgcactccagcctgggcaacagaaaaagagtccatcacaaaacaaaacaaaacaaaacaaaaacattgacagagaaacttttctctttcaagtgaaagtttttttaaatttaattttggtttgagttaggggggcgcaatctcggctcactgcaacctcagccaccagggctcaagcgatcctcccacctcagcatcctgagtagctgttactacaggtgcggacaccatgcccagctttttcttttctttttaatttttttgtatacatggggaggtctcactatgttgcccaggctggtctcgaactcctagactcaagcgattctccctcctcaacctcccaaagtgttgggattgtaggcatgagccactgtgccctgccacagaaactttttcttttcttttttttctttttcttttctttctttctttctttttttttttttttttttttgagacagaatttcgctcttgtcacccaggccgaagtgcaatggtgcgatcttggctcactgcaacctctgcctcctgggttcaagcaattctcctacctcagcctcccgggtagctgggattacagacgcccgccaccacgcccggctaatttttcgtatttttagtagagacggggtttcgctatgttggccaggctgctctcaaactgctgacctcaagtgatccacccgcctcggcctcccaaagtgctgcgattacaggcgtgagccacggcgcctggccagaaacttttccctttttttttttttttttcctgagatggagtctcattctgtcccctaggctggagtgcagtggcacgatctcggctcactgtaacctctgcctcccggattcaagcgattctcctgcctcagcctccgaagtagctgggactacaggtgtgcgccgccatgcccggctaatttttgtatttttagtagaaaggagtttcaccatattggccaggctggtctgggactccttatctcgtgatccacctgcctcggcctcccaaactgttgggattacgggcatgagcctcagcgcccggccaactttttcaatgtaaatttaaatagggttttttaaaaatcaataagaaataaaataataatttttaaaaagaaaaaaattaataacaaatgaaaaatactttgaaaaaagaaaaaaataagaaagagaaaatatt

SEQ ID NO: 585443 - DNA, 4001 bp, Homo sapiens
gggtcatccacactcactcctgctggagggtggtcagactgacctaagagctaagagatctcaggtgctcctggccatggcaaacatttctccttcggtttatcccagaagtctctccctccctccctccctccctccctcccagttttaaacattcctaaggctcttttgttcctttttatgaattaaaaccagaattacctttataggaaagtaggggatgcaattgaaagacattaaaaacattattctagcacctcccagccataacttgccatggtcctttagccatacaaaaagccttcctggagtctttctagctgtgtagaagagcttagaagagaaaatgcaattaaaataccttctgatagggagtggagaggtaagtacaaaacaaactccccttaaggaaattcagctatgagttttatttaatttcagaactaaagaatttgctattatgtccgcctctgcctgggtccctgggtctatctcatcctcaccagaaactaaagagtaatttacaaaagcacaaatgctttggcaccgaaacccttcccaagtttctgactttctgtattctgcaactgatgagaacgcaatggtcacatcaggtggagttctcagtcaggtcctcagagtgagccaggtatgagggtggctcagtaaacaggacccgaataaggcaaatgtccaggtctcactttctcattgctgaaggggtgtgcgcaaagggcagcaggtgtgctcttgttaaaaggaaaggaaaaggagcactggtgagaggaaggggaagaaaaccaggcaaaaaagcatgaaacaaaacaggagcgcagtgggtcctcccccagcatgccctgcccaattctatttaaatcaacatttactgattgggtcactactaagtatcccgcagatctagcctgcagcacctgaagagacaaggaaatgagtaagacgggcttcatcttcaggaaggtttcttgccaggaatcactgttgttgccatttttaattttaatggttgtagataattcctggacagttcaaataacttcactggggcccctctcctccccctaacctgtcctactcagaagctccagccccaggcatatgagccaaccgaaccctgggaaaaccaaagtgtccttgtgtgtcccgcatcacacacggtacaaaataactgtcacccctgaacaagcctcgcctcagaagtctaaaacccaggtcctgcattcaaaatctatagactaccgtctacagattcatcgcgcttgttttttaagtagggtcatctaaattaaaaacaataacgacttgaggacactgatgaaagaaacactggtttcatgtatcagactacttcagaacttgattacaggaaacgaggcaatcccaaacttaaagaaaaaaaagttcagtagaacttgccgcgcaggctgtaccaatattttttcacacttacaaggagaaaaacactaacaccaactcaagaagggaaaacacacacacacacacacacacacacacacacacaaaaaccaactgtctagtgtgtggctgtaaaatacgccatggaggcggagggacggtggctaacactttcgcccgccccgtgcacgcgatcgctggggagctggggtcgctgcgctcccggcctgcagttacctggtccagcgggatgcccaggagctcgctgagcgggtgcaggtaggtggagcccgtggtgcggtaggaaaggctggacggctgcggctctgctgccatcctgcatcttcgggaggtggctgcccctgtcccagcccgcaacaccccctgctcggcgtcctcccgcccgggtgctcttgggtggttgccccgagaggcgcacggccgcctggttcgcgggggagcgaacgggaggccggggaatgcgaaccggcgcaaactctcgaggcgcaaactctcgaggcgcaaacttggctttggcgctggcgctgcagccacgggcgccgtaggagggccgggcccaaggcgccccgcttcccgctcccttcctctccgcgcccattggcccggccgctcgggacggccccgagaggagggaaggagggaggaaaagtggggactccgagcccggcccccaagcgccgcccggcccgcccagcctggcctgcaccgaggccgaccgggagagggaaagcgacgccagcgggcgccgccgcctggccctgcagctggaggcgggacgcgcctttcctcctcccgggctgaccgtcctagccccccgccagacaaaacgacctcacccagcgggcgccttccactagagagcaccacccaccccgccccaccctgttttggtttcgccgccgcagtcgaagcggctgagtggctgcgtttccctttcaagccgtagagggttcctctgccggtggctggaagctggagcgccgcagccaccagactccctacttcctttaccctcctctgcgctaggcatagtttcctacaccctgatctgacatgttcggtgtcacacaagcaaatacaggggactgctagcttcgggtcacttccgtctctgtggagtgagagttatttcacctctgtaagaaacggtgtttactgtcatactatgtgcattctgataagtcatttgcatgccacgggtcctcaaaaagggtgccttgctccttaacttgtctgcccccgaacacccacacatcaatgttacttggaaaacttttccaagttattgctaggttctgagaaacataaaaatcttgaagatccttttcaggaatcgctagctgatgaaaaagggtttcaggaaggtaatattctgggctgctgggtagaaaaccaaagaaagtgagctcacgtggcccccagcctccgctgggtaaaccggcattcgatcagacaggcaatgactttcggggccgactttatcaatgtggcctccagcttcaaattaaaccgaaggcctgtcaggcactggcaacaacttactctccaagactcaggcctcactcttgccttcttcaggagttttatcaccatcaaactgcactgagcattaaattgccaggccagagtttctcaacctatgtcccctgtggaggaggaaaaaaaaaagtctgtaccaccactcccacaagctaaccgaatggagatgtcaccaccagatgataatctctaccactcacaagcaaacccacactacagacagacagacacatgcacacacgcacacaggcatatacttgaggatcactaggctagataggttcatttaatatcatagagtcctggaaaatgaccagcattggagcaacattcatcttatctggagctagatgacagctgaagtgaggtatatgagagcagacggagctttgtttaaaaggaaaaaaaaatcaacactcagatatgagttgctggaaaacagaagtaggtcagtttgggaagtatttctggagcaagtgcctcagaccctttataattttcacaaagctatgccttttagacttcaaagaatagtcctcacataggccatatatatatatgtgtgtgtgtgtgcgtgtgtatatatatttattataaatatattaatttatataatcatatataaatatatttatatatgtaaagttttatatgtacatatattagccttacacaggtttatatatacatatattacacagtttttatatatatatataacacaggtttgatatatacatatgtatatatgtatatgtaaaatatatacatgtattagccttacacaggtttttttctccctaacaaaacacagttcataacctagtctaaatttttcttttaaaaatggccgggtgcggtggcttatgcctgtaatcccagcattttgggaggccgaggcgggcagatcacctgaggtcaggagttcgagaccagcctggccaacatggtgaaaccccatctctaccaaaaaacaaaaattagccaggtgtggtggcaggcacctg

SEQ ID NO: 585444 - DNA, 4001 bp, Homo sapiens
ttcggtcttccagtgctaccctctgtctccctccaggtggccagagcaggccggtttggcaccaagggcttggctatcacatttgtgtccgatgagaatgatgccaagatcctcaatgatgtgcaggatcgctttgaggtcaatattagtgagctgcctgatgagatagacatctcctcctacagtgagtactgatctcatgaaaccctttaggtcctccctgttccttagtgtgtttgtccgaaatcccatcacataggtcatgggcatctgatgcataatggacacttgactggttcatgccccctggtctttgatgctgtgttgggatgtttttctgacctttatgtggggtgtcttgtcttctctcatcatattacatcccttccctcacccccacgtccgtcctctgaacccaggcagtacaccagtgtctgcatgtgtgccgtgtgttcctgcctcactttccccttttcatgccttattctgaccatgctacgttttcttctcagttgaacagacacggtagaagactcgcccattttggaatgtgaccgtctgtccttcaggagaggacaccagggtgggggtgaaggagacactactgcccccacccctgacagcccccaccccatggcttccatcttttgcatcaccaccactcctgaacccccatttctgatttgtcagaatttttttttaacaaaactaaaaatgaaacacatgtgtctgtggtatctataagtgcttcgtccctttattgtatttggggtgaggttattttagggcatggtccagggtgaattcctataaggcctgggtgccctgcctgctgtgagatcaaaggggaatgggactaagactgcagagccctggctcccccactgcctgccaattgcctgcgctttgtggtctcttccactttctctggcctgggaagacgctggggtgtttatgatcccaaggctcctggtgggtggtgcgtgtattttcagcgccggagggtgctgtgggcactgggggaaacttaggcgcctcctccaaggctctcttggtgcctcctcatctgttccttcagcttctggatcttgagcaccagggcttgggcctcccaggctccctcctgcccttcaaggagggcctggtacagctccagctgctgctccaacaactcttcagctcgggccagctcagctgtgcggtgggtcccagggccctggtcagggaattaagggagggagcatcagccagggcagggggctgaggccctgggaagctttgttgcaggctgtggctggaagtgagaaattccaccttccctattcgtttttgaaccggtcgtttaaggacacctgtactgagaaggccaggtagcttcctgtcttgggcataggcctctgggtggtagtagggggagcaaatagagttccctggcccaggggctgtaactggcttccttgaacaaggatatggggtcactggaaagaggatcagctgctcctccccgctaagaaataattaactgttaggtgagggggaatagatcctgttcaaggactttgtggactgtgctgttgtgggtgggggtggggtgagggaagggaaccctgaggtctgggctgggggaggtggggagaggagttggtagctgaactaagaaaagagctgcaggggtaggcatggtgtggggtggtgcagggtgggattgagggtttttttttcccacaccccagtgtaaattctcacaccctctgttcctacctgtggtgccacttaccctgggaggggacgtcatcttcccatttcctctggagctggtctgctcttccatgcttgctttggggttttgggagcagcacccatgggagccctggggtgccaaggaccaggagggcagaaggaggcgaaggaaatggtaccgagagagccagggcagagggaggaccatggcgggtgacctggcagggagctgtgtgagctgtccaacggccaccaggaactggttcgctccaggacttggcctcacttgagtgcctggccctgcccaggccccagcccccagccctgcccctgcccctgccccactctgccccacgtctctcccagcctggccccagacagagtccaggaacaactcctgttcctgatgtgaaaaatgtccctgccagtttaggcagaacttgctttagagcactggtgcccagcctaccacaggtctgtgattttttttttttgatctagtgtttattaggtatgaattttacaaacattagcggtagctgtggagctggagagtattgcaccttctccaagctgcatggcgagaaccaccaatagtgtggtagaacttacagccctttccaaggccgtggctctcttggcctgcagatagcctacgcatctccctatgcttgttgtggaccactgggtgtcaggtttccttctgatagtgttatggaatggatcaactaggatagcctcaaaaactttgtatgtggaatctttaaccagcccagtgagaattcaggactcagagccccacagtggcatccagcttgctcttctgtaacagactgaaggctttaagcaaactagctggttaacaccatgatagacaggcttgctgttaagttgccttcttaggaactagattttcagccaccgtggcgcttatatgtaacataaccttgcttggctgtagcccagtagcgtgctttattgggctgggtggggcggggatccctgtggagagcagagagctggtggtactgccagcagcggaccctcagaagaaagctcatgacatcagactgcttcttccatagcttctggatgtacttgtatgcaccatcttggtttacccagtggctgctgccagacagaaaggaaaggctaccacaggtcttgtgtctttttttttttttttttttttttgagacggagtctcgctctgttgcccaggctggagtgcagtggcgcaatctgggctcactgcaagctctgcctcccgggttcacgccattctcctgcctcaccctcccgaggagctgggactacaggtgctcgccactacgcccggctaattttttgtatttttagtggagacggggtttcaccgtgttagccagggtggtctcgatctcctgacctcatgatccgcccgtcttggcctcccaaagtgctgggattacaggcgtgagccaccgcacccggcatttcttaacactgtcttttctcacttcactctgcaaggtaggaattacctcactggtttgcacctgaggaaactggctcagatggtttcattcagcattcactggggaagtgtctgttgggggcagctctaggctggatgtgctcgaaggtccatagctggttgttggtagggcctggagggttcatgtctaggtccacctgacttgaaagctcatcctgaccttgcttaagtgctgattcccctttgcagatgtaccttttattgtgcttccctttattgctctttgcagatgctgttttttatttagagattggaggcttgtggcaaccctgtgtcaagcacatcaaacaggtctattggtgctattttcccaacagcaggcagacatcatgtctccatgtcacgctgtggaattctcaaaatgtttcaagcgttttcattattatacttgttacagtgacctgtaatcagttactgaagttaactattgtgattgttttgggacaccatgagcgatgctcatataagacagcaaacttaatggaaaaatgtgtgtgttgtgactgcttcaccaactggccattctcccgactctgctttccaggcctccctattccctgaggcacaacaatattgaaaggaataatccatgcggcaaatggcaaacatcattgtcttattttaagaagttgtcaaagcagccttcagcagccatgcccctgatccatggaggcaagaccctcccccagcaaaaagatcaggattagctgaagcctcatatgat

SEQ ID NO: 585445 - DNA, 4001 bp, Homo sapiens
tgactagacagtgtcctgagccatagttctaatgggcatccaaaggtcctgtgaagggggaggctccctcccgcacacctgactctaggactaaagtgctaggctggggaatttggggtctggtaggataattgctgcctcttatgcatttagcccacaacttgggttaaatctacaggcttgcctctcaaaatagacactggacttagcagtatacacaacagacctcccctcaaaatctatttctagtttttgaggagagccaggctgacactaaaaatgaaattggttctctcacagcatcttggacccgtaggattgttcctggctcctctttacagtgcctggtggcttttccttccctattcaatctccgtttaactaactacattaatatttcagaaacattctgtggcctgtacattggtggtactttattccccaggcttgaaaaacttttttcttgtaattggaatgctttgtgcagtctaatagtctgtgttaggctaagagtcgaataacattgcccttgtaattatcttgtcatagccataagacagtaagtgagggcatgtctgctctgcaaaaggccaattcaattgtgacattaaacatatgcctgatccaaatgaaacacaaataatgggttaccaacccaatccagtcatttccagccagtcagcatccccacccccccatctctacccactaagttatactaacaaacaggttattatttaagtagaaaaatgcattattaagaagtcagaaaacattcattgaaaacagattgcctccccatttgcgctgagctaagttctatgaaattagaactgcgcattcctcaaatccagaagattttgtgttcatgcctgattctttagtggtagcttcagggccattttaataagaagattccacctcaaacaaagatattaggctttggggcaaagcctcattaaaaaatacaagaagcacatttttagaaagaatttttcaaaggctgtcagaagccccagctgagttgcaaagggcctaggctaccacctgcctactttccccagttctctgacagccgctaactaacttccctagggccactgaggagttcagatgacctgaccgtgcaggagtcctgtgacagaggaataatattaactaagttaactaagtgggaatgggggcttcacagaaggccgtccggaggcgcgtacaggggacacggggatctacctggaggaagaactgaatttgtcttttctagttcaaaaaagccttcccgaactcttagcaaacaagccagtgatcgcctcctcgccttcgccacttcagttcagcctctttagtccccatggagagccgggatgaactagcccggcgcgctccagcggtctcggtcggggccgctgcttcccggaaagccactccctttttcttttcccacctgtgtttccattttctttgccgagtgtgaaaccagccggccacccacccgccccgctccgtctcgtaggtgcctccacagagccaaactttgtaccttctggggatggagggggatcccccagcaatcagacactaccggcgagccagccccggggaggggcgactggtggaccaggcgccagaccttcccgggcgcgcagcccacgggccctggggcgcgcccacgccagagcccggccctcgcgcggcagcccgcgggacgtcacctgggtgctcgcgtcctccccgcgcggcggacagcccgggcgcccttcctctctgcgggactgcaggtctatccgctaagcgcgcgtgaccaaaaacggctctcagcgggtcccagctgacggaaggtgggggaggagtgcgagggtctctgagacaggttgggagccagccccacctccatttccaaagcgggggtccaggcacaggaacagccaaacgcccgaaccagcggggttacctttgccacttcatccaatccgagcatcgggtgcgtcgtgctcttttctaggagcgtggggtgccttcgcgaataaaatctgaaggcatctctgctctcgcggagcttgttctttcttattttcaagtgcttatctagactggtagtcactaaagttcctgtgaacatttgtaggtgttttcagctaagcagtaatagaaactcgacctccattttatatgaacaagtgtttattgatgtaccaaaggtttaaaggaagggaaaggggaaaggagagaggaaagaagaaacccataataccaccaaggaacttgttttgttttcacgaacttttaatccacccagtacaactgctttataatgatctttagcttcatgcttgcaccctgatcaaatctgctggccttagtagctacttagcaaataaggtgacaaggacgaagctggagttggatcactttccacccaagggagcctcatacgattttggagacaggcagcccgccccgcattccacctcagctttatcatttactgttaggcatatgacctcgggcaggttctttaatgtttctcatcctcagttgctcatttggtactaccagaattgtaaaactgccctcccagggatgctaagaggcttcactggcttgacatatgcaaaagccctcaaatcaggcctgccatgtagttagtgctcaatatgtggtccctatgataattatagtcattagagcacctttcagaatccttccttcatctataagatgagtagtcagagtggcatggcaaaatgtcctgtatttcacattaagttaggaaaatgagaaaaacttgaaaggttagtgaaattggttaaaatttcaaaattcaacagatcagaatttttaaaagcaagtgtagagtcaatgattatacatttcagaactggaagtcgccttagagttagtgtttgtgcaaaaagacatcatctctaaaatctctcagaaaaatcaaggagatatgaggatgggagattaaatttaaagagaatttggatttcaaagtgggagatttcaaagcatctcttaggaaagaaaaacaagaagaaacacttgacccatttattaggctgattatctaaacgccctctacaatacccttgtggaaaagccttttctagttctctaataatataaaaattcagtccactataagtttatacaccttatgtttttttccaagttaaaattttgatgtacattttcctgttcaactttcctatccctgaccaaatgttaagtcgtttcaaagaaaactcagagtggcttgtcttgaatttctcatttgtaggcaatccattttaaaaaagacaggaatattggcaatgccaatttttgctacttcaattctttgttccagtgattgataatgatgaggatgatgatgttgacgaattctatctagttgtgtactctaaatgaaggatgaataaatctcattttgttgttgttgctaaattgaaaagtgaagaatactttttttttctagcccaatatattgtattgtgttttatggagcattggtggctaaaaagcctgtgctagacgtcactatttagggaaatattagcatatgaggcttaattgcatccttgcttaagtttgacaatttctattggtgtcaatggaggatatgtggccttaccttacattttggtgccactttttatgcatactttaaaaggtatcattacattatttttataataattggaaggtacacaagatgggtgttatcccattttactaataaagaaactgaggttaaaagttaaagtaaaccatagacagtgaaacagaggctgaaccagaaatagaatcccacctaattctcaccctggaccttgagctttctgatgaggtaacattctttagatagcagtaggagagccagaatgcccagttaaaaccccacccctgtaaagtccctgccttttttttctcagctggaaactgggaagtttgtcagacaaagctcttcaggttactggcaatttatgtgctgggag

SEQ ID NO: 585446 - DNA, 4001 bp, Homo sapiens
ctgagccatagttctaatgggcatccaaaggtcctgtgaagggggaggctccctcccgcacacctgactctaggactaaagtgctaggctggggaatttggggtctggtaggataattgctgcctcttatgcatttagcccacaacttgggttaaatctacaggcttgcctctcaaaatagacactggacttagcagtatacacaacagacctcccctcaaaatctatttctagtttttgaggagagccaggctgacactaaaaatgaaattggttctctcacagcatcttggacccgtaggattgttcctggctcctctttacagtgcctggtggcttttccttccctattcaatctccgtttaactaactacattaatatttcagaaacattctgtggcctgtacattggtggtactttattccccaggcttgaaaaacttttttcttgtaattggaatgctttgtgcagtctaatagtctgtgttaggctaagagtcgaataacattgcccttgtaattatcttgtcatagccataagacagtaagtgagggcatgtctgctctgcaaaaggccaattcaattgtgacattaaacatatgcctgatccaaatgaaacacaaataatgggttaccaacccaatccagtcatttccagccagtcagcatccccacccccccatctctacccactaagttatactaacaaacaggttattatttaagtagaaaaatgcattattaagaagtcagaaaacattcattgaaaacagattgcctccccatttgcgctgagctaagttctatgaaattagaactgcgcattcctcaaatccagaagattttgtgttcatgcctgattctttagtggtagcttcagggccattttaataagaagattccacctcaaacaaagatattaggctttggggcaaagcctcattaaaaaatacaagaagcacatttttagaaagaatttttcaaaggctgtcagaagccccagctgagttgcaaagggcctaggctaccacctgcctactttccccagttctctgacagccgctaactaacttccctagggccactgaggagttcagatgacctgaccgtgcaggagtcctgtgacagaggaataatattaactaagttaactaagtgggaatgggggcttcacagaaggccgtccggaggcgcgtacaggggacacggggatctacctggaggaagaactgaatttgtcttttctagttcaaaaaagccttcccgaactcttagcaaacaagccagtgatcgcctcctcgccttcgccacttcagttcagcctctttagtccccatggagagccgggatgaactagcccggcgcgctccagcggtctcggtcggggccgctgcttcccggaaagccactccctttttcttttcccacctgtgtttccattttctttgccgagtgtgaaaccagccggccacccacccgccccgctccgtctcgtaggtgcctccacagagccaaactttgtaccttctggggatggagggggatcccccagcaatcagacactaccggcgagccagccccggggaggggcgactggtggaccaggcgccagaccttcccgggcgcgcagcccacgggccctggggcgcgcccacgccagagcccggccctcgcgcggcagcccgcgggacgtcacctgggtgctcgcgtcctccccgcgcggcggacagcccgggcgcccttcctctctgcgggactgcaggtctatccgctaagcgcgcgtgaccaaaaacggctctcagcgggtcccagctgacggaaggtgggggaggagtgcgagggtctctgagacaggttgggagccagccccacctccatttccaaagcgggggtccaggcacaggaacagccaaacgcccgaaccagcggggttacctttgccacttcatccaatccgagcatcgggtgcgtcgtgctcttttctaggagcgtggggtgccttcgcgaataaaatctgaaggcatctctgctctcgcggagcttgttctttcttattttcaagtgcttatctagactggtagtcactaaagttcctgtgaacatttgtaggtgttttcagctaagcagtaatagaaactcgacctccattttatatgaacaagtgtttattgatgtaccaaaggtttaaaggaagggaaaggggaaaggagagaggaaagaagaaacccataataccaccaaggaacttgttttgttttcacgaacttttaatccacccagtacaactgctttataatgatctttagcttcatgcttgcaccctgatcaaatctgctggccttagtagctacttagcaaataaggtgacaaggacgaagctggagttggatcactttccacccaagggagcctcatacgattttggagacaggcagcccgccccgcattccacctcagctttatcatttactgttaggcatatgacctcgggcaggttctttaatgtttctcatcctcagttgctcatttggtactaccagaattgtaaaactgccctcccagggatgctaagaggcttcactggcttgacatatgcaaaagccctcaaatcaggcctgccatgtagttagtgctcaatatgtggtccctatgataattatagtcattagagcacctttcagaatccttccttcatctataagatgagtagtcagagtggcatggcaaaatgtcctgtatttcacattaagttaggaaaatgagaaaaacttgaaaggttagtgaaattggttaaaatttcaaaattcaacagatcagaatttttaaaagcaagtgtagagtcaatgattatacatttcagaactggaagtcgccttagagttagtgtttgtgcaaaaagacatcatctctaaaatctctcagaaaaatcaaggagatatgaggatgggagattaaatttaaagagaatttggatttcaaagtgggagatttcaaagcatctcttaggaaagaaaaacaagaagaaacacttgacccatttattaggctgattatctaaacgccctctacaatacccttgtggaaaagccttttctagttctctaataatataaaaattcagtccactataagtttatacaccttatgtttttttccaagttaaaattttgatgtacattttcctgttcaactttcctatccctgaccaaatgttaagtcgtttcaaagaaaactcagagtggcttgtcttgaatttctcatttgtaggcaatccattttaaaaaagacaggaatattggcaatgccaatttttgctacttcaattctttgttccagtgattgataatgatgaggatgatgatgttgacgaattctatctagttgtgtactctaaatgaaggatgaataaatctcattttgttgttgttgctaaattgaaaagtgaagaatactttttttttctagcccaatatattgtattgtgttttatggagcattggtggctaaaaagcctgtgctagacgtcactatttagggaaatattagcatatgaggcttaattgcatccttgcttaagtttgacaatttctattggtgtcaatggaggatatgtggccttaccttacattttggtgccactttttatgcatactttaaaaggtatcattacattatttttataataattggaaggtacacaagatgggtgttatcccattttactaataaagaaactgaggttaaaagttaaagtaaaccatagacagtgaaacagaggctgaaccagaaatagaatcccacctaattctcaccctggaccttgagctttctgatgaggtaacattctttagatagcagtaggagagccagaatgcccagttaaaaccccacccctgtaaagtccctgccttttttttctcagctggaaactgggaagtttgtcagacaaagctcttcaggttactggcaatttatgtgctgggaggtggatttgtgggca

SEQ ID NO: 585447 - DNA, 4001 bp, Homo sapiens
gaaaaattagactgggcagaactcaaaaaaatggatcctcaaaacagcagacattcttagatcattaaaaacaatgagaaaatccagcttctgctttctcctataagtctcagtaaaacaccatcctataagactcagtaaaataccagaactaaggaccaacttcacctcaacttatcaaagatataaaaatgatattcagctaaacattggaaggaggggcatttgggaggaaaatgccaaccacccactttttgaaaaaaaaaaaaaaaaaaataggtgcaggtgagctacgagggcttgtagatcaatcctgtttcatacaagtcctctcctgagaggctgttccaatctggccaagagggaagggagccattctcactgacagccagtatatccccttgcctctcaccggttagccctcttctcgtttttcctgcgcaggtcattcacattgacaatcagccggtattggttgtcactgatcagctcccgaactttgctctgataaattccctggtcttcctgcaaaacagccaccacatatcaccatagccacaaatttaaaaacaatgtttctaaacagaagtagttctcatagccagatagctaagtcaatctctgcagcagagctgaatccccagtaagtatgtgctcatcaatttctccctttcattcactgtttttagattcgaaataacaccctaagaggggactataagaattataatgacttcctcaaggtccatgctgttattcccatcatcatggacaacttttctgcatgctgtaatttctgtctttagtggagaattaaaatgagctcatgagaagtctaaatggacagtaagtgcaaactttgttaaaatgttaagttaaacctagcaatgtgaatgttaaaggtaacaacgtgaatagatggatatgttgtttcactgtagtaatcatttcaccatgtatatcaaaacatgtgcacttcaaatatatacaataaaaatgtaaataaaacagactcttaatagtcacattaaaatggcttttcatttaagaattatgtaaaaagtaatattttttccaatcatctctataatacggaaagggttctcataccccgacctaaaggaatagagaatctcagctatttggtcacatcatcaacccttcaagatggttttttcaacattctatggctttaagtcttgggttgcacataaaatccccttggcctgcacacaaaacactttttatctgcatcttagttggtattgaaaaagaatgcagccgaattatggagtcttttcctccaggtaaaacgtcagtccctaaaatctgagcactctgcaacgcggctggtcactatagccctagggcagcccctcccccacagtctcctcaaatcaagagagagcagtgaaatgcaaaaggccgaggtgggctttgccaatctgcttgcacttaatgggaacctgtcgccttttgcgcgcccggaccatcgcttgtacttaagagaaagctggcttcctaagagttcacttatcgaacacaaactagcgagtccggcgttgagaagttacaagattggggctggaggctcgggcccggcaggctccgctgcggcacacggtctggaggtctggcgggcctctggcttcccggccgggccgcgtccgcaggggctccgagcgctagagcccgcgcgccggcgcctccctcacctcgtcgtccaggaagtccaggtaatctctctgagcctcccgcagctccacatcgtccagcaccacggtacccgccatgcccgctgccaaagaactacctccaccaaagtcgcgtggaggttcccaggatgactccaccccggcgcgaaaacttccgaactcttcccgccaccaaaggttacctcgaggaagaggcggggaccttgggagcatataagcattatgattggctgagttctctgaggtcggactagcgactgtccaatcaaaagcttcttcttcttcgggttttccgctgcgcgccccgcggtggcgggaaacgtaccatccgggattctctgttcctcccctccctccgcctcactcactgacgagcaaactgaccaatagggctgagaggaggctcacagaggctggtcattgagcagctggaggggacaggctggcgagagggaaagcattgcgttctgggagttgtagtgttctccctcctttccggatgtttttgcagggtttttcaagctgcagaacttttgacccgatgcaacgaccaaattcagaggatggtgctttataacgcagggagatgaaaacataaaagcaaatcatttttaagatatatccaaatcagaactgccctccagtggcatcctagtgtaaaagtggattttgagaatctataggatagaatatagaactacagtaccttagggaaagattagttaaaaacccatttgctatctgataccgttgcctgacgaactccataaagacatcgccgcagagaaggatgaagtgaaaaaaaaaatctgtgtttaccctgccccctagagacttcatcgtgtgttatacaaattttggaaaccgttactactccatcttacttaataacaggtaaattaaaggctttctggtcttataaaaagatcacaagatccttttaagtaacttagcttactgaacgatcagctcaagaggggaaaaagtgtttcacgtcactttgattaaatatcaatcagtaactaacagcaaatctgaaaccataatgactaaaagatcatcgcacgtccaaatttgtatgtttgttttcagtccgtcgtggttggctttttcttatatttctagttttattttgagatataatgtatatacagtaaaatgcacaaatcttaagtgtacagctcagtgaatttttacctgtgcttacacccatgtaaccactctgcacaataaagagcaagcccattgccccagcatgtgtttttaattttactgaacaagaagctgaaatactggattgcccaacatcagacatttgataattctttatctgaaatttcagccaactattagcttatgttttaaagtcttcaggactcactatgtactgataaatattctaagaataatctgcctaaacaaaatatataggccatctatttgtgtgggtatatgtatttctagttattattcagtttatagttactgtatgttttgtgccatcctagtgggcagataaatcgatccttagccaaagcaaaaaggctgtcatttgactgcttgcttttatgtttattaacgggcaaaaaaaaaagaaaattctagaataaagatactgtttgccgttatatagcaagaggtaattactgatttattaagactttttactcataactcttattttatgaacttattggacagagtactgagatatcctctgctctggaaacaatttgaaattaacactaaaagaaccgggaagcttagttcaaactagcaaagaagtcgagtcatttgtagtagaaagtccaaaagagtggaaatctgaaaaccacatctttgattctcacacttttttctgggcttgtttccttatatacagtataagatgaagaaactgaattagaatatctctgataatctgtcttactctaacattccatgagctaatggcaaatttggaaactatgtaaagacaattctatttaatgaattaatcatgccatggtctttgataaagacttgatttgtcccaatataatcatcttcagctgtgaaggacacaccgctatttaattggtgtttctcccttctttcattagggcatgaaatctttaagcagaggaaatgtatttcctttgttatccccgacacctgcaaactgcccaaaatcaatcaggttgttgctacagaaaaattaggggcatttgtacatatctcataaaaagtccagctgagcttagcccgtagtcctcctctatcctgattcaaaattaaaaagcacat

SEQ ID NO: 585448 - DNA, 4001 bp, Homo sapiens
agaggaggaggatcacttgagcttgggagtttaataccagcccgggtaacagagtgagactccatctctaatttttaaaaaaggctgatgggggggaccctttttcttgatcccatcaagagattatctagtaccctgatgcataatgattaatactcttcataatttatcctagcaagtgtaactgcagacaatatttttcatttaaattaagtatttggtctttttgggaatcttaacttgcctccaagaagttctactatagtgactccaaacctttttggaattcaggaagcattcttattgattataaatcaccactcttctcaaatgtactataaggtaaatatttatttatttatttatttattttattttattttattttttgagacggagtctcgctctgttgcccaggctggagtgcaatggcgcgatctcggctcactgcaagctccgcctcctgggttcacaccattctcctgcctcagccttctgagtagctgggactacaggcgcccgccaccatgcccggctaattttttttgtattttttgtagagacggggtttcaccgtgttagccaggatggtctcgatttcctgaccttgcgatctgcccgccttggcctcccaaagtgctgggattacaggcgtgagccaccgcgcccggctgctaaatatttatttttaaacaaaagggtatgtatgttctccaacttaatcacagactgccctcaatattctggacctgcttttaattttaccaaatctttctttcatgtaaatagaattaatttgtaccagcctttattaatttatacaataatggcatagttaaattttgttttaattagggggttgacagggactctagaagtggtttgcaagtgaagaaactgaggctcagtgagataaaataacttactaagtctcccaggttaggcgtgtagcctttaaatccaattcttctctttcgccacactatgccttccaagaaattacttccatgcaatgaactaaataaaaattgttacactatagtgtcacttttccctaaaattcttaagtcaactctatccatcctactaaaaaatcacttttaaaacagaaagtgaggggcaaggactcctagaggcaggaattcaaggatacagctttgccaccccaagctgctgattgctccactgcagtttcttaacaattaagatgctttatctgtcatgcattcaacaaaaatgtatcgagtaactggtaggtagactgcacaatgctaatactgatctttaaaaataactaatgtcctaaaatagttctgaagatccctggacaagatctatcacttttctaattctttgtattaccagttcctttattgttagtaaccacaaaagctcataaagctgttttgaattacatttttaaacacagacgtggaaatatatagacacacaagtatactgctgtctccacacattctccctcccctcagtgggcaagactcatacttcatgcccacagaacacaattattattctgctctaaaagaagtgaccatcaactacacaacagatatatattttaagtataaatatcaattatttcttagtgttctaaatctagtatattttctcaaaatctttctagaagatagcatggcagtaaaatccttaagtgatttacctgatatcctggcatgaagattctgtttcatggaaacagcctcaggctgagaaagggactggagaattgtcaaggctgaccttcgcagtgcactatcaaaaattgtaagcacttcactggggaacatgttgaaatattccccgatttccatgttggtctcaaacagagtcatggcattaaccacaactgggtaatgagcatcttcatccctttccttcaagattagaagaatatcattcttatggtattccgaaacatatgactcaaacacttgaccaaccagtgtaacttgatcgctattcatcttgaatctaggtaactaaagaaaaaaaaaaggatcatattatatatttgatactcaagatgtacacacaatttaacaaaaacgattggttataaatcacactggctttgggtcatactataatcacaaaataatatctgaattcaaatcttaatgaaatctgaattatctgttacagtcacagtacatgtacttcaaaaatgagtgaagtcaaatgtaagtcaaagaactatgttggtactgattatcaaaatccaaaatagttcaaagcatttcccatcttttccccaaatttccttcatattaaccctgcattaatatacaggcatgcacctaacaacatttccggactgcacttataatagtggtctcataagattacaatactgtatccttattgtatcttttctatgcttagatacatagataccattgtgttacaacaactgcgaacagtattcagtacaatgatatgatgtacaggtttatagcctaagagcaacaggctatgccatatagcctaggtgtgtagtaggctgtatcatctaggtttgtgtaaatatactctatgatgttcacacaaggacaaaatcacctaatgacaaatttctcagactgtatccccatcattaaatgacatataatggtatttattttacataatatatgtaagaggccacattccatacacacacatttgctctcaagtataaaatctgaaacatatcttttggcttaagtcagtaacagtggagttctttgcaagagtcctggttctagcttttgtttatatgaacacagtgtcattctttcgtgtgctctctctctctttagttatacacacacactcatgtgtattctgctatgtaactgaaacacataccattaatcagactgacagccagttctgacatgaataattaacagactgtccttagaaattcatacttggaagtgaatttgtttccttctttctctttcttaccgtaggaaatctactgggttctgcagaaacagctgtcaacaatgcaaagaaaacagataaacataggaaggtgaaaaaacactgagtcttcaaataataaaaaagtattattgaaaataaatacagcatataccattactttatctcattcccctggcactctattaaaaagtatgtatctacagataaaaagcacctatccccattctagtttcatgtatacagacggataacaaattacatatgtataaacccaattcaatgtccatttcctaatatctatcatgtacaaggcactatgctggcaaatgaaaagtatagtaaaaggttctctatgtcctcagaaatccaaggggcaaataaaacgaaacagtgcactaccagtggtcaaaaatgcaatatgaataggagtcaaaggagagggaggttaaatttaaatgaggtgacgatctcagaagtagcactggacagttagaaaccagctgtccaaataagaaacacttatttggggccgggcgcagtggctcacgcctgtaatcccagcactttgggaggccgaggcaggtggatcacgaggtcaggagatcgagaccatcctggctaacacggtgaaatcccgttctctactaaaaaaaaatacaaaaaaaattagctgggcgtggtggcaggtgcctgaagtcccagctactcaggaggctgaggcaggagaatggcgtgaacccgggaggcggagcttgcagtgagccgagaccacgccactgcactccagcccgggcacagagcgagactccgcctcaaaaaaaaaaaaaaagagagaaacacttatttcgtttggaaagagattgaggactggagaagaggtgtacttaaatttgacttacttcatttgtccaacatttattgtactggactctacaaatacgaatattaaaggagactgctataaagttcacagtttatcatcctaagtacgtgttatacacgctatttgctatattttgctttctctgagaacctactattccgcaagg

SEQ ID NO: 585449 - DNA, 4001 bp, Homo sapiens
gaagtagcactggacagttagaaaccagctgtccaaataagaaacacttatttggggccgggcgcagtggctcacgcctgtaatcccagcactttgggaggccgaggcaggtggatcacgaggtcaggagatcgagaccatcctggctaacacggtgaaatcccgttctctactaaaaaaaaatacaaaaaaaattagctgggcgtggtggcaggtgcctgaagtcccagctactcaggaggctgaggcaggagaatggcgtgaacccgggaggcggagcttgcagtgagccgagaccacgccactgcactccagcccgggcacagagcgagactccgcctcaaaaaaaaaaaaaaagagagaaacacttatttcgtttggaaagagattgaggactggagaagaggtgtacttaaatttgacttacttcatttgtccaacatttattgtactggactctacaaatacgaatattaaaggagactgctataaagttcacagtttatcatcctaagtacgtgttatacacgctatttgctatattttgctttctctgagaacctactattccgcaaggtgtgaaacgtttaagaagtacatatagcagttaggtcaagaatcctgaccactataggaggccagagtgagagtaagaatgagtaaatgtatatccaaaacaatgagtggaaataaattacggcctccacggtaatttgtttttggttaagcaatataaattcagccaagtgtaaagcagaaaaagcacttgggaaggaatatctccacaatgtggactttgcccaaaaaaaaaaaaaaaaaaatctggactcccaacagtggctacaagagaatcactatgattctattaaagcatattaagtttagagccacaaatttagcaatttgaaaaacagctccacacaaggcaggaaaagggcagcagcagaattcaacgttcaaattaaggtcagattaaattttgcctagttaggctagcatttctatggttatatggaccatcgttattcattccctttcaacatctatgcaaaactgactaatcaactgtgttatcagcagtttgctaaatcaataaacgtacctactacccacccagatagacactggagggactttttgttttgagaagggtcatttcacaactttcaagttctctttccttttcttattgaatatttggggtcaaaataaaatcatttgctttactttgtcctcttgaccacagcgaagcgtcgaaaagaagacaggagagtgcctaactgcactggcatcccccagctgtctccgggaatcgcggcagccccgccccgcccgcctgcacctgccgggagccccgccccctccgcgcgggctggcgggacgcgcgccctcggccccgccccactccctccgcccctctcactgcgggggcgcgccatttcgcgcctccgggccgctcggctgccccaggggcgcctggcaaacgtggagtcgctcggttttggaggcatgctttccaaactttctaattcacagggtctttgcacgcagcccctgccccacaacaccttggcagtctctgagacttctggggctcttctcccgggcagctcccgtgcctgtccggtcccggagttgaatagtttttgaagtaatgagacgggaacgagacttgggacgaactggagaaaaacataaccgcgaaaggaggaggcggctatcacttactggctgtgtcagaagtcgccgggaacgcgttgctcccgaggccgaagggcccagagagctccagccaggcagcgggttcgtctccggcgcaagaaggctggtgaggcggagtgcgcgcgtgcacgtggccgctcgaggcgccaccggccgcggggacgcgcgggctgtgtcgggcggcctagcgcctgcggctctgccgggcctgcgctctcgaccgacgccgggccgcgcaccgcctcaacttccctgccccggcggctcttccggatggagacgaggcagcggggcggggtggagcggagcgggcggattggggcggagccaggagggtcccgggcggggagaggggcgggacccgagcagtgacctcaggctaagtggccagagcagggttgtgcggcggctcagatcggatcttagggtttgttttttgtctgtccaaggaatttgcctaacccaaggccacagaggatctcttctgtgttttctgacacaagttttagaattttaggttttatattgaggtctgtgatccaattagagctaatttttgtctgtggtgcaaagtatggatcttaggtcatttttttgtatgtgaatagtgtcatttgtttagagagctttctttttctcactgaatagcttttgcacctatgtttaaaatcagttgtccctaaagcatcagttgtgggtctattcttagactttctattctgttccgacaatttattatatttctctctacaaaaataccacattgtcttgattcctgtagattcgtaagagtcttaaaatcagatcgtgtttggcctccaattttttgttatttttcaaaaatgttctggctcatctagtcccttgggttttcatatgaatgttaaaatcagcttgtcactttaaaaagttgggattgtgattggttacatttcgtctatagatccatgtaagaataatttacatgttaacaatatttagtaatgacccttaaagtaagcctcttcatttatttaggtgttatttcactcagcaaatgttttgatcttttgtcaggtctagtcttatatagtccattttcacagtgctaataaagacatacctgggactgagtaatttataaaggaaagacgtttaattgacttacagttcagcatggctggggagacttcaggaaacttaaaatcatggcagaagcgggagcaaacctccttcttcacagggctgcaggaaggagaagtgaggagcaaggagggaaaagccccttagaaaaccatcagatcttgtgatacctcactcactatcagagaacagcatgggaataaccacccccatgattcagttacctcccaccgggtccctcccacaacacctggggattatggtaactacagttcaagatgaggtttgggcagggacacagccaaaccatatcaccctatgtcagatttatccataaatctaaggatgggggaaaaatatacttcttgatattatgtaaatgacattttaaattttcagttgttctttgatagtgtcttagtctgtgttgctaaaaaggaatgcctgagactgaataatttacaaataaaagaggtttatttggctcacacttctgcaggctgcttctggtgagggcttcaggctgcttccactcagtgaaggggaggctgcctgtgcagatcacatggccagaagagaagcaagagaaaggggaggtagtggtcaggctctttttaacaatcagctctggaggcaactaacagaatgagaactcattatgcaatggcagcactaagttttcctgaaggatctgcccctgtgacccagacacccccaactaggccccacacttgggatcagattttaagatgagatttggaagggagaaatactcaaactatgtcagatagtgtgtaaaaatatgattgggggttttgttgttgttgttacaggttcttgctctgttgctcaggctggagtgcagtggtgtgatcatggcccactgcaacctctgtctgccaggttcaagcaatcctcctacctcagccccctaagtagctgggtgatatggtttggctgtgtgtccccacccaaatctcaccttaaattgtaatccccaggagtctggtgggaggtgattgaatcatggggcgaacttcccccttgctcttctcatgatagtgagttctcatgagatcaggttttttgaaagtgtctggcacttccccctcactcattctctctctctggcagttccccctcactcattctccctc

SEQ ID NO: 585450 - DNA, 4001 bp, Homo sapiens
agaccaaactcatctccgactcctaattactgaaggacagtgacaccgagttcactactcattccccactctctgtatataaagtttccttcactttattgctctactaatcagtttttaccccagccaatgatattcttaaattatagatatggtcaacatttagtgggcctatctgttgaagaaaatatgaaaaatgtgtagttagtgatggctactaatgaatatgtatagactgcccaaagtgataattttgccaagtctgttgattatcagaaatgatttttttctttaatcaacaatatgctatctaataaattgattctatttactttcctcatctccagggcagtgatctctctcacctcctttaaatagtcatgagccccacaactacctttcagcccaggacagaggggcacacacgacagtggtctatgagactataatacatatttttactctaccttttctacatttagatgcgcaaataccattgtgttcagattgcctctagtattcagtacggtaacatgctgttcaggtttgtagcctaggagcactagcctctacctgatagtctaggtgtgtagtaggctgtagcatccaggtttgtgtaagcacactctacaatattcacacaaggaagaagtcgcctaatgactcatttctcagtaggcgactgtcctgaagagatgcatgactctaattaaatgctaccttctcaatgaaatcgattctgatcaccctatttaaattcacaactggagacccattccacttcccaagccttatcctatttttctataccaggcatcgaattacgaatatataaaaattatttgtatatataaattatatatacatcaattatgcatacgtatatccacacacacatatttactgcgtctgctctgctagaattaagctccagagggaagattttgtggactgatatatctcacacatctagaaaagcgccagggacagggcagacgctaggactccacgaattaatgattccatcagaatttgaaatcaaactgtaaagcaatcccttcatttcccagagctttgctgctcaaacatacacaccccttccccttgaacgcccaacaggctgggcgctgccaaacagaactcctggaaggcggcgcccaaaagcagaccctaggagtgggcgggcaccaactccccgccccagcacgcacctccctccaactttagcgcccgggattcccaggaattcgtctcttctgggctaagccccgccaccgcggccgagcagggcgggcccggaccttcgacccacgctccgggcagatgccggtggccttggaggacccgccctccggcctgccgggcctttcctcggggaggctgtagctgagatccccgccccgccgtccaaccccgcgagacgagccccctctcctctcccgcccgggcctcacctctcctgcaggaaacgagtgcaggcgccgggccgtggtactggggaagggcgccggcggcagcggcgacgcccggtgagcacctccacgcgctgctgcgcccggccgggggtgcggcatacccgaggcgcgagcgctcccagtccccgagctgccggcgcggggctgcggcggccaagcgcggggagggcactagcaggaggaggagcagcggtgaggcacgtgacacgccgccgcgggccgccggggcgcgagggcgcagcgcccccagaccgtcggagagcgcagagaggcagcggcgtgctgaggtttcgctgccgcccggtcttccgctgaggcccacgggcaagaagagaagccgctggcggccgggcaggcgctgggtcctctggccgccgaccgagccgcagtccatccccgagcagttcactggcccgggcgcgcgctcatgcctctcgcttttggcgccggccacgcgcggtccaggcccagagtccgacagcgggagcgagcgtgggccacagcgcaggaccgccctttcctgccgggcgcgcgggcggggctcgggacgcgcgccgggggtggggtggggcggggcggcaggagcccgccgtggcgctccgagatgcggggaccgtgcgagcccccaccccattcgctaggcgacggcggcgaccgggaggagcctgcgggcactccggaactggaaggagcttgttgctgtcacgatttgcattttcactgcactgctgtccttaaaaaggaattaccccggtgcccttcagagtcctgtgaaaagtctcagaccgacaggctgccctagatttcactgattatcctaagtccccaaacatgtggttctggggagcattttaaggaattattagcagggcccagggaaaggccctcacataatacattcaaaactaaattttcagagtttttgtttccagattagagcaccaaaaacatgggaaggtagcaatctgggaacttaaaacgtggggcatgaatgttaaaatgagacctgtcgggtatatttgaaactggtaatgtttagtttcgtggactttttgaaggcctgttacaccattcacagataactggtcccttatgtgaatttggaagatgttagttgaataaataaatgaaatgcataaggcaccaagctaggagattttattaaaaataaaaaaccgcaaaacaaattgttcttatcctccagaagctgttttcctatacagccatatgtgtacacatacgtgatggaagaatgtgttatgagccatgagagatgtacaaagtgctgggaagagaggagcgtgcatatggatgtgcaagataagtgtctatcaaaatttgaagaactgaaaaacaggattcaagtcataggttggtgcaaaagtagttgcggcttttgccattgcaagtaatggcaaaaaccgcaattacttttgcaccaacctaagacacttttgtaaaaggagtatacatttataaaattggtagaaaaagcagtttagcaatgagtatcaacaaaaatttgtaaacttttctcaagtcacctaactaaaaatggggataatgggaataatccaaaatattaaatatctactaggtttgactatacaaacttgtcatttttatgggtcaaaatgcttaatattggtaatttcacatatgcacaaaagatagtcattgtatcataatttgtgattgtgaaaaaatgggaaaatagtgcacaacattagaggaacgattaaactgtggcacaaactttaatgttagtcctttgtaatttttaaaaattgaggtataatttgcatacagtaaattccacagacttaggtgacatttagcagttgataaatgtcatttagcaacttgatgacatttagcagttgtatataccacccagtcaagatctagaacattttcattgctccagaaagttattttgtgccagttttccagacaatccaccaccaccccaaggcaactattttctctttttttttttgagacggagtcttgctctgtcacccaggctggagtgcagtggtgcagtctcagctcactgtgtcctctgcctcccgggttcaagcaattctcctgcctcagcctcctgagtagctgggattacaggtgtctgccaccacgcctggctaatttttgtatttttagtagagacggggtttcaccatattggccaagctggtctcgaactcctcaccttgtgatctgcccgcctcggcctcccaacgtgctaggattacaggcgtgagccaccgcgcccggccaactattttcaaatttcaatgaccatagattagttttgtctttttttgaacttcatgtaaatggagacctacaatatgcattgccttgtgtctttcttctgctttgcgtctgacttcaatatcaatgagattcatccatgctgttgtatcagtaattagttgcttttaattgttgaatagtattccattgtatgaccataccacaagcggtcatccattctattaatggccatttgctttgcttata

SEQ ID NO: 585451 - DNA, 4001 bp, Homo sapiens
gaccacctcagtttgatcagatgcaactgcaaaaaatgataataaaagatgacatatatagaagcttcctatgtgtcaagcactgttctaattactttatatcgactctgactcatttaatcttcacaagaaccttgtaaagtagtattactatcttccatttcttcagataaagaaactgcaacatagctgggttaagattttcagatctccttgaaacatacataagcatatataaggttaagacttgccccaaatcactcagatgtctctcctctaaaatcttgatggtttttcgtgcacacagaataaaatctaaactccttagcgagaccctccatgatctgaacttcacatcttgtaacgcctacccctcgcccgcaaaagcctatggttcagccagacattttccccagtcttcgaacacactgttcttgtcttcccacatcttcatgccttagcccaattccttggctttttcccacctagttttctggtccaacttctaccatcctttaagattcagttcaaatgtcactttctttcttttttttttttttgagatggaatctcgctctgtcgtccaggctggactgcagtggtgctatcttggctcactgcaacctctgcctccaggcttcaagcgattctcctgcctcagcctcccgagcagctgggattacaggcgcccggcatcacgcctggctaatttttgtatttttagtagagacggggtttcaccacggtctcgagctcctgacctcaggtgatccgcccaccttggccacccaaagtgttgggattacagcagtgagcaaccgcgcccggcctcaaatgtcactttctcagcaaaccctttcctggcgtgttccctgccttctcgtgttcctggtgtatcctgcctgttccacagtggtcaatggatttgtgcttactctaagatctctcgctatattgtaaccattactttccatttctgccttcacactcacccacctccaggactggattaggggaaccgtgtctttcccctagggtccatcatattcattcaatggttatggtatacctgtttgaagtatttggtatacatctgtgaaccaaacatgaaatcgaccctgccctcgggaaggctcatcaccgagcctactgatgaaggaacaaatgagatggaaagaaaatagcataaatggaattcacctgaaaatatgccactctagagggaaactgttgacaggtagggaaagtaggatgccccatggataaagtgtcaactccgtctttatgacaggccaactcagcgggtgcccaccacgcttggctccaattcaaagagccaccatctttggtccccacctcagtgggttcccttgtggcccgacgtctccctgtgtcttcatacctaaactcggagcggggcgccaggtaaggatgagtattacagtccgagaagcgaacttccaagtcacctccgcccagtcgcacccaaggtacgcccctcccgccttctgggggaaccaagatggctcccggggagccgtgggccaggcccctagaactcacctactttaagtccccgcgcgcgccaccagtaacggtcgcgacccaggtggagcgactgcgtgtgccgaaaaagagcttatttgctgattggcttctgccgctgtctttcacaaccgcagccagtcgagcggaggcacacccaaagccccgcccccttagagttcaaataggtggtgtctcccaggctgctgagatcagttaatgagacggtaattgaaggccgccgtgcgccaacagaataatgcacgtcgattgggcagctccaagggacaacccactaccgcttgcccgcccaccacccacttcccgcgcagttccaaaccgcgaccagagagtctggcgccagctgccggcaacggatagaggggctgtgtcatagacgtccgacgtgtctggtaaggccagagcgcctttcctcggtcctcctagacatggtgtccgctgactcatgagaaatgaaagtgggttgcgcgttgcagtcgtggctggaggctgcagtttggagaacagcccgtaggcgtggcagttcactcctgttgcattggaatttcatttccttttgatttggtttgtagtagaagtaatatctttcttcctgggaatacgtctctgacggacattttgaggtcattttcttaaatccaagatcctaaagatctgtagtcgaacagagaaaactggtttgctctctgtcttaaaggctgtccccacctttcgaggggcgagggaaggatcataaaatcatttatttttattttttaattaactaatttatctattttttgagatggagttttgctcttgttgcccaggctggagtgcaatggcgcgatctcgactcaccgcaacctctgcctcccaggttcaagcgattctcctgcctcaacctcccaagtagctgggattacaggcatgcgccaccacgcccagcttatttttgtatttttagtagagacgtggtttctccatgttggtcaggctggtctcgaacttctgacctcaggtgatccgcccgcctcggcctctcaaagtggtgggattacaggcgtaaaccaccgcatgcggccatctatattttattttttgagacggactttcgctcttgttgcctaggctggagtgcaatggcgcgatctcgactcaccgcaacctccgccttctgggttcaagcaattctcctgtctcagcctcccgagtagctgggattacaggcatgcgctaccacgcccggctaattttgtatttttagtagagacggggtttctccatgttggtcagtctggtctcaaactccggacctcaggtgattctcccgcctgggcctcccaatgtgctgggattacaggcgtaagccactgcgcccggcctattttatctcacaataagacatgaagaaaatggtaactataacacttgcataattcataaagtcctttctgttggttatctcaattctgtgcacaacagtcaaataagcagattttacaaacgaggagctggagccctgcaaagttaaaggactttcctaggatcctacagctaatatagagacaaattgaaacaagttatctgattgtgtattttgagttatttctactcccacaaaatgactgtgttcatttccctaaaacgtaaagcattatattttaagtgggtagagagggcttacacaagttgatgttccctcatttagaaggcaacttagaaatacattgatctgcccagcgcggtggctcacgcctgtaatcccagcactttgggaggcaaaggcgggcgaatcacgaggtgaggagatcgagaccatcctggctaacacagtgaaaccctgtctctactaaaaatacaaaaaaaaaaaaaagaaatacattgatctgtgtgatcgaatgtgaattaacaatgacgttgacttgatactacatttctgagtggttaccacattttattgattgtatgcttctcaccagactgcaacatcctggaggacagggagctaattcttaatcattttgtaaccatagctcctaatttggtggatacatagtaactatcaaataagtgaataataaatctatgggaagaagcagatggactccgtcttgaacccactcaatttttcccccatcaattacccctctctcgtttttcaatactgggtctcttgcagagttgcagtggcggccacctggtcagtgaaatcagcgaattgaaaaaccactgacttcattaacatgtctaaagaggcaggctgaaaaaactgaaaatctatcaggcatctcattccatagttccctgtttgacaagaagaccaaggtgtcttcaaagtctgccctaaggtccagatctcctacccacgtaggagacttctagtttcacaaatccccgatgtcggtttctctaaactattttattctttgaacatactctccagacaacatcgc

SEQ ID NO: 585452 - DNA, 4001 bp, Homo sapiens
aatatttacacactgggcagaaacagttgagacacaaatcccagacggacagacaccgcggagtgtatgtgtgtgtgtttgtgtgtgtgtgtgtgtgtgtctggtgtcgggagttgcggggagttggagccaacttggcgcagccgcagcctctgttcagggccctgcctccctcgcccagccccctactctccttggaccaagtcctcaaacccagacttttcgtccctacccccaccaagctccctggaacggtctccccgcgtctggggacggagaggagaactaataactggccccttcagccgcccacccgcccctgtccagcttcgctcgccactcccggtcctacctgggcccggggctgcgctgggggctccatagggcgcgtcgcagccagaggggcgctggccgctcacctggtacatcggccccggacctgcggaaaacagggctcagcgggcggcgccggaggcgggcaaggggcgattcccccgcagatgcgcgcctcccacgtccactcactcgtgcgagccgtgctacgctctcttccagccggatccccgcgcggggcccgccatgcgcgcctgctccgggcgcccctgcccaggtcccgctggctcccgggtgctcgcctggcgccccttcccctctcactcgctgctttctcccatttcggcgccagctcacgccgttcgccccttccttcttccttctctccctccagcccccctcgctcctcccctactcgcctctcccctcccctcttccctggcccaccctctccccgccccctcctcgccttctcagtcgcccctctgcgggtcccctcccccgcgccgggcttggcccagccaggagccggacacgtctgtccgcggggcgcccgaggcccgagcccccacaggaagccggctgggcgcgcttcctccgcgctctcggagcggggcctcagtctccccgactccctgctctctgaggcccggagatccgcgggctgcacgttttcctttgcctgtccaaactctgcaaaagtttctggaaaatcaggagaaagagagaaacctcaaccacttcgtggaactgtctgaataattgcggcctccaaatctctttgccccaaagatgggcgcgatcaagtttctcagtcacgttttacccaccccctcggtctcctcccggggtcctaagccagggacagggatctgggctcccaggccacccgcccacagcgccagagttgtctgtccgggaaatccggttagtgaccaaccagcctgccctgtgccgcagcagcccagagcatcctcgaccctcctgcccctaccagctgtgcgtgggaatgtgtgtcagaaaaccgactttgggggcaaagagaggtcctccgaattcagcccttctttgggatccagactgaatccgagggcttctaagatgagggttcggggagaaaggggagggagggagcctctcccggtggggccagccgggcggcgcgtctggatggtgagccgtggtggtaggaagaagccgctgccaggcagtccaagagggttcaggggccctcagcgcgaccccggaacctggtccccgagaatggggaagactttggagcctgcggctctccaggtggggctgggcgggcccgtgggatgatgctcaggtggggcagccccctggggtgacagcgtctcggccgtacttgtctagggccgcctaggagccgcgtctgggctccccgccacgagggccagtgagcacactggaaggcagcggcggcaccaggccaccttttctagtcccgagtccagccgggtctggaagtggagagctgggacgcaggaggccgggcgtcccagctccccacttcttggactctcctagcccccatagtcgctacttacggctatcgcaggtcctggggcgccgtcggggccaggaccgggatggcccccacggcgccggcagcgctctcggcacccgcggccacgtcccagcgatgggctggggtggttgcggcccggaggaaggtggggcgggacaagaagagagtgttccgccccccaggccgggctgctagccgcgggggtctgtcctagtgccccaggagccggccgggatccggctgctgtccgggagctctggagagctgagccaactcccgcttcctggcacgggctgagtcacccggacgggacgcgcccgcgcctgggcctggcggctgctgcattcttacctgcttacctgggcgcgcacgctgggcctcacccacctccgaaggcaatcctcaccgtctctctccgtttcctcccgcgtatagggccccctcccgaaccccagacctcagtgctgcacccctccccctgctttctcgtctcaatccagggcccctaaactctgcatcagctcagtcccggagccttactattccaagtcgcctgcttgatctcaaaagtcctctgaatctggcccagtactaatgtctgttttgttggaaatgtaaattatgctttaaatttaatcacgcatgctggttatacaggtgtgctcattttgtaaggatgcagcaagctgaacatttatgatgcaggcacttgtttgtatgactattatacttgaataaaaagtttttaaaaatcaacacattaaaatcaacattccagttcagagcatgataggatatgatggccaggctggaggcctggcatgggagcccagtttccagacccaccatctactatatttctttggggaaatccctttgcctctcagcctcaggagggatgagcactggggcccaggaccaggactggggtgaggtaagtgagacactcacctggtgtgcaagatttcggggatgccaagataaggaattttttttttggaggcaggattttgctctgtccgccaggctggagtgtggtggtgagatctcagctcattacaatctccacttcccaagttaaagcagctgggactacaggtgcttgccaccacacctggctaattttttttagtagagacggggttttaccgtgttggccaggctggtctggaactcctgacctcaagtgatctgcctgccttggcctctcaaagtgctgagattacaggcatgagccaccgtgcccagactgatgaggaatattttaaggcaatattttaatataccaaatgggcaaactacagttctttgggccagctgccttgttttttttaaataaagttgtattggaaacaggaccaggattaaggtaattaatcacgcaagttcagggtcagatcctgtctttatctaaaatgttggcattttgtttatcatagactttttggcattaatttggatttttatacatattgcaggaaaatattgttttatcttaattactgagttttttgatgcccccttaagttttgaacctgagccaagtgcctcattcactccaggtttcacatgcctcaccctagacccggccctgttattgtctcttcctgaaggacctgtccaggaagccagggtaaatgaggggagatcaaaggtgttcccccacccaacactgtcacacacacacatatgcacagcaccaagtgggctctgcacccaagcccaggcccagcttccccggggcccaccgatcagttcagaataaagcgcaaagtccctcagtctccatgaactgggccccacctgccttggccctcatctccccttacttattccctgccagccatgctacttccttttctcggttaatttgccaggcaccttctcgcctcagggcctttgcccttgctctttcctctgcccagaatgtgcatcccctagatacccacattggccctttcctcgtttcttctgcttatgtcagcttctaagagaggccgtcccagacttctcactctctgcccccaacaccattttattattctacccagactttttcagcacttggcctattctatatttgctcatctgttggtagagtgaaaggccctgagag

SEQ ID NO: 585453 - DNA, 4001 bp, Homo sapiens
ctgctggggtgctggggggcctcaagttacagcccagagcttaaccctcccagttgcccacgctggccccggttgtgtgcagttagccctctcctcttgctgctggagctgagaatggcttcaacaaggaaggggatcttggaaggaggtagtggagggagagcagagaaaatggataaggggagggagaaagctggagagagtaagaggatgggagagcaggaggctgaggaagggaggaggcaggaaggaggcccagcgggacagggaaggttcccagacacagagaaggacccttccaagtgccctgcccccagctgtccctccgggctgaaggagtccaattcttggaggcgctcatcctgcagaaggccccgttgcaggggccccacagagacagcaggcaatttgaggcttggccaagatgggctgtagacacactggcctcatctatgtgctggctgttggccagacatcttccacttgtcctcactctggtttagaggaccccccacctccacaactaggcgtccataccaagtaggtggggagtggagaggggcctcctagaacaggcaggcaggccggcttcgagggcgcatgtggaggctcaggccagagaagggaaggagcttgtccaaggcaaggcagggagttcgtgtcagaggttcaggaacagaccttcattattcagagtcaaagaggggaaagggggaatggcgctggtggggaggaaggcaacgacttagacagtggagattccaattatgaaatccgggtccacactcctgcacgcggttcccctggccctgaacacatcccagaggttcctgacttctccttgacccggacttccatttgggagcttcggcttaggcatctggccagtgaggggaagggactgagaaccagggccggcgaggcccctactccaaaccccttcagggagtcacaaaccgtacttggcgtgagaggctcccccaggaatcgcgggtaggttacagacggcgccaggcgcgggacggggcatttcacttgggctgaagacactgggttggggtgcgtgtgtgtgcacagggcaggggcggcggggactggccggcacgagagggaaggaaggcgagggagaagggatggcaagaaagaggggaggggctgggtcctgcagccgctcgcggcagacaaaagttttcgggaagcgctgggctctggttgggctgggggaagggaagtagagaaagattcagacaacgccccctcccccacaccaggcccccacaaatatttacacactgggcagaaacagttgagacacaaatcccagacggacagacaccgcggagtgtatgtgtgtgtgtttgtgtgtgtgtgtgtgtgtgtctggtgtcgggagttgcggggagttggagccaacttggcgcagccgcagcctctgttcagggccctgcctccctcgcccagccccctactctccttggaccaagtcctcaaacccagacttttcgtccctacccccaccaagctccctggaacggtctccccgcgtctggggacggagaggagaactaataactggccccttcagccgcccacccgcccctgtccagcttcgctcgccactcccggtcctacctgggcccggggctgcgctgggggctccatagggcgcgtcgcagccagaggggcgctggccgctcacctggtacatcggccccggacctgcggaaaacagggctcagcgggcggcgccggaggcgggcaaggggcgattcccccgcagatgcgcgcctcccacgtccactcactcgtgcgagccgtgctacgctctcttccagccggatccccgcgcggggcccgccatgcgcgcctgctccgggcgcccctgcccaggtcccgctggctcccgggtgctcgcctggcgccccttcccctctcactcgctgctttctcccatttcggcgccagctcacgccgttcgccccttccttcttccttctctccctccagcccccctcgctcctcccctactcgcctctcccctcccctcttccctggcccaccctctccccgccccctcctcgccttctcagtcgcccctctgcgggtcccctcccccgcgccgggcttggcccagccaggagccggacacgtctgtccgcggggcgcccgaggcccgagcccccacaggaagccggctgggcgcgcttcctccgcgctctcggagcggggcctcagtctccccgactccctgctctctgaggcccggagatccgcgggctgcacgttttcctttgcctgtccaaactctgcaaaagtttctggaaaatcaggagaaagagagaaacctcaaccacttcgtggaactgtctgaataattgcggcctccaaatctctttgccccaaagatgggcgcgatcaagtttctcagtcacgttttacccaccccctcggtctcctcccggggtcctaagccagggacagggatctgggctcccaggccacccgcccacagcgccagagttgtctgtccgggaaatccggttagtgaccaaccagcctgccctgtgccgcagcagcccagagcatcctcgaccctcctgcccctaccagctgtgcgtgggaatgtgtgtcagaaaaccgactttgggggcaaagagaggtcctccgaattcagcccttctttgggatccagactgaatccgagggcttctaagatgagggttcggggagaaaggggagggagggagcctctcccggtggggccagccgggcggcgcgtctggatggtgagccgtggtggtaggaagaagccgctgccaggcagtccaagagggttcaggggccctcagcgcgaccccggaacctggtccccgagaatggggaagactttggagcctgcggctctccaggtggggctgggcgggcccgtgggatgatgctcaggtggggcagccccctggggtgacagcgtctcggccgtacttgtctagggccgcctaggagccgcgtctgggctccccgccacgagggccagtgagcacactggaaggcagcggcggcaccaggccaccttttctagtcccgagtccagccgggtctggaagtggagagctgggacgcaggaggccgggcgtcccagctccccacttcttggactctcctagcccccatagtcgctacttacggctatcgcaggtcctggggcgccgtcggggccaggaccgggatggcccccacggcgccggcagcgctctcggcacccgcggccacgtcccagcgatgggctggggtggttgcggcccggaggaaggtggggcgggacaagaagagagtgttccgccccccaggccgggctgctagccgcgggggtctgtcctagtgccccaggagccggccgggatccggctgctgtccgggagctctggagagctgagccaactcccgcttcctggcacgggctgagtcacccggacgggacgcgcccgcgcctgggcctggcggctgctgcattcttacctgcttacctgggcgcgcacgctgggcctcacccacctccgaaggcaatcctcaccgtctctctccgtttcctcccgcgtatagggccccctcccgaaccccagacctcagtgctgcacccctccccctgctttctcgtctcaatccagggcccctaaactctgcatcagctcagtcccggagccttactattccaagtcgcctgcttgatctcaaaagtcctctgaatctggcccagtactaatgtctgttttgttggaaatgtaaattatgctttaaatttaatcacgcatgctggttatacaggtgtgctcattttgtaaggatgcagcaagctgaacatttatgatgcaggcacttgtttgtatgactattatacttgaataaaaagtttttaaaaatcaacacattaaaatcaacattccagttcagagcatgataggatatgatggccaggctggaggcctggcatgggagcccagttt

SEQ ID NO: 585454 - DNA, 4001 bp, Homo sapiens
cgtgcggacgcaggagcaaggctgcgtggcaggaggcagagtttggacacgtatcccggtgggtgcgtgccgtgtttgcgttttctggggatggtggctgaatgtatctgtgtgtgcgcgcaggaaggaaggtggggttggggtttgtagccaagaaccggggacaggaagaactggttcagggaaggtccgaaaagggatgccggggtcgaaggcgccagggccaggggatgccggcatcctgatcagggtgtcaagccctgagtagaagaagcgaagccgcagcaacagcggggaaggcgagcccgccgcccggccttggtgctgacagccggctcgcccgcaagccgcgcggcaactccggctcatgcatcgcttggcttccactccggaggccgagccaggacgaggtttcggtgcaagtcgctgcaccagtcctagactgggtctgtccgggtctcccgagccgaccgggtgctctcaagggttcctaatcattcccacctctagcagggtgtgggaaagtgggtgcctcctcctgacatcccggcttcccaccagaccctacgaccggcccctgtgttccgaagcagctagctcggtctccacgcgccctggagagggcggggacgcgggcatccactccagagtccgagtcgaggtctccaccaaaccccggcagcgcgcactttgcgcctcttgcaaagtttccgcgcgaggttaagccaaggtggagcgggacgcgggctcttaccgtagactccttgtccccggcagtggaaggggatcagcgccagaagtagaaggcaggtcacctccatcttcacggccggtgcttcatccccgcgaggcggcgcagcccgagaggcggcggggggcgcattcgccggggccccgcgacgcccctatgtccccccctttccctgagaggtgagagagagagcggcgacgaagaccaggagactgaagaggcggaggtggcggcgacccgtgtttctcctccggcggggccgctgcccgcgtggggacgcagggggcgctggcccagccccgggtgcctcggcgcgcccggcacagcagccagcgccccgacccgaggagcccggccgccgagccgccccgggtacccagggccgtccgcgcgggatgctaggcgccggggacctctcggcggcggaggcggcgcttcgatccaacaggccacggacgactgacaaacttgtcgtttccccgcactggggccgcccctcagcggagcggagtcggggaggccggggctccgctcgagttaatcaatctgctgtttccagtcctgcggccgctgccgtgggctcagcggcccgactccagggggccgggctgaaagcactcgcggcggcgaagcagccccgggcccggccctcctgatccggggagcagcgcgggctgggttcggccgagggacgagcgccgcgggtccccgggtccgtgaagttagccgagccgccgataaacccgggggaagaatagcagcccggcgccccgcgggaatctggagagcaattccaggcaagaagggccccagaaaacggggaaaggaggaaagtttgagtcttttgaaaaatattcgcgctctcgcccaggccggggctgcggcgcgggcgccgctcgccgcctccgctcgccgcgctcctctcccgccgtctggccgcggccgtagccctcccgggctccgagctctcgggagagcggggctacgccgcgccccaagttggtcgtccccgcccccgcccggcggccttggcctgcgggggcccagagcgggcggggccgggccgggctccggggcgcggcggccgctcggctccgggccgcgggagcgctccgctcgctcagcaacttgggctttgctgtgctgctttttcgcccctccgagcttttcattccgcgctcctcccgcctccctccctctcttcctcctccctcctcctcgcgtctcctcgttcggtctctcgctctcccacccgttgtcgctcgctctcctgtttgattcccctccagttaaaaaaaggagccaattaaaggcagcccagctcgcctggcccagcctctgtccaatttcctcgcctcccccaggaccaattagagaaaacaaaacagggctgggggaagctgactgcctgcctttctctttctctttctctttctctttctctctctctctctctctctctctctctctctctctctctctctctctctttctctctctctcctctctctctcttctctctctcctctctctctccctctcgctctctctcccttcctctcctctcctctctttccctttctcctctccctctctctctcttcctctctccgccccctaacattcccccccaaccccgcccagcaggaaaatgtcagaaagcagaaatggatccatctatcccgaggacagtggcggagggacctgggtttcggcgggggctctgcagccgcgcgctcgcacactcgctgttctccagccttgcacacccagactagctggccgagccgggtgcaccgttgccagcagcccgcggggcaaacacggccgctcgcttcggagacccatgcccgcagggcactgcacacttcgtaaatgttttgcactttggggaggcgggactgaagcgggggtcctagggaaaggccgggcgcctgcggttcctggggtcctgcagccgcgcgagacgggccgcggctgtgggtctgcaaggctgtctgcccggctcgagaggcccccgcccctttccaggcgtctggtgctggggccgggccggagcagctggcggagaggtcgcgctgagagctcctgcccttgccgcggcccacaggttgccaacaggtttgctcgcacgacccctccgccagagcttccctaagtcaccccacattttcctcggctagccactcttcccatcttgcctcccctcgggacctcaggcgcccccaagcgccccgggggcacacctccttccggctgccgaacccgagccccgctccagcggcgggagtccggcactcgggtctcagccgcctcgaaggggccctcgcggagcaggagtgcggagaacgctcctcccaaacgcccgcggggaggggcgtaggctggcaagcgaggctggtggcctcccccgcgcctccgatcccgccccgcgcccaacccgggtcctgctaatctcacctgctccacctgtcgccgttatttatctcagcgtgtgcgcaagaattgttttaggtcggcccgtgggagcgcagacaatcgcagcagctaacaagcggggagactacgaaccccccctcccttcgccccctggaactgctcaatatcttgatggtggttccacggctctatgcatttgtcaaaactcaaagatctccacactccaaaaaggttagtctgcatataaattgaaacataaatttttttaaaataataataatgaaccgtcccttccccaggcccatttcctgctgggtctctcctcccttgactctccagggcttaagccccaccggagcgcgcgctcctgactgctggaagaggagcgggaggtgtcgggaagtgcctggtggcatgggggggttccaccttcctttctcagccccctttctgtccatctcaggaagcccgagaacatccgaagattcctattctctagcccacctccactcgtttgcgcctcccttgtgccctcttccgtcttttctctcctttctaccccgtgggtccaaggctgataggaagtccagactcagtgcggtgctcccagcagatgccagctgcagacatgttcagtgaattcacgaatgatgcccatcatggccagatatcacagacctgggataccctcagggtagccatcctttcactccccagccccggactgttacctcaaaggcaaaaaattcattttctgtcccacagagatacacagccaccatgcctcttcccgcctcccccatccagtcag

SEQ ID NO: 585455 - DNA, 4001 bp, Homo sapiens
agggtttctttcttaattttgcaccactgccatttacgacggataactgttgtaaggggttgtcccatacataacagaatgcttagcagcgtccctggccttgatgcactagatgctagtagcacccccataatgaatagttgtgataaccataaaggtctccagatttgtccctgggagcaaaattggccccactccccagaacaattgggcttgagatacatcaaaaaaaatacttcagggcagggcgctgtggctcatgcctgtaatcccagcactttaggaggccaaggcgggtggatcacctgagatcaggggtttgagaccagcctgacccacacagtgaaaccctgtctctactaaaaatacaaaatattagccaggcatggtggcgcacgcctgtaatcccagttactcgggaggttgagacagaagaatcgcttgaactcgagaggcggaggttgcagtgagctgagagggtgggccattgcactccagtctggacgacagagcgtgcctccgtctcaaaaaaaaaaaaaaaaaaaaaaaaaaatttaggccggacacggtggctcactcctacaatccctgcactttgggaggccaaggcgggatgatcacttgagcccaggggttccagaccagtcggggcaacaaagggggaccttacaactacaaaaaaaaaattttttttttaattagccacacctgggacccaagtacctgggaccacactcacctgtcccgtggctcacgcctgtaatcccagcactttgggaggctgaggcgggtggatcacgaggtcaagagatcgagaccatcctggccaacatggtgaaaccccgtctctactaaaaatacaaaaagtagctaggcatggtggcgctcgcctgtaatcccagctactgagagggtgaggcaggagaatcgcctgaacccgggaggcggagggtgcagtaagccgagatcgcgccactgcactccagcctggcgacacagcgagactccgtctcaaaaaaaaaaaaaaagtgtcttcaactcagatagaaggagtcaatgagaaggttcttaaaagcccgaagacctatttcccagaaaactctaattaaccttataatttgtatagttagttacagtgagtatgagctgtcttgctctgtacttcagctgttgtaagtgtttacgaactgtctccaaaaacagatgcaaatttccctcatggcagagatcgtaacgaatttatctatccactttctcacagcgccacaccgttccttacgcacagcaggaatgcaatcagtatttgtcgatggttccccaaactaacaggagtggctgcactacgcacacttaggtgatacgtacacttgtcaaaacggcagaaacgcaacctcaatttcagaaaaacaaaccacattcctttgggaaggccacctctgccacaagcagccaaagcgcttgcataggggtgagaggcgatgggaagggtactggaaggctcccccagataaaaacaaaagactccttccaatcgcctcaaacacgctcggaaacctccacgacctgcgccagcccacaggagggggccagcttgacctgaggctgcaccactccccacttaaagcggcgagtatcggcgggggagcgcaggaagcttactagtggggcgacccagtcgttccggcgctttccctctcccttcacgtcttacctgcttggccaagaacctgcccaactcactgcggctcttctcgttcttggctgcgattaaccgcagcggcgcggctgccacctccagcaagaagtgctccatgacccagggccctcaccccgagcggccacctgcgctccctacttcgcggccagcgtccccaagccgccgaggtcccagtgcccgagcagccagcaactacgcccgcaggaaaggcgtcctcagctccagcgcctacaccgggagaggggcaccacacgtgggtgagcacacggcgtttgacgtcatcagctcgggacggctacgctgcgccctcccggcctcagcccctcagcggcggaaacgccagtcttcgctgtcccgccttttccgggagggaaatggaaacaaaaatctagtcggtttggatgcaggagtgatggggactcgcgaacacagcacgtggtgggacagaaagaagagtgcgttaggccggggaggaaagagggggcgtgtgagtctcagcccaccgtgccttgcttctgccttaacacacggaaagatcagatgtgagagaaaagctgattctcggccgggcgcggtggcgcatgtctttatcccagcattttgggaggccgaggagggcagatcacttgaggttagcagttcgagaccagcctgggcaacatggtgaaacccccttctctactaaaaatacaaaaattagccgggcgtggtggcgcgcgcctgtagtcccagctactcgggaggctgaggcaggagaatcgcttgaacccgggagacggaggttacagtaagccgagatcgtgcagctgcactccagccgcgcgacacagcagacttttactgtctcaaaaaaagaaagaaaagctgattctccccttcttgttagcggtggcagttaccccctgtataggtaggggtcagcagtaaccttagttcttgcctcctcagaagaaataattccacgaagggcataaggcaggatagacctagacaagtttcagaatagaagtaaaagtttatcaaaaagctttagaacgggacggaaagaaaaggaggaaagtacaacttggaagactgccaagcaggcgacttgagaaaccaagtgcgcagcttgacctgttgacttgaagttttatatgttggcatactttggggaacttgcattgcttctccccactcctgagatcttactgggaagctactgatcagtttcaggtgttttctattaggagactgcctttcgctggccccggtgaacgttagagaaacagttaagaaccgcctgaccatcgtttgattgtcacccaatagtcctggtatgtgtggggtggggagcgctctcctgttctgctcatacctaactagttaacattctgccccagcaattccccttgtaggactctagcctgcggaaatcctcactaagtgtgacaaagacaccccttgcagttttcttaatacagatattggaagaaaatgttcaattgggaatattaaactatggggtgtaagttatagcatattctggaagtcataaaaaatagtagagtccataacattaaaagtgcacttgtgggctgggcgcagtggctcaaggcaaggcaggcagatcacgagataaggagttggagaccagtctggccaacatggtgaaaccctgtctctactaaaaatacaaaaattagggctgggtgccttggctcacgcctgtaatcccagcactttgggaggccgaggcgggcagatcacctgaggtcagcagtttgagaccagcctgaccaacatggtaaaaccctgtctctactaaaaatacaaaaattagccaggtgtggtggtgcatgcctgtaatcccagctactcaggaggctgaagcaggagaatcgcttgaactcaggagacggaggttgtggtgagccgagatcgtgggattgcactccagcctaggcaacaagagcgaaactccgtcttttttttttttttttaagtggggccaggcgtggtggctcacgcctgtaatcccagcactttgggaggccaaggcgggcagatcacccgaggtcgggagtttgagaccagtctggccaacatggtgaaaccttgtctctactaaaaatacaaaaagctgggcatagtggtgggcgcctgtaatcccacctactcaggaggctgaggcaggagaatagctcgagcccgggaggcggaggttgcagtgagcggacatcgtgccagtgcactccagcctgggcgacaagagcgaaactctgtctcaaaaaaaagaaaaaga

SEQ ID NO: 585456 - DNA, 4001 bp, Homo sapiens
gccactgcactccaacctgggcgacagagcgcgactccgtctcaaataataataataataataataaattcttgatgtaagcatagtaaaggcaataattactcttgctcagggattgctcatgccatctacatactcttaatagacactcttgcccccaacttgaggaaaatcaaacaggttatacaactcatgtggtccttcttaagtgtcaacccacaacttggtcataaattacagtaggcaggtgacacatacaagtcacaaatagttttgtcacatcaaattttacttttgttctactgaaaataggtggcaaacctgcagaataataaaagaaaagaaaaaacaatcaaactagcaattaaatttattttaaagaaagaaataagttggaattatttacaatttaataatgctacatgacggcagatagcacacagtcatagatttgtaaaaggtgcctgtcaccacacacacaaaaaaaatcactcacactgactataacttgttaaataaatcatgtctttaagtcattaatatgatcaacaaatcatcaggaacacgacaaggaaaaagctgagcttctgttcttaatgtgaaatgcagtccaccaaagagacaaccaaaataactaaacaaacctctgtgctgactgatggcattttcagactcctgaataaataggaaatgtccaaagcgcacgcacacacacacacaaaaggaacaatcccgagacaaacctggctgtaaaataagtgtggaagcaaaatgataaattcggaggtattttttatttgagagacatcccgagtgcttatattgcatcaccagtgaaggaaaatgaaatgttaccaggatccgaaaaggagtctctgaacagggtgtacactgaattcccctttaataaaaagagagcagctctaaacaaaatttttttttaacttccagaaagccaaattaaaaacaaaacaaaacaaaacaaaacaaaagaaagaaagaaaagaaatggctttacccacagtcccatgtctgggacagagttcttctaccaagccatgcaaagtgtccaagacagaggccacccaccacgcattcccagactcttaaccgtgtcactccagaaaccgagaggacttggatttccagattgctaacgtgatctgaaggcactcagtacacgtttctgtctgggcaggaccagttgagccacttctcgccttatcaacttccaataattgccacactgtgtgtgcaaccagtaagtgagtggcacatggagtctgacctggcactccattcacacactttgtctgatactactttcattgtctgggctcttgtttttggagaagagctgccgaaaagtatcaccttttcctctatcactaacctttacctttacctctatccctaacatgggatgccgaggtgcagaggcaccagcactgccctgccatcactctagtggatacggacccgattaggcgtccttcttccttctgcccacaccaaggccccccaggccgcggccgctcaccgggaaccttcccaggggagcggcggaggggcgaggccatggtgcggggacctgcaagagggccctgaccctgatagagaggggccgatgggcggccaggtgggcctgcgggtttaccttgttgaggtgagggttccgtgtcagcaggtagccgcgctgatgggtgtggcggcgacggggggcttcgggctccatggctggcgccgggttcggcggcggggtcaggccggggcgggccgcacgcgcggtgcaggcggcggatgctgctggggtgacggtgctgactgcagctgtggcggcggcggccgcactgggaaaggcccagcggctgggggcgggcgtgggtggcgagagggggtggacgcgtcgggaggggcccgagcgaagccggtgtccccagcagggcagcctgcgagaagcgctgagtcatggcaggagatcatccgagccggcgtgtgaggaggaggaggaagagcgagtcctggcagcgctgctggtggcggagcgggggtggcggccggagcccttggctccatagggcctctgcccaccatgggcttatgatcaccgctgtggtcgcctctctccatgtgggcatgcctaaacgcagtgcactgggtggctctgctgaccccagagacccagggcgggggcagggagcggggagcgtcaggccaggatccccctgcccgggaaggctggagaaagtgcgagaagatgccagaaggtgcgaacctgagcggttcaggcagagccggcggtcgctcagacacctagggggattacaggacggaaggactcgtgaggggtccccagaactgttgacagaacacctcgacaggctgaggagaatcagactcgtctctcctgtcttgttagcgtcttggaagccctctttctacagatccacaaccttcgccgtgccatccaggatgccggccatgcccggggccctgaggccggagggaaccaaccttgacccagaatgccgaggcccaagggaactgggaggaagcccagagaggagagctcaggcgccacacctgtcagtttctacagattttccaccggaattgtatttgaatgtcaataagataagagtcaaggtgttagggtgcaaaggcccaatgaacagtcctgtttatcttgtatattatttctctgggagttctagaaacctgatgttcaagaaccactgctctctctgaataatgatgagtaagcagtctttcaggccttcctcccaacctcaggtgatccgcccgcctccgccttccaaagtgctgggattataggtgtgagccaccgcgccgggccatttttttattgttttattgatatttatgcttggaggttcatggactggaggaatagtcagatcatagccaaaaggagtgcctgtctgataaaaataaattaatagcaacagacactaaagccttctgtgccccagtttccttttcagttaaataggattgctagtttctgtcccatttgtctctgcatactgatattacaaaggatagtgtttgagattatttgctgattttatatctccatatactagacacacatccaatcacagtgttttcatttctagttatgttaactttgccttatcagaaagatttcttacagtaattgtattttgtccgtatttacatttagaagcttctttgacctcgcctgaattatctagaattcgttgtttttatagagaatattttctaggcatcacaaagttctttttgaaaaaaatccttgaagttaaatgacacctttcattgttaattctatactccataaatactcaatcctacaacatctaagaaaaaggtgtactttacacaactcactctcctgaattaactgagacacattacagttagggtgttttatgtgagaggaaacagtttaacagctggcatgggagccaattcaagctgcttaagaagaaacaaaaatgttagtacaacagacccttattataataaagtacttattacatgaatttagatatactacctacctgttcctgtttctgagatttaatatctacagataggaaaagtgttataagtacagggagtaacccacaaagagtatatggcctctccctcaaaggcaacattacaaggggattacaatatcctgccagtagtaggtaaagttcacatctttcatctgtatgtttattttaattattaaaataaccgccgtcatcttgaatgaaacaggataaggcctagctgaagaagccatttagtacattcatatgtagttccaagaatactagaaagaacctatttttctacataaatgttagctagaatatcaaaattttcagtcttttttaaataataatctcataaggttaggttttatttccaaaaacgtaggaaaacagatgcagagaaaaaaactgctttaatttgccttgtaacaaactgtggttgcactg

SEQ ID NO: 585457 - DNA, 4001 bp, Homo sapiens
ctgtggacaataactgatgaatatagggcccagatggaccaagtggggccggggagggatgaataaacaccctaccccgtgccctgtctttggtgagcagcagccctggggtcacagacatggaagggaccaccctggggctgactgcttttctgtgctgttggttcccaaaactagaaagaaggaagcagggagcggtgccccaagcatggctcctgccaacacctatttatttccttgtttgtgctatgctgggcaggccttctcttgtcccttataggtaccttggaggggccaggggctgaggaaggccggacccaggttccaggggcgcaggcagtgcggcttttggctgtgtacatagggtgctttattctccacagagtgatacatgctaaggtgggttgggcttggaccgatgtccccatatgtacagaactgaataaagtgggtctctgagaagtctgatgtgccttgatgtggaaagggagacggggaagatggaaatggacattacaaccagggatgtgttcagtcctgtgctggttctggcctggaatgtaggaatataaggcagctctcactgtggtcacttccaggcaggggatgcctgccgggcttggagggctttctgtaccacatcttcccactgggcatccgatatctcccgagcccaggcaggaacccctggcgcaggcaggcttactccagccattgtccttttcaccagctctacatgttctgaaatcagagccagaggccattcaggcatagaaataatgggaccagctcccctccccaatccccgaatcaacccagagcccttgggctgctagggtcaccaaatccaccttgttactttaaggcaagcctgcccatccccaaagctagcaaaagagcatttcacttggactctgaagtctacaaaatcttagtttacaaactatctttttaggatagggtcttcctctgaaacttccttctactgactcatgccagttcatttccttagtaattattccagaatgaaagaatgatcttttacctgggtccatgggaatagagctgtggttgttcaacgctgtagctccctcctcatcttcatcttcactctctaatggtgggtctggcaaatgaagccccagggcctgcagagccacagaagaccgtttgggtctaggctttcagggagcccagcttcacctgttcaggaaccatccctcctccaccctacctggattcgatcctggatgtcagcaactacatctccatcccccactggtgccagttccacctcctcttgttcaggatcttggttcaggggctggtaggagtagccagctgggcccgaccccgtttcctcctgctcttcctcaggctcctcactgctccaatccccagtgccttctgaagggccctgatgtcccagttcctcagtctgattggggaagatacgctcagggcccatggtgtctcctcctagaactactgttgccatccgggcaggggctgcaagaacagggaggcggtaggacagggatcggatgaaaccaggcccatcttcatcctctcatcatctccttgtagtctcctgcgtgcaaaaaaccagctcctccccgaggctcctgcatcctccacccctccgccccaattccagcctctcgttcctccccctcctaagtcggggttcttatcttgaaccaggccccaccaacttgctccgccacttcctagttaaacgcccaaccggaggccctgccacctcctaaaagacaccccttccagaaccccggctccccgcgccacgcctcccccgcgacttgggaactctgggtcatcagactcccctaaacaggtcggcgtacccgcccccttctcccctctcctagaggaccccctctgtaccgcctgacagatgcctttcaggccccatgggctcccctcaaatggccccagctgcagcgtcccccacccgcccccatccgaatcccggcgccggtgttcccgcgcgcctcacccgctcagagcccgcggcctccacttccggcggggcaggacgtgcagaggtgcctagtcctccagccccgccccatatccatgattgacgctggcgaggacgaggagtccgccccttgccccgcctccgtcattcccagcccaaaaaacaaaggactgcattacccagtggcctcctcggtctcgacacatatttgcacatgcgcagaatctctcctacgcccctgcccactcctcagccctctcgtccctcaggaaacgtatggactacaagtcccgaaatgcctccggcacttagctacgactgcacgtgcgcgcacagctgcccgccggaagaaccgagcttggctgtgtttatctcgttggggactaaggcgtcggttggcgcgcaacgggttctaggctgcaggcagctcgaggacccgcggccccgccccggctcggcctggcaggtagcctgggatgggtagaagggcaagggagaattagggggcttaggacgtgctgtctggagctggagtggcgggggaggggcctgagagtgatgaggtgggggtggggagggagctagggggatgatgggaaaggagagtgttaatggggaaagcagggctaggggaggatggcgaggagatgggtaggagagacctggtgtctggaggaagcaatgaaggaaatgggaaggaagactgggccatgaaaacagggaagctgagcataatggaaggggaggggtgtctggcgtggtgggctaggggaggccggaatgtctggaagaagacagggatagagtcatatgcagagaggggtatcgtggtcagtgcatgctaatttttctttccttagtggaggtgggaaaatggagggctgttgggtggagcttggaatggtaggagaaggaaaaatgagaaaactgcaaagctctcacgagatcaagaagggcgagaaatggggaataaaaaatgcaagagaccaggcgggtagatacattaagggaatagaagaagtttgaaaatgcttggtggtgatggaggactggggagacccagggataagaggagcccctgagcgcctgggggcttgttctccttgaatttgagttgtttatatggcagagaaactaaaattttttttctccacctttggctggaattgcttatctcctctcctgtgcatattttactttaccttgacatatctgaagggaagaatagagaatataagggaggatggaagacttccattcttaagcccatcgacctcctaacagtctccacaagcccagacccaagatattttggagagcgggagtaatgaagtgagagtagcttcctgctggggctatttcaggatgggtcccatggctatttaaagcttagggtgtggagttgggggaggttgggtgggtgggactagcaagccagctgaaagccatgtctctttcctgcaaggggcctcccttatttgagctgttttagtgcctgaggttttgcctggccctttcctctgccagggcttcttaaacagggagcagatgatgatacacccaaactcaggagatgcttgccagcaaaagcattgtcagttgcaaggatttgcctgaaaaaacctcagatgtacccaggtgtacgtgccactaggttgacaggttgtgtttaagagaccatgaccagctgggcatggtggctcacgcctgtaatcccagcacttcaggagaccgaggacggtggatcacctgaggtcaggagtttgagaccagcctggccaacatagtgagaccccatctctactaaaaatacaaaaattagctgggcatggtggcaggcgcctgtaatcccagctacttgggaggctgaggcaggagaatcgcttgaacccgggagggaggcagagtttgcagtgagctgagattgcaccattgcgctccagcctgggggcaagagcgagacttcatctaaaaaaaaaaaaaaaaaaaaagaccatga

SEQ ID NO: 585458 - DNA, 4001 bp, Homo sapiens
aaaaaaaaaaaaagaggaaacttaagtacagcacaaagaggttaaataacttgcactaggtcacacagttaatgggtggtacactcaagactcaaagcccagcaacctggcttgatgtccatgctcttaaccactaactagactgcctgtataaggatgtagtgcctgttaaaacattaaggaaaatcgattaaaaaattaataaacaatagtacaagcagtacttagctatatagaaatcaagaaaacagtcatagatgacattgctttatgatcaactaaatgaatctattaaggtagagtccttctgttgctaaaaattgtcactactctatcagaaaaaaacactgataaacgatgttgctaatgtgccttattttgaaatacaaaagaatccctaaactgacgctacaagtgacagaagtcctaggattctgaaaacgttgataagggggccaacagagagccctttccctggagctgccttctccatttaaagagcaggggtggctgggcacggtggctcatgtctataatgccaatactttgggagaccaaagcaggaggctcgcttgagttcaggaattcaagacctgcatgtacaaaacagcaagaccccatttctatttctttaaaaaaaagaaagagcaagggttccagggttctacgctgcatcctttccatttccattcctcacatatcttgcttccattaaggaacacaggaggatcgtgtcaatcgtaggaagcaagagtgcaatcactgagaaacctgcaagaacctgggctaccaggaggaaaagtatttcccctacacatgcttttgtatgagaagcctatatccactggcttcaaatatcctggcctccggatttctcccacgggaaaaatgctcacatctactgagataagaaaaaaatgttctgggacctggcaccttacaactaacgcctccacgagcactggacccatacctttccctgccacctcatcttctttcaactgagacttaaaacatatgaaagataaaaactccattgaaactagaccaaccatggaattaaacatagtgggaaacgggtcctaaagagataaagtgcctggaaccatgatctccttattatcaatacccttttttcctctagacccaagatcttaaaatgagcaaattagaaacagacacaagcgggtctaactgtatttgatggctgagggaagagcaggcgaaaatcttaaaaaatactatctcctgattgcttatggcccactccctccaaccctgtctgcaggtgggtcatagtccaaagaccctatttccaaccctgaggtcccactgcaggcagtactatggcctcacgggaaggaagatgtatccagaagagaatgaggtatacaaccattgataggttcctgggataaaaagtttgctttgtcgacaccagcgtggccaatatggtgaaaccccatttctactaaaaatacaaaaagtaaccgggcgtggtggcgggcgcctgtagtcccagctactcgggactacaggagaatcgcttgaacccaagaggcggagtgttgcagtgagccaagatcgctccactgcactccagtctggcgacagagcgagaccccgtcttaaaaaaaacaaaacaaaacaaaaaaaaaacctttgctttcccgccttccaagaggaaggggcgcatctctgaggaaacaagcccggggaacccgcagcccggacggcatcctctcatctacacaacccgaggacatctccctcagctcccagaggacggcggaccatggtcaaggtcctctttccggcctttcacaactccaagccccgccccacaaaaccccctgcagtcctaccaagtcactcccatggcgtcgggccaggaaggtggcagaatcacacagtagaaacgcagggttccctgtccgcccacagaaactccttcagttccccaacacaaccttctgtctcagaagggactccggaaatacgtaaaaacagagcgccgggtccacgccttccccaaggaatggggcgtgtctcggcacccctcggtgacgcctccactgacatcatctgcggattcccgccccgaggtttctaaatccagacattcccgtttggctgagcactctaggcctacatccatgaagctaggagagcgacactcaaagactgcactattgagagaagctaacgttaaaggcagtgaatatattcgggagtccagctccggaacccgggagctcttttagtgggaggggcggcgctgatggcgcttctggcctccgaatgctagggggcgctgtgatcgccgggcggcctcttgggcgctgggagtccaccgcgcaagcgcatcctggcctttcttcagtccccacgtgcgatccttcccggcaactttttcgagaaaaatgcccaaattcaaggcggcccgtggggtggggggtcaggaaaaacatgcgcccctggccgatcagatcctggctgggaatgcggtgcgggcgggggtccgggagaagcggcggggtcgcgggacaggagaagcggaggaagagtatgtggggccccggctgagccgacggattttgcagcaagcacggcagcaacaggaggaactcgaggccgagcatgggactggggacaagcccgcggcgccgcgggaacgcaccacgcggctgggtgagtgtctgggatgaggtccgaggaagacagtggccagtagtggggcggggtgggcagctaaaaagtgtctggcaggggaattgcttcgagtcaacaaaggggtccgtattacacttgcaaaggagactgaaccctgtctagagccctccgcgtccactcctagttttaggcactcccttctagacacccccgaagttaggccaacagtaatcgatcgcgccactaagtgctcctagcatgtatccattggttttgtaaatatttatgggatacccactacgagctttgcgctatgctcggaattctatcgaatgtttgggtacagaagtaaacaacacaggcacgtctaacttaaggaccttacagtcaagcccagcagagaggcaattaagtagactcttagaataatatatttccatgataaagtatcgtttccctggtaacaatagcattggtcttgagaagcttctccgattgcagcaggacctttaagctgagaactgaaaaacgaatgggaagtgttatgagcagaaaacacattgtttagcagccaaagagcgagagagatgaattgaaagacgtctgatgttttctcactagggagggagtgttgacctctgaggtgcttcatccgtttctcagatctcatctaaagcaatatttgacacaattgaatagtggccttctggccacagtatccttacttgggttctaagacatcaacactcctgttttactgccacctcacttctcagtatccttggctgactcttattgcaacctcttctcctcagtcctctgacctcttcaaatattctctggtgctggcaagtttcatggtttaaataccatccttgagtgactactcctaactttatagtctagccctgatctcttccatgaaatccagattcttatattcaactgcctatttggcatctccaatttgaaatctaacagacagctcaaatttaacatgtacaaaacagaaatcctgaccttccctccaaacctgcttctctcaccattgccttccctgtctcagttagtagcatattctttcatttgctcgagataaactttagactcctctctctccctgcccccaccatctcctctctctgtctctccctccccacatctgatctgtaaggaaattctgatgactttgccttcaaagtgtatccaaaatgagaccacttttcaccgctttggaacaccatcctgtcgtagccaccacagtctctcacctggattatcacagtagcctcctcgttagtatctcatattctccgttttttcttttt

SEQ ID NO: 585459 - DNA, 4001 bp, Homo sapiens
aggcttttgactcagcaatactatttctaggaatttatcctatttttcatgcataatattattcatcacagcattggttaaattagaaaaagtaagaagaaacttagaagacagtagaagattggttaaaaggaggaaggtacagccatacaatggaatattatgctgctatttaaaaaaaaaagtaagaaaggaaggaacaagtaacgcttggactgatagggaattacctgtagattattattaggagaaaaaaagtgctaattaatgaacagtgtacatggtatatgatcatgctataaaagtgtttctatatgcataaaatacttctagaagaaaacataacctgaggatattggctacagacagaaaaaataacaggtaagagaagagaaagagactagttattggatccacccttttatacctgtgcattttgaaccatataaatgtattacctattagaaaacaactaaacaaaaaggttaaaacatgactgtattggcattatatgatccatgtctgagtggcaaatcttatcaccagtggctgacacgcaaacagttctcatttccctacctatagtgtaccatgagaaggtaaggcactactgcaatgtgagctcttcgaggatgacacatttttgtctttttcacggatacattttctggtagctgttctttgttacttttacagtttgtctcctcatttttactataatattttcctatccttattatagaatcttggtattcctattgtagcatctttgtatcaatgctgtgccaattcctttatttagcagaaaaatggaatttgtatccttgacaagtaaagcttaacatatctgttttcaagtgtaccaaataaatccgaataggatgaaaatgatctcaattaatctaacataggggaggtttttttttttaaacatctcacactgtgcagtatcaacttgacttctcaacacaggttttccactgaaatatacaaattaaaacaaatggaagccagaataaaaaatgataacaattttatttctcccttctcaggaagatcttaagagcagcatgaaagtaaatgttaaaagaaaaaaaaaaaaaaaaagaagaggccaaaaatcatcagctgaatgtattaaaaatgaagcgctcacctgagaaagaccaccccaaaactgtctgaaggcccccaaacagctaattagttttgttttctcatcttcaggagtatccataaacatgctaaaaaaataaaaattacattatttgtcattcgttttaaaaaggtaattacacacaatcagaatagtggatcttataaccttccaacacgaaactaagtaaaatctgacagacacaatcacataaaaacacaaaactctgccacgcatacactcacccaggaaaagcctcttctataacttccgttttctgtaaaaaaaaaaaaaacaaaatgtaaacaatgttaattttaaaaaggcgcctcccttagccaagtattacaatgtaacacagggcaagtcaccttaatcagctctgaaactatcaatacctgtctggcctgtcactgtatcgatttcaaaggatacaatgaacttgacagcagtttgagaatcactaaacttccccgcatacaacctcggtgtcaaaacaagggaataaaaagggaggcgtgagaggaggttgcccaggccagtttccttggtcggctgcccccgcgtctccccgtccccaagccgtagtcctggatggccggcagctgcactcaccaccacctcttcgaaaatgctctgcagttgcgtctccatctgtactatcacccccgcctttccagggtgcccggcaaggcccggatcagactcgagctctgggaatataggggcagaggggcggagacctctggaggaaaccgtagctcctcggcgtcgcttcctcccccagcgctttacctggagcgttccctcccgagcccagccaacagcaggaacctgtacggaagacgggaagggcccggtacgcgccgtttgcaaaccccgcagaaaccagcggcgccaccagaaggttccgtctgtggagaagggcggcccgcaagccggacgagagcgcccccaaacggaaccttgagcccaaggaccccggaggcatcgtcgaccgcaggccgccacctcccggctggagaaggagttgcttcctgttcggggctaacccgcttgcagactgagaaatgaaaagtttggaacccagaagctgcagcctgcggaaaatgctggagccgcagccgacaccaagttgatgtctgtgagcagctgaccttctggacctccatcagcggcctgcagccaggagctgaagccacagagacggtgtcttctcagctatgataacctcagtgcaaatgtaattgattgacttttgaatgccaaaccaattttgcttctatggtataaatgctacttggtcataatatattatcctttttaatatattgctagattctatttgctattatattgttgagagtatgtgtttttcttcatatgccaccatcatcaccaacccctaaaacatctgttatgtcttgaatgatcagctttctttgcctcataaagaaaattgttgatgagagtcatagacatccaaaggcctttcacttctttgacggttgtgaaatgccacaaactgctaagcatgaactactcctttgtagctgctaagtgatgagctgatgactccccattcatggttttgttatacaagtgtctgacctggcataaatttagttttctaacaactttaatatgcacatgcaaccatgttgtccacacaatagctactaaaagctgaaaagaaataattcagatttcctgctggagaaaaacttgaaaagttaggcttagggtattgtttgctagggttgccataacaaaataccacagactgggtggcttaaacaacagaaatttcttttcttgtaattctggaggctggaagtctgaggttgaggttgatagggttagtttctatagaggcctctgtccttggcttgtagatgaccttcttctccttgtgtcttcacatggtcttccctttgtacatgtctgtgtcgtaattttctcttcctagaaggacatcagtcaggttagggcccatgtatctactctaaagagctttagcttagttgaagacatagacattttaaaccataatagagtgtgatatgtgcaatactagtgatgctaataaagtgccagggagaaaaggaggaaatacaaatttttctacagaaaggaatttagaaagatacctaggggagtttgcttagattgctgtgaacagcatactataaactggggggtaatttgagtctgagcaaactgaaagctgagaattcaggcttcttgttccatccttgtcctatcaggatttagagtgggggactaaagagccaactggaaactctgagcagctgggcagggcttatcaactttgagcatctttatagtgtgttctggggacattgtttcttggagaatccccaaagttggtatcatcaggtctttccccttaggctggtctgaatcaccaaggaagatacatctaatctcttacaagtgggtaaagttctgactggctgccaaccttcttgcagccaaaaggaacaagaagcctgatctcttacaagtgggtaaagttctgactggctgccaaccttcttgcagccaaaaggaacaagaagcctgagttctcagcgttcagtttgctgagactcgaatcaccccagtttatagtatgctattcacagcagtctgagcaaactcacgtagatatctttctaaatccctttctgtagaaaaatttgtatttcttcctctttcctcctggcactttattagcactactagtattgcacagattacactatattatggtttaaaatgtctacttcttcaactagactaaagctctttagagtagatacagaaattaaacatgcctgca

SEQ ID NO: 585460 - DNA, 4001 bp, Homo sapiens
ttaaccactctctgaaaccattcataaatgtctaaagtgtctactctgaatttattcctacatgtctgtccttttatttctcactatcacagatctaattcaactcactattccttatgtaggctttagtcaaagctttaaaaattggtatccctgcctcaaatcacctctatagccaaaacatcctctatgttcctctttcattgaacaggtatttgctgatcaccttctgtgtgtcaggctttgagctgggcaacaagtaaagagacctgagaaaatcaaaggtctctcctcagtgaacataagctcaagttcaggagataaacctgcaaccaagtaaataaacaaataagtaaatactacacaggaggtgcttgtgtggggaataactagtgggggtccactagaggagtcaaggaatacctcactgaggaggtgtcacttaaaataagaccaaaggaagagaagaaaccagcctcaaagagtcaaagagaagaacctaggagaggaccatggcaataaagagatttcaagggctagaaggaaggccatgttgactagggcctagctgataatggggagagtgtatgagatgaggtgggagaggtgagtagaggtgaaatcacccacagcattttgggccactatcagaagcctgaatctaatgcgaagcctaattaaaagccagggaagagttttatgcaaagaaataacactgcctgatttatgtgtttttttttctaacttgccagaattatgtttcccaatcatgagtgtcaatcttctgcttcaaaaaagcccagtggctcctgattaatagggtaaccacacgttctagtttgctcaagtaaacccaggtttgcccctgtgttcccagtgtaattattaataggcccttcctttcaccctcacaagggtcctagtagaaaccataaattacatggctaacttactgataagcaatacagtaaaatattccttaggttgacattcaagacccttctgaatccggtcccaacttccctctgtaccttgtacctttttccccatcgcttctttgccttacaagtgttctggtcactcttaaatgtaatgatggcagtattctgaatgcaatatgtattctccactccagtgcctttgcacacgctcctgcatcttactggatgttctgtaaccatttcactgacagaactttgagggccagaggtaagaagccttcccagaaactaggcagaaggaataacttcctcctctgtattttgtcagtctctattatagtatgtatcacaactaggttaattatttatacacctgttttctctgctagaatggtagacacttagtagcaaggacagcacctccttttatgtgttttggagtcctcaccacccacacatgcctggctgatagctggtatttcacattggactgctagattaactactgaatataaaagcaaaataaaatgtatagtaaaataataaagttgaacaatgagattttaaaagaccttattgccttcacatctatactattttcattctctaacttcattccaaagtcaaatgtaggaaagtgacaataaaattttaatgaatgaccagaagtaaaaaaatgtataaggctagaagatgtcgagctttcatggaaactaaaaattttcatgttttgggaatacatttctaaataattgtgcaactgaaataaaacaagtatgacatactaccaaaaggcaattttatatactcaccactcttaaaggatcctgaacaaagcctgctcacaagaagtttttgacgtaattgcataacttcagcttccaagatttcaacttttgatctccattttgactgctcctcagacagcaacatagcaaggtgctctgtgtattctctgctgcttttgtctgctggttttgagcggataattgccaaggccagagccagctttgaagttctcaaataccatttttgaacatccatcctggcttttgtccctatcatttaataagaaaaaagttatagaaattctttttaacttgtgcagtgcatttcatttgcttaaaattgattttgcagagtaacattaattaataagtttataataagacttggcaccaagtaacagaaaaaaaaatcagggactgaaaacagtatgagaaaattatgcagaagaaaaatacacacacatgcatattaaatatattaagattcaatagtaggtttagacaatttgacaacttcttgggatggaaaaaacacatattaattcatttagttgtttctaaccagagaaacgtatcagaatctctgagggagctttcaaaatatactccctcaaaattctgatttagcaaattttgagtaggactgaggcttttatattttgaaaatgagtccactgaataaccagaaccattaaattatctatttataaatttaagtccttcctttcctccaacccatctgttaaatcttgcattccttaatgaaccttttacctgctatttctgcctctaaccagccccctccaatctatatggagaacaatcttttaaatatttgcatcatttaagttgcgagtctactctgattcttcacttccaaagatttccaatcgtcattctgagcatacttttccaaaccaacagtgtgtcacagtcttaaaatataaacatacttatggaggccacatgacagaccactgcatacactgctttaatatcatccctactcaagtataagaccctgtggcctcctccaggctttattagattatcatgagagttgtgcacataaaatgtgctaaataaaaatgcttgatgaagagtgaaaagtaagatgacccagaatattcaggactttcagttgccccacctatcctactaacacattttcaaattcttcaccttacatttcaaactttatttccttccatttccccagcctatccttccatattggttggatcacactcaaccagatacagcccaagtgtactcctgtacacatctctgctcataaattttccactgccgtgatgccctgaatttcttatatagctgcccaagccctgactgtgcaccctttaaagaacaactcatataccaacatataaaattttctcaggtctattcccacccacagcgatgtgtaactaactatctgatatcctgtaatttggcactgaaaatgtacaatctaacaaatggcttaatgctgttttattataattagtaatgaacacaaaaatctgtataaaatatgttcatcacagcattattgataatattgaaaatggactgacaaatagttaaattaataaaagtatgactatacaaatgaatattacttagccattaaaaattagatttttagaaattttgtattagcctgagaaagtgttaagtacaacaaatgaagacatgaaattatatggacagtaggaccccagttacaagaaaaatggggaagataaaaaaagtaaatagaaagtataactgtagaattattggtgatttttatcctcttatcttcatttctttgttatttttctaattttattcaattaacatatatcaattataattaaaaatgtaaagaaactagatttccagaatcaaagtacacagctttgtattttcacagctgttgactacactaaggactagatactgtcaagatgaacaaactaattagaattatagctccacttattttagctttctcaacaaccatttcactccctggatcatcctccatctgtcatcagcgataggagcagtggactctgacactcattactctcagaaaagcaccctatgtgcacaggacagacatatggtttttgagaccctccttcaagaagtaagtttgctaatacataatgatactgattttttaaaaggtgcctattcaaagttgtttcagttagaaaagaatctcacattcaattataaacagtgggattccaggctaaaagaaaaaactagaaaaaca

SEQ ID NO: 585461 - DNA, 4001 bp, Homo sapiens
ctgcactcgagcctgggtgacatagcaacactccatctcaggagaaaagaaaagaaaagagaaaaaagaaaagtagatcgagtagatcgaataacatttgctgacagattgtgtgtcaggtgtgagagaaaagcaagagttaggggcaactctaacattctgagccgaaaatctagaaggagtgagtcacatttactgaaatgaaaaggactgagaggagcaggtcttgggatggaggataagaaacgtttactcagccttgtgaggcaaaaagaagatggtaaaaaggtggcaattttctctatatgattttcccaatttatggtgttagaatctggccatatggctaacccaatcaatcctggtggtttggttgaaatggcctaaaaagaagatttacatggtaatgagatttctccactggggtcaaggatcagaggtggtggtgggcctaaagagtacaaaatggcaaagaggtaaataattaatttttattagataaataatgatgagattagaaaaactctaattctaatcccatttctgttgtaaaatacagcagattctctgaactgtttacacaatggctaactctaaagagagatattttagtgcctggctctgaagtcttgggacccatttatgcattcacccatttaccttcctaaactatttctgctctgcctatgcagccattctccagctattccaattaaatatcaactaactggcttctctgtgagtgagacaaagccagaaaaattgacccttagttattggtatgttagttttgtagccttcagatagcactgagctattaaggtatgggctacaagatctggaagtaagccccatcactgctacctatgatcttgagcaagtcactctacccatgagaagccacctgtcgcttcccaaaaaaatgaaaacagcacttactccacgacaagactggacaaataaatatgcaattgcatataaaagcttttgtaaactgaaggtacttattatcatgaatagctctgcttccacaaatcctgacctaagacactgggaatgcagaggcttctctctcatttcagaagcaggacaacagagagaaaacagagatgatgactcagcttctctctcctctcagtaatggatgagactgatgaatttcttcaagaaatatatttgtaaatgagatgtctaagtggagattgctttacactcacccctaagtctcaaccgaggagttgttagtgaatatgatgggccagtggaggggttgggttttgtttccccactaaatataaccagaggcttattcttatatttttctttaacaatcggaataattatctatttgctttccttttcctccaaatacaaattggaaaaataaaatttttataaagagaaacttgttacatatttctagatccattgaggacttcctagctctcctagaaagtctggtctaactatcttctctttccgcatttttatctttcagaaaatgcaatttctcacaaagcaccaaaaaatatttctcccccagagaatcacaatacagtattaggaaggaaagtgttcagtaatcccaccactgggtttcaagtaatttcaagactttaataacacaaaaattgaactcacctaaattgatttctgaaatatccttctgttcaccaaaatctgcatcatgtactgttaaaagtgagaaaaaaaattattattagtcttgccgaaggaaaaaagttcaaaaacactctctgtgcatttgaactaattcttaccattttcttcaggaagatacttaatctgaaaaaaataaatatacagaaaatggataatgtatactagaattaatatttctaaatatccaaaaagcaggactcgacttaccggtacagctgctatgtgggcaaaaagcaaggtaaaaaagagaatgcaagtggatctaatccaagccattgctgcaagtgagctgattttagcacacaccttgtcataaataccgtttagactttaccctgacggtcgtattagaaactttgacccttccatatgtaccgtagtgccaataaaggttgtcaaagataacatcattgactctttcgaggacaaacactaagtttaccttaaatgcttaagctccaaagactggggaaaagtttgaaaaattaatacggaaatgagcatataagaactaataacattcctatagggcagccatagccattcatatcataaaacaggatagacgatccccttaacaataaaaataaaaataatttataaaattattattatttaattctaataaaatataaattcaaattttatggaaatgttataaagcaattattgaaggacataaaaatacctgactctctctctatatgtacatatgtatgaaatattaatagattgttttaatattaatctataaattcattgtcattctagtaaaaaatctaacagggttttcagtggaacttgccaagctgacaaatggttcaattcgcatgaaagagtaaacattgaagaatagataagaaaattctgaaaaggctgaataaagagaaaagaattgcctcaaaagaatatcaggagctttggtaaagttacagtaattagagtgtaatagttccaaaaataaagataaaatgaatctatagactggaataggtaatatccaaatagatgcaagcatatgcagggcttttatgtataagaggaaccaaaaaggcaagagggaaacttgggtctctttcataataatgtgggaataattgcatttccatatgaggaaatacattaaatgtacacctgataccattgacaaaaataaattctagatagattaaaaatttaaatatgaaaatataaacttcaaaaaagaaaatataggaacatatttttaacctttaggtcaagaaagattgcttaaacatgaaaaaaacatagaaattacagaggaaaagaataatacatttgactgtatcaaaatttaaacttctttatgacaaaaacataacatgattaaaagacaagccacaggtgagagatgatatgtatactgcatataattgaataagaataagtattcaggatatgtaaagaatttctacaaatcaataaaaagaacaggagattatctaaggaaaaaatgaacaaaaaatatgagtagcaaattcacaaaagacccagatggccaataaatatgtaaaaagatttttagcctcgtaagtaatcagaaaaattataggttcaaatagcagtaaaataccacctcaagctaagattggcataaattaagaagactgacaatatcaagtgtcaacaagaaggtaagaaaataggaaatctagtaggacatcaatttgatgctatctaatgaagttgaaatgtgcacagttcataagatagaaacttcacttctaggtctatatgctaaaggaactcacacatatgtgcacaaaattccacatagcatattcattgaagtttttttgttatggtaaagaatggggaaaatgtgtttatactaaaagaaaagataaattatggaatatattcagccatgcacaggtaaatgtttaataatcggctcttttaaaaaaagtaaaaacaaacaagcaaacaaacaaaaccaagcctttatttgtagtgtttgttgattgccatggtcaatttcaagctaccaacaccatgtcactgaatgcagtgttgggaagagatgtacacagtgggctccatctgcgccagcacaatactaaatatatgcacacacccacctattcttgcctgcaccagatataagaatctttggcattagagcaatcttcaaggtctagagcctgcatctctctacctcagacttactactgggcaggtgggctagtcctgctgtcaaaaaagcatttcctgtcacaaaagacttttagaaggtgaacagtagagcttcttgagctgtaaaataggaggcatgtcaactgggggcctgcttctga

SEQ ID NO: 585462 - DNA, 4001 bp, Homo sapiens
tctctattaaaaatacaaaaattagcccagcgtggtggtgcacgcctgtaatcccagctactcggtaggctgagccagaagaatcgcttgaacccgggagacggaagtggcagtgagccaagatcaagccactgtactccagcctgggcgacacagcaagactccggctcaaataaaaaaaagaaaaagaaaagaaaagaaaagaaaaagaaaagaaagaaacatcacattgtaactcaaatatgtcccccgccttgagcagcctttcttgactccccaggcagagctgaaggcctcaattacaggattggaaatcaccggatgcctgtgctaagagcctcccccacgagaatctgaactcgttttgtgcctccagcaccagatgcctacctggtaagcccttggcaaaactgtgctgaatgtttaacatggtatcacggacagtgaattaggaacttggagaggaagtggctgctttcttctggaagatctaatcaagactttacacaggaggtgaggtttgcgagatagaaaaaggtatttcagtttatccaggaagttagcacgatggcccagcaaggaacagcagtggtgtggaaaaacggagggcgaggcccgaaggaagcgaggaagtgaagcccggcaggagtgctgggttgtggtgctgaaaagtaggctagcactgggcagccgaagacagcagcgaggcaaaggaagagttgttccctcccctccaggaccggtgatgggaagcggggtggaggttggggtggatgtctaaaagaaacgaggaacagccgggcaacggaaagtagttgctttggagaacgtggttgaggctggaagcaggagttgatgggtaaaaggatgaggagagctcatacctgtagttcttttcatttccatgtacgacgcaaattaccgagctccaaaaaggagatgagcccaaaaccttaacaatcagaggctaaaaatggactaatcagtgaggtgtaagccaagaagttaatgaggtaggaggcacaacacggtcgagagttataagacaaacccaggttattacttgggtcctcgaggatccaattaacttctcattaagtggggctgggtgctcggcttctcaactggcgccagcctcccagcccccagccaacgcctggaatgagactccagggaaattcggccagctggtggatcttcagcgagatgaaggcagtggcgtggacaggccattcacggcgatacccacccaactctgtccaggccttaagcagaaggctgggagcagcacagcacatcaatggcagccacaacgccttcctttccctttccctttccctgcctatcacgcaaacactcccctactaaagtgtatcctccgtgagaacagggctccgtccttcttcacgggatgcgcggagcctagaagggcgcccggccacggcgacccccaagtactggctgaatagtgaatgaactccgcttggccgcacttcagtctatctgggcactgaaagatgcgacccgtggagccgcctaagagagcacagggggaagagaagaagcggaagcctccggaggtcccatcgaggcggcctgcgggacctgagcgccgggctccgtagcgcggtcgggagggggcttctggtcccaggcccaagaccgaccgctttgcaactgaccttccggcgggggcgcccgcgcggggcacagcagccaggctccggcgtcccgctcccgccgccccccggcggcgcccggcgaccgctgcgcacgtaggtcacctgcctcctgctggcgccgcgcggctggcccggcgcgggcggcaggtgcggcccaggtggccgccaggccgggcccggcggggcgctgcgggtgggggacccgggcccggcgcgccgcagctctgcgcagagccgcaggccgaacaacagcacagccccgagtagacaccggcgcaggacgccgcagcccctcccgggcggcctctcccgggccatggcgctacactcggggtcccgcgggccgcgcctggccggcagcagggatgtagccccacaggccggagcggccaactgtgggaactcccccgcgggccggggtgcgggctcggacccgcctccctccctcccgaccgaggaagccccggcgtaaccttatcctgccctgccgagcgcgccccgccgctggaacggtggtgggccgaacgcggtcacagggggccctctccgcccctccggaggtgccagggcccggctgtacagggtccctcaagaggtgccctccgccccggcctccaaagcctgacggagctgaaagacatagggccagaaaaagcgcattcctaacgggatcccgggccataacttcattttctggtattagtgttgttggagaaacacaggaggagggtaggtgagcatacaaggaacagtcaagcagtttgcaccattaagcacaatataaaaataaatagcacttatgcccgggcttacaacttctctctctctctcaagaaagaaagggattggggggcgaagagaatagcactcaatgcagaataatcaaattagagttattctatgtctaaattctgcctgaagccaattcgtgctttctttccgtgttatgaaatgtgtgggggtgaagaagaagagggaaaaagccagctaagacatctgacagcgggttggtgaggaggggggagagagaacagaagttaccatggcatgatgtaaatcaaattaatttagctccaaacacacacctccctgctgtctcgcagaaatacagagggacaaatttatctttcggcaaaatgctccccagctggtatttccatcaccaccttgaccttaattaatcagactgaactctcacagcctgaagtccagtggtggatgttccattttcaattgttagtagaatcctttcccacaacccatttggggtgggtttgggttttaggtttgagtttgggtttagatttttttaagctgtagtcacttttctttttttccttgctttactcttgcattttccatgcttccatgggagactgcgcctgtagacctatcctcttcccccgtaacagcctacagcatggacaagagagaacaaatatggggccctacccccctgcccttttgaatgttgggtattttccgtaggaagccctcgtctctaaaatcctcttctcttcctggcttaagaaagacccaatttattccctgctagtgaacaaagcacttgggctgtttctctacatgtaacaaaatatctccacccagtctagtccaccccctggccacaccagatcctcaggctcctgaacgttccattaggattgacttttgcttttttcttagatgagtccaggggatattgcagatgggttctattttaacaaatttaaacaagtacgagtttttccttacacaaactgagagccagcctcacatcctgtgactatttacttgaactgtgtttgaaccaggaccctgccgttcaagcactatgagactttcaacgaagtactggacctctctgagtttccgttttcccatgaataaacagatctatatatatggcaggattataaatgttgcataaaatattatatgtttcatgcccaaataatactggctcacagaagggtctcaatagtaattattttgttatttaccatggaagaaaatcctggatgttgtcatgaaaaacaaaaggtaagcattgattccaaagtgggcaaagataaagtataaggaaatttacaaataatttatacagcattctctggaattcagagtacccaataatttcaagaaaataacaattaatcatcaagaaacgaactctgttaagttgtataaggctctttaagacagagtttgtagggtgcttgataaacctggattggtaatgtctgatgtagactttgctggaagttttattttctatgcagtcaacacagtgccgctaactagagaagtcatattttg

SEQ ID NO: 585463 - DNA, 4001 bp, Homo sapiens
tttgtagcacaaagaaaggataaatgcttgttgtgatataacccatttaccctgatgtgattattacatattgtaggcctgtgtcaaaatatcccatgtaccccataaatatatacatatatatctactacgtacccaaacaaaagttaaaaattaaaaacaaagcaaggggtgggggtgctggccagagagagaaaaccaaggtagagggggagattctcagcctgaggaaggacctgccaaaaggagtaatgctggagggggagcagtggcaccccaagagcaggcaaaacagattttagatatgcggtgtggggagtgagagcccactggggtcaaggaaccaaaagaaaagaaggaaggtcaaggaacagttggcccaacagcctgttttaggtctgggttggggaggggagatgggcagagcaagaactggagggcggcatgagcatggggcaggagtgactgtgggagaacttggggtagggtgaggacaggaggggagggtgctctgggggagggtggggcttgggaaagatgctcagcactgtcatatgctccagcactcccactttcccactgaaagatgagaacgtgctgagggcccaaggcagctgggcaagagacaggagcagcacaaggtcccaaggtggagaggggcggagggaccagggagggatggtccagcacctgtgggctggagggtggggtcctcaagagggtgaggctgaggatgaaggagtggggaaggggccaccatgaggcagggtccagagcaggcatctgcactggaggggagggggcatctgcgctgccctgcgccctgcctaaggcccaactgccattagcatcagggttccccttgggggtctggaggggagtgggatggagggaagacccccccggataaaaggcagcaccagaaagttagagtcagggacatttgggaacggggaggcataggggcagcactgggtgaaggctgcttgtaggaaaggcccataaggggtgcaggagggaccttcggtggcggggacaggggatgagggcagaggacaccctagaaatggatcagagaacagcacacaggaaggggtagcagggagctgggagggcaaaaggactcagcgggccctgagatgggcagggaggaggtgagagggaatctggtgtccttagatcactggtcattagtaggggtgggatgagagagaggagaggaccctcggagccagaggcgaggggagaatgagctggggatgagagaagtcgcaggaagaatcctctgcccggagcctgcagactccaacccctcagcttgagagtcaggaccccccacagtccccacagcagcaggaagcaccagctccgggtcccgagaaaggagggcccctactccaggagctgcggcccaggagctgagaacacgtcggctccgggagaggacaggacttcagggacctgagagccgccccgagcaccgggggttgtggctgcttcagtggccgcgctggaagggcactcgaatgccattcacaggagcagccccggaggcagcccgggaacccatgggcctcagaaggactggtttgtccgaaaagtgagaggaagcggaggagacgcgaggagagaaagagcaggaggagaccagaaagtgcaggtgatgcgcgatcccgaggaggactgaaaagtgacggggaagcagggctgaagtgtggcggtaacgggccgcgtccagctccctgcgccaccgacagggcacaggagccccgccctgaccgcacagcgctcgccgctacccacccgacccccggaaacgtcccactgctcccgctccgccgaggaccgccaggaacgccactcaccagcagcagctcccggaggtgcaaaagggaagatgccagccagaagcagaaagaccgggcccagccccatggccccgacgtcgccaccctctcagcggctcaagcagtggccggggagaaggcgccgcggaaacttagtcacctggcccggtcccccgaccgctcatccaatgaaactggggcccggaacttagggccaatcacgagcggagagggcggggccacgcttggaagagaaaattccagtgggctggagacctggggagatttagaaggcgggacctggggcccagaaaatggggagcacgcgggagcgcagcctaaagcagggaccagcttcgagtagctgagagtacagctccaacttcataagcacggccagggccctgcctgccctcccggcatcgcgaccacccatccccgcgcccccaccccgaggagcgcgggcctcaccaagcccctttcgccggccgccccattaaaccggctctcactggcttgttccttccaggacagacaacgcgtggctattctcccaacacactccctcaaccgcgcacagcgttactggcaatgagaccagtgaccagatttgcagacctgtttccagatctcagccacctctgcctctcagaagcacctgccgcagtagaaccgctcagaccacaaactctcttagacgtttcagctttataatctccttctcctccctttgactcaaagccaggcccccctttcacccccttatatcctctaagtgtctgaagtctcccagggccgcctctctattcagtccctgggtgatcacagggccaaggaggcggctccctgtggttcactacaacaccaagctctctccagactcccttttccagcctgccttaggacatctgtacctccgaccatagtcccctccaatgtgagagatctacaaagactctctatacgtctgccaccatatcatcctctcttcctcctcagtttctcttaagaacatcaccatccttggtcccttctgatttcctctttccccatcatctccgggagtcaaagtcagctccttcaacgctatttcaatcccacagccacaatcttagtctaggctttcccctcccttcagcctagattactgcacagccttcctaaacacggtgcctgcctcagttacaaccagagtgctccaagccacccacagcgccccatctgctgaatgtcacacatgatggatgcttctactctaccgtggaaaacctcagctgccacaatctgctgtctggcaccacccccatttctctggtgacatctccccagggttgcagtaaacgtgggctctgggatctcctcaccctatcccaccaggatgccactgcctaagcagtctccctcttccaggctattgtaacctctgccttggaacccatcagaccacaccatatccttaaaatcttcccaggctggtctgagtgcagtgtttacaactaattgatcacaaccagttatagatgtctttgtttcttcttcactcccactgtttcacttgactagcctttaaaataaaaagaaaagaaaaaagaaaaaaaggaaaaaaaatcttccagggtagacagtggtgacggtggcacaaccttgtgattacgctagaagccactgagctgcacactttaaaaggataaattgtgtggcatatgaattctcaattctcaataataagaatgctgtcccgaaagcctctttctactaagagaattgccttgtccccaacgcacatctcttagtcgttgggacatctaggcagaggtcatcaaacctagccactgcgtagaaccacctggagagtttttaatatccatgttcccaggccacagccacaacctaggttgttaaatcagtaaacccaggttggacctaaatcttagtatcttttaaagttccctaggtgattccgatgtgtagtcaagttttagaactactgatttagcccgtggtttgaaccttcctgatagtactcattgtgccctgccatgaattttttttttttttttaagagaggagtcttgctgtgtcactcagttggaatgcagtggcatgattatagctcactgcagccttgaatgcctgggctcaagcaatcctccc
